United States Patent Application Publication US 2024/0252682 A1 - sequence listing, part 5

SEQ ID NO: 6233 - protein, 2119 aa, synthetic construct
MPAAKRVKLDGGDKKYSIGLDIGTNSVGWAVITDEYKVPSKKFKVLGNTDRHSIKKNLIGALLFDSGETAEATRLKRTARRRYTRRKNRICYLQEIFSNEMAKVDDSFFHRLEESFLVEEDKKHERHPIFGNIVDEVAYHEKYPTIYHLRKKLVDSTDKADLRLIYLALAHMIKFRGHFLIEGDLNPDNSDVDKLFIQLVQTYNQLFEENPINASGVDAKAILSARLSKSRRLENLIAQLPGEKKNGLFGNLIALSLGLTPNFKSNFDLAEDAKLQLSKDTYDDDLDNLLAQIGDQYADLFLAAKNLSDAILLSDILRVNTEITKAPLSASMIKRYDEHHQDLTLLKALVRQQLPEKYKEIFFDQSKNGYAGYIDGGASQEEFYKFIKPILEKMDGTEELLVKLNREDLLRKQRTFDNGSIPHQIHLGELHAILRRQEDFYPFLKDNREKIEKILTFRIPYYVGPLARGNSRFAWMTRKSEETITPWNFEEVVDKGASAQSFIERMTNFDKNLPNEKVLPKHSLLYEYFTVYNELTKVKYVTEGMRKPAFLSGEQKKAIVDLLFKTNRKVTVKQLKEDYFKKIECFDSVEISGVEDRFNASLGTYHDLLKIIKDKDFLDNEENEDILEDIVLTLTLFEDREMIEERLKTYAHLFDDKVMKQLKRRRYTGWGRLSRKLINGIRDKQSGKTILDFLKSDGFANRNFMQLIHDDSLTFKEDIQKAQVSGQGDSLHEHIANLAGSPAIKKGILQTVKVVDELVKVMGRHKPENIVIEMARENQTTQKGQKNSRERMKRIEEGIKELGSQILKEHPVENTQLQNEKLYLYYLQNGRDMYVDQELDINRLSDYDVDHIVPQSFLKDDSIDNKVLTRSDKARGKSDNVPSEEVVKKMKNYWRQLLNAKLITQRKFDNLTKAERGGLSELDKAGFIKRQLVETRQITKHVAQILDSRMNTKYDENDKLIREVKVITLKSKLVSDFRKDFQFYKVREINNYHHAHDAYLNAVVGTALIKKYPKLESEFVYGDYKVYDVRKMIAKSEQEIGKATAKYFFYSNIMNFFKTEITLANGEIRKRPLIETNGETGEIVWDKGRDFATVRKVLSMPQVNIVKKTEVQTGGFSKESILPKRNSDKLIARKKDWDPKKYGGFDSPTVAYSVLVVAKVEKGKSKKLKSVKELLGITIMERSSFEKNPIDFLEAKGYKEVKKDLIIKLPKYSLFELENGRKRMLASAGELQKGNELALPSKYVNFLYLASHYEKLKGSPEDNEQKQLFVEQHKHYLDEIIEQISEFSKRVILADANLDKVLSAYNKHRDKPIREQAENIIHLFTLTNLGAPAAFKYFDTTIDRKRYTSTKEVLDATLIHQSITGLYETRIDLSQLGGDGGGGGGGLLGRDLLTKLKAQIQFSTEGPQVTWEDRPAMCLVLNLEEEYRLHEKPVPPSIDPSWLQLFPMVWAEKAGMGLANQVPPVVVELKSDASPVAVRQYPMSKEAREGIRPHIQRFLDLGILVPCQSPWNTPLLPVKKPGTNDYRPVQDLREVNKRVQDIHPTVPNPYNLLSSLPPSHTWYSVLDLKDAFFCLKLHPNSQPLFAFEWRDPEKGNTGQLTWTRLPQGFKNSPTLFNEALHRDLASFRALNPQVVMLQYVDDLLVAAPTYRDCKEGTRRLLQELSKLGYRVSAKKAQLCREEVTYLGYLLKGGKRWLTPARKATVMKIPTPTTPRQVREFLGKAGFCRLFIPGFASLAAPLYPLTRPKVPFTWTEAHQEAFGRIKEALLSAPALALPDLTKPFALYVDEKEGVARGVLTQTLGPWRRPVAYLSKKLDPVASGWPTCLKAIAAVALLLKDADKLTLGQNVLVIAPHNLESIVRQPPDRWMTNARMTHYQSLLLNERVSFAPPAILNPATLLPVESDDTPIHICSEILAEETGTRPDLRDQPLPGVPAWYTDGSSFIMDGRRQAGAAIVDNKRTVWASNLPEGTSAQKAELIALTQALRLAEGKSINIYTDSRYAFATAHVHGAIYKQRGWLTSAGKDIKNKEEILALLEAIHLPKRVAIIHCPGHQRGTDPVATGNRKADEAAKQAAQSTRILTETTKNAGKRTADGSEFEKRTADGSEFESPKKKAKVE

SEQ ID NO: 6234 - protein, 2210 aa, synthetic construct
MPAAKRVKLDGGDKKYSIGLDIGTNSVGWAVITDEYKVPSKKFKVLGNTDRHSIKKNLIGALLFDSGETAEATRLKRTARRRYTRRKNRICYLQEIFSNEMAKVDDSFFHRLEESFLVEEDKKHERHPIFGNIVDEVAYHEKYPTIYHLRKKLVDSTDKADLRLIYLALAHMIKFRGHFLIEGDLNPDNSDVDKLFIQLVQTYNQLFEENPINASGVDAKAILSARLSKSRRLENLIAQLPGEKKNGLFGNLIALSLGLTPNFKSNFDLAEDAKLQLSKDTYDDDLDNLLAQIGDQYADLFLAAKNLSDAILLSDILRVNTEITKAPLSASMIKRYDEHHQDLTLLKALVRQQLPEKYKEIFFDQSKNGYAGYIDGGASQEEFYKFIKPILEKMDGTEELLVKLNREDLLRKQRTFDNGSIPHQIHLGELHAILRRQEDFYPFLKDNREKIEKILTFRIPYYVGPLARGNSRFAWMTRKSEETITPWNFEEVVDKGASAQSFIERMTNFDKNLPNEKVLPKHSLLYEYFTVYNELTKVKYVTEGMRKPAFLSGEQKKAIVDLLFKTNRKVTVKQLKEDYFKKIECFDSVEISGVEDRFNASLGTYHDLLKIIKDKDFLDNEENEDILEDIVLTLTLFEDREMIEERLKTYAHLFDDKVMKQLKRRRYTGWGRLSRKLINGIRDKQSGKTILDFLKSDGFANRNFMQLIHDDSLTFKEDIQKAQVSGQGDSLHEHIANLAGSPAIKKGILQTVKVVDELVKVMGRHKPENIVIEMARENQTTQKGQKNSRERMKRIEEGIKELGSQILKEHPVENTQLQNEKLYLYYLQNGRDMYVDQELDINRLSDYDVDHIVPQSFLKDDSIDNKVLTRSDKARGKSDNVPSEEVVKKMKNYWRQLLNAKLITQRKFDNLTKAERGGLSELDKAGFIKRQLVETRQITKHVAQILDSRMNTKYDENDKLIREVKVITLKSKLVSDFRKDFQFYKVREINNYHHAHDAYLNAVVGTALIKKYPKLESEFVYGDYKVYDVRKMIAKSEQEIGKATAKYFFYSNIMNFFKTEITLANGEIRKRPLIETNGETGEIVWDKGRDFATVRKVLSMPQVNIVKKTEVQTGGFSKESILPKRNSDKLIARKKDWDPKKYGGFDSPTVAYSVLVVAKVEKGKSKKLKSVKELLGITIMERSSFEKNPIDFLEAKGYKEVKKDLIIKLPKYSLFELENGRKRMLASAGELQKGNELALPSKYVNFLYLASHYEKLKGSPEDNEQKQLFVEQHKHYLDEIIEQISEFSKRVILADANLDKVLSAYNKHRDKPIREQAENIIHLFTLTNLGAPAAFKYFDTTIDRKRYTSTKEVLDATLIHQSITGLYETRIDLSQLGGDGGGGGGGTLGDQGSRGSDPLPEPRVTLTVEGIPTEFLVNTGAEHSVLTKPMGKMGSKRTVVAGATGSKVYPWTTKRLLKIGQKQVTHSFLVIPECPAPLLGRDLLTKLKAQIQFSTEGPQVTWEDRPAMCLVLNLEEEYRLHEKPVPPSIDPSWLQLFPMVWAEKAGMGLANQVPPVVVELKSDASPVAVRQYPMSKEAREGIRPHIQRFLDLGILVPCQSPWNTPLLPVKKPGTNDYRPVQDLREVNKRVQDIHPTVPNPYNLLSSLPPSHTWYSVLDLKDAFFCLKLHPNSQPLFAFEWRDPEKGNTGQLTWTRLPQGFKNSPTLFNEALHRDLASFRALNPQVVMLQYVDDLLVAAPTYRDCKEGTRRLLQELSKLGYRVSAKKAQLCREEVTYLGYLLKGGKRWLTPARKATVMKIPTPTTPRQVREFLGTAGFCRLWIPGFASLAAPLYPLTRPKVPFTWTEAHQEAFGRIKEALLSAPALALPDLTKPFALYVDEKEGVARGVLTQTLGPWRRPVAYLSKKLDPVASGWPTCLKAIAAVALLLKDADKLTLGQNVLVIAPHNLESIVRQPPDRWMTNARMTHYQSLLLNERVSFAPPAILNPATLLPVESDDTPIHICSEILAEETGTRPDLRDQPLPGVPAWYTDGSSFIMDGRRQAGAAIVDNKRTVWASNLPEGTSAQKAELIALTQALRLAEGKSINIYTDSRYAFATAHVHGAIYKQRGWLTSAGKDIKNKEEILALLEAIHLPKRVAIIHCPGHQRGTDPVATGNRKADEAAKQAAQSTRILTETTKNAGKRTADGSEFEKRTADGSEFESPKKKAKVE

SEQ ID NO: 6235 - protein, 2088 aa, synthetic construct
MPAAKRVKLDGGDKKYSIGLDIGTNSVGWAVITDEYKVPSKKFKVLGNTDRHSIKKNLIGALLFDSGETAEATRLKRTARRRYTRRKNRICYLQEIFSNEMAKVDDSFFHRLEESFLVEEDKKHERHPIFGNIVDEVAYHEKYPTIYHLRKKLVDSTDKADLRLIYLALAHMIKFRGHFLIEGDLNPDNSDVDKLFIQLVQTYNQLFEENPINASGVDAKAILSARLSKSRRLENLIAQLPGEKKNGLFGNLIALSLGLTPNFKSNFDLAEDAKLQLSKDTYDDDLDNLLAQIGDQYADLFLAAKNLSDAILLSDILRVNTEITKAPLSASMIKRYDEHHQDLTLLKALVRQQLPEKYKEIFFDQSKNGYAGYIDGGASQEEFYKFIKPILEKMDGTEELLVKLNREDLLRKQRTFDNGSIPHQIHLGELHAILRRQEDFYPFLKDNREKIEKILTFRIPYYVGPLARGNSRFAWMTRKSEETITPWNFEEVVDKGASAQSFIERMTNFDKNLPNEKVLPKHSLLYEYFTVYNELTKVKYVTEGMRKPAFLSGEQKKAIVDLLFKTNRKVTVKQLKEDYFKKIECFDSVEISGVEDRFNASLGTYHDLLKIIKDKDFLDNEENEDILEDIVLTLTLFEDREMIEERLKTYAHLFDDKVMKQLKRRRYTGWGRLSRKLINGIRDKQSGKTILDFLKSDGFANRNFMQLIHDDSLTFKEDIQKAQVSGQGDSLHEHIANLAGSPAIKKGILQTVKVVDELVKVMGRHKPENIVIEMARENQTTQKGQKNSRERMKRIEEGIKELGSQILKEHPVENTQLQNEKLYLYYLQNGRDMYVDQELDINRLSDYDVDHIVPQSFLKDDSIDNKVLTRSDKARGKSDNVPSEEVVKKMKNYWRQLLNAKLITQRKFDNLTKAERGGLSELDKAGFIKRQLVETRQITKHVAQILDSRMNTKYDENDKLIREVKVITLKSKLVSDFRKDFQFYKVREINNYHHAHDAYLNAVVGTALIKKYPKLESEFVYGDYKVYDVRKMIAKSEQEIGKATAKYFFYSNIMNFFKTEITLANGEIRKRPLIETNGETGEIVWDKGRDFATVRKVLSMPQVNIVKKTEVQTGGFSKESILPKRNSDKLIARKKDWDPKKYGGFDSPTVAYSVLVVAKVEKGKSKKLKSVKELLGITIMERSSFEKNPIDFLEAKGYKEVKKDLIIKLPKYSLFELENGRKRMLASAGELQKGNELALPSKYVNFLYLASHYEKLKGSPEDNEQKQLFVEQHKHYLDEIIEQISEFSKRVILADANLDKVLSAYNKHRDKPIREQAENIIHLFTLTNLGAPAAFKYFDTTIDRKRYTSTKEVLDATLIHQSITGLYETRIDLSQLGGDGGGGGGGTLNLEDEYRLYETSAEPEVSPGSTWLSDFPQAWAETGGMGLAVRQAPLIIPLKATSTPVSIKQYPMSQEAKLGIKPHIQRLLDQGILVPCQSPWNTPLLPVKKPGTNDYRPVQDLREVNKRVEDIHPTVPNPYNLLSGLPPSHRWYTVLDLKDAFFCLRLHPTSQPLFAFEWRDPGMGISGQLTWTRLPQGFKNSPTLFNEALHRDLADFRIQHPDLILLQYVDDILLAATSELDCQQGTRALLLTLGNLGYRASAKKAQLCQKQVKYLGYLLKEGQRWLTEARKETVMGQPTPKTPRQLREFLGKAGFCRLFIPGFAEMAAPLYPLTKPGTLFNWGPDQQKAYQEIKQALLTAPALGLPDLTKPFELFVDEKQGYAKGVLTQKLGPWRRPVAYLSKKLDPVAAGWPPCLRMVAAIAVLRKDAGKLTMGQPLVILAPHAVEALVKQPPDRWLSNARMTHYQAMLLDTDRVQFGPVVALNPATLLPLPEEGAPHDCLEILAETHGTRPDLTDQPIPDADHTWYTDGSSFLQEGQRKAGAAVTTETEVIWARALPAGTSAQRAELIALTQALKMAEGKRLNVYTDSRYAFATAHIHGEIYRRRGWLTSEGREIKNKSEILALLKALFLPKRLSIIHCLGHQKGDSAEARGNRLADQAAREAAIKTPPDTSTLLAGKRTADGSEFEKRTADGSEFESPKKKAKVE

SEQ ID NO: 6236 - protein, 2088 aa, synthetic construct
MPAAKRVKLDGGDKKYSIGLDIGTNSVGWAVITDEYKVPSKKFKVLGNTDRHSIKKNLIGALLFDSGETAEATRLKRTARRRYTRRKNRICYLQEIFSNEMAKVDDSFFHRLEESFLVEEDKKHERHPIFGNIVDEVAYHEKYPTIYHLRKKLVDSTDKADLRLIYLALAHMIKFRGHFLIEGDLNPDNSDVDKLFIQLVQTYNQLFEENPINASGVDAKAILSARLSKSRRLENLIAQLPGEKKNGLFGNLIALSLGLTPNFKSNFDLAEDAKLQLSKDTYDDDLDNLLAQIGDQYADLFLAAKNLSDAILLSDILRVNTEITKAPLSASMIKRYDEHHQDLTLLKALVRQQLPEKYKEIFFDQSKNGYAGYIDGGASQEEFYKFIKPILEKMDGTEELLVKLNREDLLRKQRTFDNGSIPHQIHLGELHAILRRQEDFYPFLKDNREKIEKILTFRIPYYVGPLARGNSRFAWMTRKSEETITPWNFEEVVDKGASAQSFIERMTNFDKNLPNEKVLPKHSLLYEYFTVYNELTKVKYVTEGMRKPAFLSGEQKKAIVDLLFKTNRKVTVKQLKEDYFKKIECFDSVEISGVEDRFNASLGTYHDLLKIIKDKDFLDNEENEDILEDIVLTLTLFEDREMIEERLKTYAHLFDDKVMKQLKRRRYTGWGRLSRKLINGIRDKQSGKTILDFLKSDGFANRNFMQLIHDDSLTFKEDIQKAQVSGQGDSLHEHIANLAGSPAIKKGILQTVKVVDELVKVMGRHKPENIVIEMARENQTTQKGQKNSRERMKRIEEGIKELGSQILKEHPVENTQLQNEKLYLYYLQNGRDMYVDQELDINRLSDYDVDHIVPQSFLKDDSIDNKVLTRSDKARGKSDNVPSEEVVKKMKNYWRQLLNAKLITQRKFDNLTKAERGGLSELDKAGFIKRQLVETRQITKHVAQILDSRMNTKYDENDKLIREVKVITLKSKLVSDFRKDFQFYKVREINNYHHAHDAYLNAVVGTALIKKYPKLESEFVYGDYKVYDVRKMIAKSEQEIGKATAKYFFYSNIMNFFKTEITLANGEIRKRPLIETNGETGEIVWDKGRDFATVRKVLSMPQVNIVKKTEVQTGGFSKESILPKRNSDKLIARKKDWDPKKYGGFDSPTVAYSVLVVAKVEKGKSKKLKSVKELLGITIMERSSFEKNPIDFLEAKGYKEVKKDLIIKLPKYSLFELENGRKRMLASAGELQKGNELALPSKYVNFLYLASHYEKLKGSPEDNEQKQLFVEQHKHYLDEIIEQISEFSKRVILADANLDKVLSAYNKHRDKPIREQAENIIHLFTLTNLGAPAAFKYFDTTIDRKRYTSTKEVLDATLIHQSITGLYETRIDLSQLGGDGGGGGGGTLNIEDEYRLHETSKGPDVPLGSTWLSDFPQAWAETGGMGLAVRQAPLIIPLKATSTPVSIKQYPMSQEARLGIKPHIQRLLDQGILVPCQSPWNTPLLPVKKPGTNDYRPVQDLREVNKRVEDIHPTVPNPYNLLSGLPPSHQWYTVLDLKDAFFCLRLHPTSQSLFAFEWRDPEMGISGQLTWTRLPQGFKNSPTLFNEALHRDLADFRIQHPDLILLQYVDDLLLAATSELDCQQGTRALLQTLGDLGYRASAKKAQICQKQVKYLGYLLKEGQRWLTEARKETVMGQPTPKTPRQLREFLGTAGFCRLWIPGFAEMAAPLYPLTKPGTLFEWGPDQQKAYQEIKQALLTAPALGLPDLTKPFELFVDEKQGYAKGVLTQKLGPWRRPVAYLSKKLDPVAAGWPPCLRMVAAIAVLTKDAGKLTMGQPLVILAPHAVEALVKQPPDRWLSNARMTHYQALLLDTDRVQFGPIVALNPATLLPLPEEGLQHDCLDILAEAHGTRPDLTDQPLPDADHTWYTDGSSFLQEGQRKAGAAVTTETEVVWAKALPAGTSAQRAELIALTQALKMAEGKKLNVYTDSRYAFATAHIHGEIYRRRGWLTSEGKEIKNKDEILALLKALFLPKRLSIIHCPGHQKGNRAEARGNRMADQAAREVATRETPETSTLLAGKRTADGSEFEKRTADGSEFESPKKKAKVE

SEQ ID NO: 6237 - protein, 2088 aa, synthetic construct
MPAAKRVKLDGGDKKYSIGLDIGTNSVGWAVITDEYKVPSKKFKVLGNTDRHSIKKNLIGALLFDSGETAEATRLKRTARRRYTRRKNRICYLQEIFSNEMAKVDDSFFHRLEESFLVEEDKKHERHPIFGNIVDEVAYHEKYPTIYHLRKKLVDSTDKADLRLIYLALAHMIKFRGHFLIEGDLNPDNSDVDKLFIQLVQTYNQLFEENPINASGVDAKAILSARLSKSRRLENLIAQLPGEKKNGLFGNLIALSLGLTPNFKSNFDLAEDAKLQLSKDTYDDDLDNLLAQIGDQYADLFLAAKNLSDAILLSDILRVNTEITKAPLSASMIKRYDEHHQDLTLLKALVRQQLPEKYKEIFFDQSKNGYAGYIDGGASQEEFYKFIKPILEKMDGTEELLVKLNREDLLRKQRTFDNGSIPHQIHLGELHAILRRQEDFYPFLKDNREKIEKILTFRIPYYVGPLARGNSRFAWMTRKSEETITPWNFEEVVDKGASAQSFIERMTNFDKNLPNEKVLPKHSLLYEYFTVYNELTKVKYVTEGMRKPAFLSGEQKKAIVDLLFKTNRKVTVKQLKEDYFKKIECFDSVEISGVEDRFNASLGTYHDLLKIIKDKDFLDNEENEDILEDIVLTLTLFEDREMIEERLKTYAHLFDDKVMKQLKRRRYTGWGRLSRKLINGIRDKQSGKTILDFLKSDGFANRNFMQLIHDDSLTFKEDIQKAQVSGQGDSLHEHIANLAGSPAIKKGILQTVKVVDELVKVMGRHKPENIVIEMARENQTTQKGQKNSRERMKRIEEGIKELGSQILKEHPVENTQLQNEKLYLYYLQNGRDMYVDQELDINRLSDYDVDHIVPQSFLKDDSIDNKVLTRSDKARGKSDNVPSEEVVKKMKNYWRQLLNAKLITQRKFDNLTKAERGGLSELDKAGFIKRQLVETRQITKHVAQILDSRMNTKYDENDKLIREVKVITLKSKLVSDFRKDFQFYKVREINNYHHAHDAYLNAVVGTALIKKYPKLESEFVYGDYKVYDVRKMIAKSEQEIGKATAKYFFYSNIMNFFKTEITLANGEIRKRPLIETNGETGEIVWDKGRDFATVRKVLSMPQVNIVKKTEVQTGGFSKESILPKRNSDKLIARKKDWDPKKYGGFDSPTVAYSVLVVAKVEKGKSKKLKSVKELLGITIMERSSFEKNPIDFLEAKGYKEVKKDLIIKLPKYSLFELENGRKRMLASAGELQKGNELALPSKYVNFLYLASHYEKLKGSPEDNEQKQLFVEQHKHYLDEIIEQISEFSKRVILADANLDKVLSAYNKHRDKPIREQAENIIHLFTLTNLGAPAAFKYFDTTIDRKRYTSTKEVLDATLIHQSITGLYETRIDLSQLGGDGGGGGGGTLNIEDEHRLHETSKEPDVSLGSTWLSDFPQAWAETGGMGLAVRQAPLIIPLKATSTPVSIKQYPMSQEARLGIKPHIQRLLDQGILVPCQSPWNTPLLPVKKPGTNDYRPVQDLREVNKRVEDIHPTVPNPYNLLSGLPPSHQWYTVLDLKDAFFCLRLHPTSQPLFAFEWRDPEMGISGQLTWTRLPQGFKNSPTLFNEALHRDLADFRIQHPDLILLQYVDDLLLAATSELDCQQGTRALLQTLGNLGYRASAKKAQICQKQVKYLGYLLKEGQRWLTEARKETVMGQPTPKTPRQLREFLGTAGFCRLWIPGFAEMAAPLYPLTKPGTLFNWGPDQQKAYQEIKQALLTAPALGLPDLTKPFELFVDEKQGYAKGVLTQKLGPWRRPVAYLSKKLDPVAAGWPPCLRMVAAIAVLTKDAGKLTMGQPLVILAPHAVEALVKQPPDRWLSNARMTHYQALLLDTDRVQFGPVVALNPATLLPLPEEGLQHNCLDILAEAHGTRPDLTDQPLPDADHTWYTDGSSLLQEGQRKAGAAVTTETEVIWAKALPAGTSAQRAELIALTQALKMAEGKKLNVYTDSRYAFATAHIHGEIYRRRGWLTSEGKEIKNKDEILALLKALFLPKRLSIIHCPGHQKGHSAEARGNRMADQAARKAAITETPDTSTLLAGKRTADGSEFEKRTADGSEFESPKKKAKVE

SEQ ID NO: 6238 - protein, 2088 aa, synthetic construct; identical to SEQ ID NO: 6237

SEQ ID NO: 6239 - protein, 2088 aa, synthetic construct
MPAAKRVKLDGGDKKYSIGLDIGTNSVGWAVITDEYKVPSKKFKVLGNTDRHSIKKNLIGALLFDSGETAEATRLKRTARRRYTRRKNRICYLQEIFSNEMAKVDDSFFHRLEESFLVEEDKKHERHPIFGNIVDEVAYHEKYPTIYHLRKKLVDSTDKADLRLIYLALAHMIKFRGHFLIEGDLNPDNSDVDKLFIQLVQTYNQLFEENPINASGVDAKAILSARLSKSRRLENLIAQLPGEKKNGLFGNLIALSLGLTPNFKSNFDLAEDAKLQLSKDTYDDDLDNLLAQIGDQYADLFLAAKNLSDAILLSDILRVNTEITKAPLSASMIKRYDEHHQDLTLLKALVRQQLPEKYKEIFFDQSKNGYAGYIDGGASQEEFYKFIKPILEKMDGTEELLVKLNREDLLRKQRTFDNGSIPHQIHLGELHAILRRQEDFYPFLKDNREKIEKILTFRIPYYVGPLARGNSRFAWMTRKSEETITPWNFEEVVDKGASAQSFIERMTNFDKNLPNEKVLPKHSLLYEYFTVYNELTKVKYVTEGMRKPAFLSGEQKKAIVDLLFKTNRKVTVKQLKEDYFKKIECFDSVEISGVEDRFNASLGTYHDLLKIIKDKDFLDNEENEDILEDIVLTLTLFEDREMIEERLKTYAHLFDDKVMKQLKRRRYTGWGRLSRKLINGIRDKQSGKTILDFLKSDGFANRNFMQLIHDDSLTFKEDIQKAQVSGQGDSLHEHIANLAGSPAIKKGILQTVKVVDELVKVMGRHKPENIVIEMARENQTTQKGQKNSRERMKRIEEGIKELGSQILKEHPVENTQLQNEKLYLYYLQNGRDMYVDQELDINRLSDYDVDHIVPQSFLKDDSIDNKVLTRSDKARGKSDNVPSEEVVKKMKNYWRQLLNAKLITQRKFDNLTKAERGGLSELDKAGFIKRQLVETRQITKHVAQILDSRMNTKYDENDKLIREVKVITLKSKLVSDFRKDFQFYKVREINNYHHAHDAYLNAVVGTALIKKYPKLESEFVYGDYKVYDVRKMIAKSEQEIGKATAKYFFYSNIMNFFKTEITLANGEIRKRPLIETNGETGEIVWDKGRDFATVRKVLSMPQVNIVKKTEVQTGGFSKESILPKRNSDKLIARKKDWDPKKYGGFDSPTVAYSVLVVAKVEKGKSKKLKSVKELLGITIMERSSFEKNPIDFLEAKGYKEVKKDLIIKLPKYSLFELENGRKRMLASAGELQKGNELALPSKYVNFLYLASHYEKLKGSPEDNEQKQLFVEQHKHYLDEIIEQISEFSKRVILADANLDKVLSAYNKHRDKPIREQAENIIHLFTLTNLGAPAAFKYFDTTIDRKRYTSTKEVLDATLIHQSITGLYETRIDLSQLGGDGGGGGGGTLNIEDEYRLHEISTEPDVSPGSTWLSDFPQAWAETGGMGLAVRQAPLIIPLKATSTPVSIKQYPMSQEAKLGIKPHIQRLLDQGILVPCQSPWNTPLLPVKKPGTNDYRPVQGLREVNKRVEDIHPTVPNPYNLLSGLPTSHRWYTVLDLKDAFFCLRLHPTSQPLFASEWRDPGMGISGQLTWTRLPQGFKNSPTLFNEALHRGLADFRIQHPDLILLQYVDDLLLAATSELDCQQGTRALLKTLGNLGYRASAKKAQICQKQVKYLGYLLREGQRWLTEARKETVMGQPTPKTPRQLREFLGTAGFCRLWIPRFAEMAAPLYPLTKPGTLFNWGPDQQKAYHEIKQALLTAPALGLPDLTKPFELFVDEKQGYAKGVLTQKLGPWRRPVAYLSKKLDPVAAGWPPCLRMVAAIAVLTKDAGKLTMGQPLVILAPHAVEALVKQPPDRWLSNARMTHYQAMLLDTDRVQFGPVVALNPATLLPLPEEGAPHDCLEILAETHGTEPDLTDQPIPDADHTWYTDGSSFLQEGQRKAGAAVTTETEVIWARALPAGTSAQRAELIALTQALKMAEGKRLNVYTDSRYAFATAHIHGEIYKRRGWLTSEGREIKNKSEILALLKALFLPKRLSIIHCLGHQKGDSAEARGNRLADQAAREAAIKTPPDTSTLLAGKRTADGSEFEKRTADGSEFESPKKKAKVE

SEQ ID NO: 6240 - protein, 2082 aa, synthetic construct
MPAAKRVKLDGGDKKYSIGLDIGTNSVGWAVITDEYKVPSKKFKVLGNTDRHSIKKNLIGALLFDSGETAEATRLKRTARRRYTRRKNRICYLQEIFSNEMAKVDDSFFHRLEESFLVEEDKKHERHPIFGNIVDEVAYHEKYPTIYHLRKKLVDSTDKADLRLIYLALAHMIKFRGHFLIEGDLNPDNSDVDKLFIQLVQTYNQLFEENPINASGVDAKAILSARLSKSRRLENLIAQLPGEKKNGLFGNLIALSLGLTPNFKSNFDLAEDAKLQLSKDTYDDDLDNLLAQIGDQYADLFLAAKNLSDAILLSDILRVNTEITKAPLSASMIKRYDEHHQDLTLLKALVRQQLPEKYKEIFFDQSKNGYAGYIDGGASQEEFYKFIKPILEKMDGTEELLVKLNREDLLRKQRTFDNGSIPHQIHLGELHAILRRQEDFYPFLKDNREKIEKILTFRIPYYVGPLARGNSRFAWMTRKSEETITPWNFEEVVDKGASAQSFIERMTNFDKNLPNEKVLPKHSLLYEYFTVYNELTKVKYVTEGMRKPAFLSGEQKKAIVDLLFKTNRKVTVKQLKEDYFKKIECFDSVEISGVEDRFNASLGTYHDLLKIIKDKDFLDNEENEDILEDIVLTLTLFEDREMIEERLKTYAHLFDDKVMKQLKRRRYTGWGRLSRKLINGIRDKQSGKTILDFLKSDGFANRNFMQLIHDDSLTFKEDIQKAQVSGQGDSLHEHIANLAGSPAIKKGILQTVKVVDELVKVMGRHKPENIVIEMARENQTTQKGQKNSRERMKRIEEGIKELGSQILKEHPVENTQLQNEKLYLYYLQNGRDMYVDQELDINRLSDYDVDHIVPQSFLKDDSIDNKVLTRSDKARGKSDNVPSEEVVKKMKNYWRQLLNAKLITQRKFDNLTKAERGGLSELDKAGFIKRQLVETRQITKHVAQILDSRMNTKYDENDKLIREVKVITLKSKLVSDFRKDFQFYKVREINNYHHAHDAYLNAVVGTALIKKYPKLESEFVYGDYKVYDVRKMIAKSEQEIGKATAKYFFYSNIMNFFKTEITLANGEIRKRPLIETNGETGEIVWDKGRDFATVRKVLSMPQVNIVKKTEVQTGGFSKESILPKRNSDKLIARKKDWDPKKYGGFDSPTVAYSVLVVAKVEKGKSKKLKSVKELLGITIMERSSFEKNPIDFLEAKGYKEVKKDLIIKLPKYSLFELENGRKRMLASAGELQKGNELALPSKYVNFLYLASHYEKLKGSPEDNEQKQLFVEQHKHYLDEIIEQISEFSKRVILADANLDKVLSAYNKHRDKPIREQAENIIHLFTLTNLGAPAAFKYFDTTIDRKRYTSTKEVLDATLIHQSITGLYETRIDLSQLGGDGGGGGGGTLQLDDEYRLYSPLVKPDQNIQFWLEQFPQAWAETAGMGLAKQVPPQVIQLKASATPVSVRQYPLSKEAQEGIRPHVQRLIQQGILVPVQSPWNTPLLPVRKPGTNDYRPVQDLREVNKRVQDIHPTVPNPYNLLCALPPQRSWYTVLDLKDAFFCLRLHPTSQPLFAFEWRDPGTGRTGQLTWTRLPQGFKNSPTIFNEALHRDLANFRIQHPQVTLLQYVDDLLLAGATKQDCLEGTKALLLELSDLGYRASAKKAQICRREVTYLGYSLRDGQRWLTEARKKTVVQIPAPTTAKQVREFLGTAGFCRLWIPGFATLAAPLYPLTKPKGEFSWAPEHQKAFDAIKKALLSAPALALPDVTKPFTLYVDERKGVARGVLTQTLGPWRRPVAYLSKKLDPVASGWPVCLKAIAAVAILVKDADKLTLGQNITVIAPHALENIVRQPPDRWMTNARMTHYQSLLLTERVTFAPPAALNPATLLPEETDEPVTHDCHQLLIEETGVRKDLTDIPLTGEVLTWFTDGSSYVVEGKRMAGAAVVDGTRTIWASSLPEGTSAQKAELMALTQALRLAEGKSINIYTDSRYAFATAHVHGAIYKQRGWLTSAGREIKNKEEILSLLEALHLPKRLAIIHCPGHQKAKDPISRGNQMADRVAKQAAQGVNLLAGKRTADGSEFEKRTADGSEFESPKKKAKVE

SEQ ID NO: 6241 - protein, 2079 aa, synthetic construct
MPAAKRVKLDGGDKKYSIGLDIGTNSVGWAVITDEYKVPSKKFKVLGNTDRHSIKKNLIGALLFDSGETAEATRLKRTARRRYTRRKNRICYLQEIFSNEMAKVDDSFFHRLEESFLVEEDKKHERHPIFGNIVDEVAYHEKYPTIYHLRKKLVDSTDKADLRLIYLALAHMIKFRGHFLIEGDLNPDNSDVDKLFIQLVQTYNQLFEENPINASGVDAKAILSARLSKSRRLENLIAQLPGEKKNGLFGNLIALSLGLTPNFKSNFDLAEDAKLQLSKDTYDDDLDNLLAQIGDQYADLFLAAKNLSDAILLSDILRVNTEITKAPLSASMIKRYDEHHQDLTLLKALVRQQLPEKYKEIFFDQSKNGYAGYIDGGASQEEFYKFIKPILEKMDGTEELLVKLNREDLLRKQRTFDNGSIPHQIHLGELHAILRRQEDFYPFLKDNREKIEKILTFRIPYYVGPLARGNSRFAWMTRKSEETITPWNFEEVVDKGASAQSFIERMTNFDKNLPNEKVLPKHSLLYEYFTVYNELTKVKYVTEGMRKPAFLSGEQKKAIVDLLFKTNRKVTVKQLKEDYFKKIECFDSVEISGVEDRFNASLGTYHDLLKIIKDKDFLDNEENEDILEDIVLTLTLFEDREMIEERLKTYAHLFDDKVMKQLKRRRYTGWGRLSRKLINGIRDKQSGKTILDFLKSDGFANRNFMQLIHDDSLTFKEDIQKAQVSGQGDSLHEHIANLAGSPAIKKGILQTVKVVDELVKVMGRHKPENIVIEMARENQTTQKGQKNSRERMKRIEEGIKELGSQILKEHPVENTQLQNEKLYLYYLQNGRDMYVDQELDINRLSDYDVDHIVPQSFLKDDSIDNKVLTRSDKARGKSDNVPSEEVVKKMKNYWRQLLNAKLITQRKFDNLTKAERGGLSELDKAGFIKRQLVETRQITKHVAQILDSRMNTKYDENDKLIREVKVITLKSKLVSDFRKDFQFYKVREINNYHHAHDAYLNAVVGTALIKKYPKLESEFVYGDYKVYDVRKMIAKSEQEIGKATAKYFFYSNIMNFFKTEITLANGEIRKRPLIETNGETGEIVWDKGRDFATVRKVLSMPQVNIVKKTEVQTGGFSKESILPKRNSDKLIARKKDWDPKKYGGFDSPTVAYSVLVVAKVEKGKSKKLKSVKELLGITIMERSSFEKNPIDFLEAKGYKEVKKDLIIKLPKYSLFELENGRKRMLASAGELQKGNELALPSKYVNFLYLASHYEKLKGSPEDNEQKQLFVEQHKHYLDEIIEQISEFSKRVILADANLDKVLSAYNKHRDKPIREQAENIIHLFTLTNLGAPAAFKYFDTTIDRKRYTSTKEVLDATLIHQSITGLYETRIDLSQLGGDGGGGGGGIPWLMKKPLQLTTLVPLQEYEERLLKQTMLTGSYKEKLQSLFLKYDALWQHWENQVGHRRIKPHHIATGTVNPRPQKQYPINPKAKASIQTVINDLLKQGVLIQQNSIMNTPVYPVPKPDGKWRMVLDYREVNKTIPLIAAQNQHSAGILSSIFRGKYKTTLDLSNGFWAHSITPESYWLTAFTWLGQQYCWTRLPQGFLNSPALFNADVVDLLKEVPNVQVYVDDIYISHDDPREHLEQLEKVFSLLLNAGYVVSLKKSEIAQHEVEFLGFNITKEGRGLTETFKQKLLNITPPRDLKQLQSILGKLNFARNFIPNFSELVKPLYNIIATAPGKYITWTTDNSQQLQNIISMLNSAENLEERNPEVRLIMKVNTSPSAGYIRFYNEFAKRPIMYLNYVYTKAEVKFTNTEKLLTTIHKGLIKALDLGMGQEILVYSPIVSMTKIQKTPLPERKALPIRWITWMSYLEDPRIQFHYDKTLPELQQVPTVTDDIIAKIKHPSEFSMVFYTDGSAIKHPNVNKSHNAGMGIAQVQFKPEFTVINTWSIPLGDHTAQLAEVAAVEFACKKALKIDGPVLIVTDSFYVAESVNKELPYWQSNGFFNNKKKPLKHVSKWKSIADCIQLKPDIIIIHEKGHQPTASTFHTEGNNLADKLATQGSYVVNAGKRTADGSEFEKRTADGSEFESPKKKAKVE

SEQ ID NO: 6242 - protein, 2086 aa, synthetic construct
MPAAKRVKLDGGDKKYSIGLDIGTNSVGWAVITDEYKVPSKKFKVLGNTDRHSIKKNLIGALLFDSGETAEATRLKRTARRRYTRRKNRICYLQEIFSNEMAKVDDSFFHRLEESFLVEEDKKHERHPIFGNIVDEVAYHEKYPTIYHLRKKLVDSTDKADLRLIYLALAHMIKFRGHFLIEGDLNPDNSDVDKLFIQLVQTYNQLFEENPINASGVDAKAILSARLSKSRRLENLIAQLPGEKKNGLFGNLIALSLGLTPNFKSNFDLAEDAKLQLSKDTYDDDLDNLLAQIGDQYADLFLAAKNLSDAILLSDILRVNTEITKAPLSASMIKRYDEHHQDLTLLKALVRQQLPEKYKEIFFDQSKNGYAGYIDGGASQEEFYKFIKPILEKMDGTEELLVKLNREDLLRKQRTFDNGSIPHQIHLGELHAILRRQEDFYPFLKDNREKIEKILTFRIPYYVGPLARGNSRFAWMTRKSEETITPWNFEEVVDKGASAQSFIERMTNFDKNLPNEKVLPKHSLLYEYFTVYNELTKVKYVTEGMRKPAFLSGEQKKAIVDLLFKTNRKVTVKQLKEDYFKKIECFDSVEISGVEDRFNASLGTYHDLLKIIKDKDFLDNEENEDILEDIVLTLTLFEDREMIEERLKTYAHLFDDKVMKQLKRRRYTGWGRLSRKLINGIRDKQSGKTILDFLKSDGFANRNFMQLIHDDSLTFKEDIQKAQVSGQGDSLHEHIANLAGSPAIKKGILQTVKVVDELVKVMGRHKPENIVIEMARENQTTQKGQKNSRERMKRIEEGIKELGSQILKEHPVENTQLQNEKLYLYYLQNGRDMYVDQELDINRLSDYDVDHIVPQSFLKDDSIDNKVLTRSDKARGKSDNVPSEEVVKKMKNYWRQLLNAKLITQRKFDNLTKAERGGLSELDKAGFIKRQLVETRQITKHVAQILDSRMNTKYDENDKLIREVKVITLKSKLVSDFRKDFQFYKVREINNYHHAHDAYLNAVVGTALIKKYPKLESEFVYGDYKVYDVRKMIAKSEQEIGKATAKYFFYSNIMNFFKTEITLANGEIRKRPLIETNGETGEIVWDKGRDFATVRKVLSMPQVNIVKKTEVQTGGFSKESILPKRNSDKLIARKKDWDPKKYGGFDSPTVAYSVLVVAKVEKGKSKKLKSVKELLGITIMERSSFEKNPIDFLEAKGYKEVKKDLIIKLPKYSLFELENGRKRMLASAGELQKGNELALPSKYVNFLYLASHYEKLKGSPEDNEQKQLFVEQHKHYLDEIIEQISEFSKRVILADANLDKVLSAYNKHRDKPIREQAENIIHLFTLTNLGAPAAFKYFDTTIDRKRYTSTKEVLDATLIHQSITGLYETRIDLSQLGGDGGGGGGGVLNLEEEYRLHEKPVPSSIDPSWLQLFPTVWAERAGMGLANQVPPVVVELRSGASPVAVRQYPMSKEAREGIRPHIQRFLDLGVLVPCQSPWNTPLLPVKKPGTNDYRPVQDLREINKRVQDIHPTVPNPYNLLSSLPPSHTWYSVLDLKDAFFCLKLHPNSQPLFAFEWRDPEKGNTGQLTWTRLPQGFKNSPTLFDEALHRDLAPFRALNPQVVLLQYVDDLLVAAPTYRDCKEGTQKLLQELSKLGYRVSAKKAQLCQKEVTYLGYLLKEGKRWLTPARKATVMKIPPPTTPRQVREFLGTAGFCRLWIPGFASLAAPLYPLTKESIPFIWTEEHQKAFDRIKEALLSAPALALPDLTKPFTLYVDERAGVARGVLTQTLGPWRRPVAYLSKKLDPVASGWPTCLKAVAAVALLLKDADKLTLGQNVTVIASHSLESIVRQPPDRWMTNARMTHYQSLLLNERVSFAPPAVLNPATLLPVESEATPVHRCSEILAEETGTRRDLKDQPLPGVPAWYTDGSSFIAEGKRRAGAAIVDGKRTVWASSLPEGTSAQKAELVALTQALRLAEGKDINIYTDSRYAFATAHIHGAIYKQRGLLTSAGKDIKNKEEILALLEAIHLPKRVAIIHCPGHQKGNDPVATGNRRADEAAKQAALSTRVLAETTKPAGKRTADGSEFEKRTADGSEFESPKKKAKVE

SEQ ID NO: 6243 - protein, 2086 aa, synthetic construct
MPAAKRVKLDGGDKKYSIGLDIGTNSVGWAVITDEYKVPSKKFKVLGNTDRHSIKKNLIGALLFDSGETAEATRLKRTARRRYTRRKNRICYLQEIFSNEMAKVDDSFFHRLEESFLVEEDKKHERHPIFGNIVDEVAYHEKYPTIYHLRKKLVDSTDKADLRLIYLALAHMIKFRGHFLIEGDLNPDNSDVDKLFIQLVQTYNQLFEENPINASGVDAKAILSARLSKSRRLENLIAQLPGEKKNGLFGNLIALSLGLTPNFKSNFDLAEDAKLQLSKDTYDDDLDNLLAQIGDQYADLFLAAKNLSDAILLSDILRVNTEITKAPLSASMIKRYDEHHQDLTLLKALVRQQLPEKYKEIFFDQSKNGYAGYIDGGASQEEFYKFIKPILEKMDGTEELLVKLNREDLLRKQRTFDNGSIPHQIHLGELHAILRRQEDFYPFLKDNREKIEKILTFRIPYYVGPLARGNSRFAWMTRKSEETITPWNFEEVVDKGASAQSFIERMTNFDKNLPNEKVLPKHSLLYEYFTVYNELTKVKYVTEGMRKPAFLSGEQKKAIVDLLFKTNRKVTVKQLKEDYFKKIECFDSVEISGVEDRFNASLGTYHDLLKIIKDKDFLDNEENEDILEDIVLTLTLFEDREMIEERLKTYAHLFDDKVMKQLKRRRYTGWGRLSRKLINGIRDKQSGKTILDFLKSDGFANRNFMQLIHDDSLTFKEDIQKAQVSGQGDSLHEHIANLAGSPAIKKGILQTVKVVDELVKVMGRHKPENIVIEMARENQTTQKGQKNSRERMKRIEEGIKELGSQILKEHPVENTQLQNEKLYLYYLQNGRDMYVDQELDINRLSDYDVDHIVPQSFLKDDSIDNKVLTRSDKARGKSDNVPSEEVVKKMKNYWRQLLNAKLITQRKFDNLTKAERGGLSELDKAGFIKRQLVETRQITKHVAQILDSRMNTKYDENDKLIREVKVITLKSKLVSDFRKDFQFYKVREINNYHHAHDAYLNAVVGTALIKKYPKLESEFVYGDYKVYDVRKMIAKSEQEIGKATAKYFFYSNIMNFFKTEITLANGEIRKRPLIETNGETGEIVWDKGRDFATVRKVLSMPQVNIVKKTEVQTGGFSKESILPKRNSDKLIARKKDWDPKKYGGFDSPTVAYSVLVVAKVEKGKSKKLKSVKELLGITIMERSSFEKNPIDFLEAKGYKEVKKDLIIKLPKYSLFELENGRKRMLASAGELQKGNELALPSKYVNFLYLASHYEKLKGSPEDNEQKQLFVEQHKHYLDEIIEQISEFSKRVILADANLDKVLSAYNKHRDKPIREQAENIIHLFTLTNLGAPAAFKYFDTTIDRKRYTSTKEVLDATLIHQSITGLYETRIDLSQLGGDGGGGGGGVLNLEEEYRLHEKPVPSSIDPSWLQLFPTVWAERAGMGLANQVPPVVVELRSGASPVAVRQYPMSKEAREGIRPHIQRFLDLGVLVPCQSPWNTPLLPVKKPGTNDYRPVQDLREINKRVQDIHPTVPNPYNLLSSLPPSHTWYSVLDLKDAFFCLKLHPNSQPLFAFEWRDPEKGNTGQLTWTRLPQGFKNSPTLFNEALHRDLAPFRALNPQVVLLQYVDDLLVAAPTYRDCKEGTQKLLQELSKLGYRVSAKKAQLCQKEVTYLGYLLKEGKRWLTPARKATVMKIPPPTTPRQVREFLGKAGFCRLFIPGFASLAAPLYPLTKPSIPFIWTEEHQKAFDRIKEALLSAPALALPDLTKPFTLYVDERAGVARGVLTQTLGPWRRPVAYLSKKLDPVASGWPTCLKAVAAVALLLKDADKLTLGQNVTVIASHSLESIVRQPPDRWMTNARMTHYQSLLLNERVSFAPPAVLNPATLLPVESEATPVHRCSEILAEETGTRRDLKDQPLPGVPAWYTDGSSFIAEGKRRAGAAIVDGKRTVWASSLPEGTSAQKAELVALTQALRLAEGKDINIYTDSRYAFATAHIHGAIYKQRGWLTSAGKDIKNKEEILALLEAIHLPKRVAIIHCPGHQKGNDPVATGNRRADEAAKQAALSTRVLAETTKPAGKRTADGSEFEKRTADGSEFESPKKKAKVE

SEQ ID NO: 6244 - protein, 2091 aa, synthetic construct
MPAAKRVKLDGGDKKYSIGLDIGTNSVGWAVITDEYKVPSKKFKVLGNTDRHSIKKNLIGALLFDSGETAEATRLKRTARRRYTRRKNRICYLQEIFSNEMAKVDDSFFHRLEESFLVEEDKKHERHPIFGNIVDEVAYHEKYPTIYHLRKKLVDSTDKADLRLIYLALAHMIKFRGHFLIEGDLNPDNSDVDKLFIQLVQTYNQLFEENPINASGVDAKAILSARLSKSRRLENLIAQLPGEKKNGLFGNLIALSLGLTPNFKSNFDLAEDAKLQLSKDTYDDDLDNLLAQIGDQYADLFLAAKNLSDAILLSDILRVNTEITKAPLSASMIKRYDEHHQDLTLLKALVRQQLPEKYKEIFFDQSKNGYAGYIDGGASQEEFYKFIKPILEKMDGTEELLVKLNREDLLRKQRTFDNGSIPHQIHLGELHAILRRQEDFYPFLKDNREKIEKILTFRIPYYVGPLARGNSRFAWMTRKSEETITPWNFEEVVDKGASAQSFIERMTNFDKNLPNEKVLPKHSLLYEYFTVYNELTKVKYVTEGMRKPAFLSGEQKKAIVDLLFKTNRKVTVKQLKEDYFKKIECFDSVEISGVEDRFNASLGTYHDLLKIIKDKDFLDNEENEDILEDIVLTLTLFEDREMIEERLKTYAHLFDDKVMKQLKRRRYTGWGRLSRKLINGIRDKQSGKTILDFLKSDGFANRNFMQLIHDDSLTFKEDIQKAQVSGQGDSLHEHIANLAGSPAIKKGILQTVKVVDELVKVMGRHKPENIVIEMARENQTTQKGQKNSRERMKRIEEGIKELGSQILKEHPVENTQLQNEKLYLYYLQNGRDMYVDQELDINRLSDYDVDHIVPQSFLKDDSIDNKVLTRSDKARGKSDNVPSEEVVKKMKNYWRQLLNAKLITQRKFDNLTKAERGGLSELDKAGFIKRQLVETRQITKHVAQILDSRMNTKYDENDKLIREVKVITLKSKLVSDFRKDFQFYKVREINNYHHAHDAYLNAVVGTALIKKYPKLESEFVYGDYKVYDVRKMIAKSEQEIGKATAKYFFYSNIMNFFKTEITLANGEIRKRPLIETNGETGEIVWDKGRDFATVRKVLSMPQVNIVKKTEVQTGGFSKESILPKRNSDKLIARKKDWDPKKYGGFDSPTVAYSVLVVAKVEKGKSKKLKSVKELLGITIMERSSFEKNPIDFLEAKGYKEVKKDLIIKLPKYSLFELENGRKRMLASAGELQKGNELALPSKYVNFLYLASHYEKLKGSPEDNEQKQLFVEQHKHYLDEIIEQISEFSKRVILADANLDKVLSAYNKHRDKPIREQAENIIHLFTLTNLGAPAAFKYFDTTIDRKRYTSTKEVLDATLIHQSITGLYETRIDLSQLGGDGGGGGGGGTAPLEEEYRLFLEAPIQNVTLLEQWKREIPKVWAEINPPGLASTQAPIHVQLLSTALPVRVRQYPITLEAKRSLRETIRKFRAAGILRPVHSPWNTPLLPVRKSGTSEYRMVQDLREVNKRVETIHPTVPNPYTLLSLLPPDRIWYSVLDLKDAFFCIPLAPESQLIFAFEWADAEEGESGQLTWTRLPQGFKNSPTLFNEALNRDLQGFRLDHPSVSLLQYVDDLLIAADTQAACLSATRDLLMTLAELGYRVSGKKAQLCQEEVTYLGFKIHKGSRSLSNSRTQAILQIPVPKTKRQVREFLGTIGYCRLWIPGFAELAQPLYAATRPGNDPLVWGEKEEEAFQSLKLALTQPPALALPSLDKPFQLFVEETSGAAKGVLTQALGPWKRPVAYLSKRLDPVAAGWPRCLRAIAAAALLTREASKLTFGQDIEITSSHNLESLLRSPPDKWLTNARITQYQVLLLDPPRVRFKQTAALNPATLLPETDDTLPIHHCLDTLDSLTSTRPDLTDQPLAQAEATLFTDGSSYIRDGKRYAGAAVVTLDSVIWAEPLPIGTSAQKAELIALTKALEWSKDKSVNIYTDSRYAFATLHVHGMIYRERGWLTAGGKAIKNAPEILALLTAVWLPKRVAVMHCKGHQKDDAPTSTGNRRADEVAREVAIRPLSTQATISAGKRTADGSEFEKRTADGSEFESPKKKAKVE

SEQ ID NO: 6245 - protein, 2095 aa, synthetic construct
MPAAKRVKLDGGDKKYSIGLDIGTNSVGWAVITDEYKVPSKKFKVLGNTDRHSIKKNLIGALLFDSGETAEATRLKRTARRRYTRRKNRICYLQEIFSNEMAKVDDSFFHRLEESFLVEEDKKHERHPIFGNIVDEVAYHEKYPTIYHLRKKLVDSTDKADLRLIYLALAHMIKFRGHFLIEGDLNPDNSDVDKLFIQLVQTYNQLFEENPINASGVDAKAILSARLSKSRRLENLIAQLPGEKKNGLFGNLIALSLGLTPNFKSNFDLAEDAKLQLSKDTYDDDLDNLLAQIGDQYADLFLAAKNLSDAILLSDILRVNTEITKAPLSASMIKRYDEHHQDLTLLKALVRQQLPEKYKEIFFDQSKNGYAGYIDGGASQEEFYKFIKPILEKMDGTEELLVKLNREDLLRKQRTFDNGSIPHQIHLGELHAILRRQEDFYPFLKDNREKIEKILTFRIPYYVGPLARGNSRFAWMTRKSEETITPWNFEEVVDKGASAQSFIERMTNFDKNLPNEKVLPKHSLLYEYFTVYNELTKVKYVTEGMRKPAFLSGEQKKAIVDLLFKTNRKVTVKQLKEDYFKKIECFDSVEISGVEDRFNASLGTYHDLLKIIKDKDFLDNEENEDILEDIVLTLTLFEDREMIEERLKTYAHLFDDKVMKQLKRRRYTGWGRLSRKLINGIRDKQSGKTILDFLKSDGFANRNFMQLIHDDSLTFKEDIQKAQVSGQGDSLHEHIANLAGSPAIKKGILQTVKVVDELVKVMGRHKPENIVIEMARENQTTQKGQKNSRERMKRIEEGIKELGSQILKEHPVENTQLQNEKLYLYYLQNGRDMYVDQELDINRLSDYDVDHIVPQSFLKDDSIDNKVLTRSDKARGKSDNVPSEEVVKKMKNYWRQLLNAKLITQRKFDNLTKAERGGLSELDKAGFIKRQLVETRQITKHVAQILDSRMNTKYDENDKLIREVKVITLKSKLVSDFRKDFQFYKVREINNYHHAHDAYLNAVVGTALIKKYPKLESEFVYGDYKVYDVRKMIAKSEQEIGKATAKYFFYSNIMNFFKTEITLANGEIRKRPLIETNGETGEIVWDKGRDFATVRKVLSMPQVNIVKKTEVQTGGFSKESILPKRNSDKLIARKKDWDPKKYGGFDSPTVAYSVLVVAKVEKGKSKKLKSVKELLGITIMERSSFEKNPIDFLEAKGYKEVKKDLIIKLPKYSLFELENGRKRMLASAGELQKGNELALPSKYVNFLYLASHYEKLKGSPEDNEQKQLFVEQHKHYLDEIIEQISEFSKRVILADANLDKVLSAYNKHRDKPIREQAENIIHLFTLTNLGAPAAFKYFDTTIDRKRYTSTKEVLDATLIHQSITGLYETRIDLSQLGGDGGGGGGGGTVSLQDEHRLFDIPVTTSLPDVWLQDFPQAWAETGGLGRAKCQAPIIIDLKPTAVPVSIKQYPMSLEAHMGIRQHIIKFLELGVLRPCRSPWNTPLLPVKKPGTQDYRPVQDLREINKRTVDIHPTVPNPYNLLSTLKPDYSWYTVLDLKDAFFCLPLAPQSQELFAFEWKDPERGISGQLTWTRLPQGFKNSPTLFNEALHRDLTDFRTQHPEVTLLQYVDDLLLAAPTKKACTQGTRHLLQELGEKGYRASAKKAQICQTKVTYLGYILSEGKRWLTPGRIETVARIPPPRNPREVREFLGTAGFCRLWIPGFAELAAPLYALTKPSTPFTWQTEHQLAFEALKKALLSAPALGLPDTSKPFTLFLDERQGIAKGVLTQKLGPWKRPVAYLSKKLDPVAAGWPPCLRIMAATAMLVKDSAKLTLGQPLTVITPHTLEAIVRQPPDRWITNARLTHYQALLLDTDRVQFGPPVTLNPATLLPVPENQPSPHDCRQVLAETHGTREDLKDQELPDADHTWYTDGSSYLDSGTRRAGAAVVDGHNTIWAQSLPPGTSAQKAELIALTKALELSKGKKANIYTDSRYAFATAHTHGSIYERRGWLTSEGKEIKNKAEIIALLKALFLPQEVAIIHCPGHQKGQDPVAVGNRQADRVARQAAMAEVLTLATEPDNTSHITAGKRTADGSEFEKRTADGSEFESPKKKAKVE

SEQ ID NO: 6246 - protein, 2087 aa, synthetic construct
MPAAKRVKLDGGDKKYSIGLDIGTNSVGWAVITDEYKVPSKKFKVLGNTDRHSIKKNLIGALLFDSGETAEATRLKRTARRRYTRRKNRICYLQEIFSNEMAKVDDSFFHRLEESFLVEEDKKHERHPIFGNIVDEVAYHEKYPTIYHLRKKLVDSTDKADLRLIYLALAHMIKFRGHFLIEGDLNPDNSDVDKLFIQLVQTYNQLFEENPINASGVDAKAILSARLSKSRRLENLIAQLPGEKKNGLFGNLIALSLGLTPNFKSNFDLAEDAKLQLSKDTYDDDLDNLLAQIGDQYADLFLAAKNLSDAILLSDILRVNTEITKAPLSASMIKRYDEHHQDLTLLKALVRQQLPEKYKEIFFDQSKNGYAGYIDGGASQEEFYKFIKPILEKMDGTEELLVKLNREDLLRKQRTFDNGSIPHQIHLGELHAILRRQEDFYPFLKDNREKIEKILTFRIPYYVGPLARGNSRFAWMTRKSEETITPWNFEEVVDKGASAQSFIERMTNFDKNLPNEKVLPKHSLLYEYFTVYNELTKVKYVTEGMRKPAFLSGEQKKAIVDLLFKTNRKVTVKQLKEDYFKKIECFDSVEISGVEDRFNASLGTYHDLLKIIKDKDFLDNEENEDILEDIVLTLTLFEDREMIEERLKTYAHLFDDKVMKQLKRRRYTGWGRLSRKLINGIRDKQSGKTILDFLKSDGFANRNFMQLIHDDSLTFKEDIQKAQVSGQGDSLHEHIANLAGSPAIKKGILQTVKVVDELVKVMGRHKPENIVIEMARENQTTQKGQKNSRERMKRIEEGIKELGSQILKEHPVENTQLQNEKLYLYYLQNGRDMYVDQELDINRLSDYDVDHIVPQSFLKDDSIDNKVLTRSDKARGKSDNVPSEEVVKKMKNYWRQLLNAKLITQRKFDNLTKAERGGLSELDKAGFIKRQLVETRQITKHVAQILDSRMNTKYDENDKLIREVKVITLKSKLVSDFRKDFQFYKVREINNYHHAHDAYLNAVVGTALIKKYPKLESEFVYGDYKVYDVRKMIAKSEQEIGKATAKYFFYSNIMNFFKTEITLANGEIRKRPLIETNGETGEIVWDKGRDFATVRKVLSMPQVNIVKKTEVQTGGFSKESILPKRNSDKLIARKKDWDPKKYGGFDSPTVAYSVLVVAKVEKGKSKKLKSVKELLGITIMERSSFEKNPIDFLEAKGYKEVKKDLIIKLPKYSLFELENGRKRMLASAGELQKGNELALPSKYVNFLYLASHYEKLKGSPEDNEQKQLFVEQHKHYLDEIIEQISEFSKRVILADANLDKVLSAYNKHRDKPIREQAENIIHLFTLTNLGAPAAFKYFDTTIDRKRYTSTKEVLDATLIHQSITGLYETRIDLSQLGGDGGGGGGGGVLNLEEEYRLHEKPVPSSIDPSWLQLFPTVWAERAGMGLANQVPPVVVELRSGASPVAVRQYPMSKEAREGIRPHIQKFLDLGVLVPCRSPWNTPLLPVKKPGTNDYRPVQDLREINKRVQDIHPTVPNPYNLLSSLPPSYTWYSVLDLKDAFFCLRLHPNSQPLFAFEWKDPEKGNTGQLTWTRLPQGFKNSPTLFNEALHRDLAPFRALNPQVVLLQYVDDLLVAAPTYEDCKKGTQKLLQELSKLGYRVSAKKAQLCQREVTYLGYLLKEGKRWLTPARKATVMKIPVPTTPRQVREFLGKAGFCRLFIPGFASLAAPLYPLTKPSIPFIWTEEHQQAFDHIKKALLSAPALALPDLTKPFTLYIDERAGVARGVLTQTLGPWRRPVAYLSKKLDPVASGWPTCLKAVAAVALLLKDADKLTLGQNVTVIASHSLESIVRQPPDRWMTNARMTHYQSLLLNERVSFAPPAVLNPATLLPVESEATPVHRCSEILAEETGTRRDLEDQPLPGVPTWYTDGSSFITEGKRRAGAPIVDGKRTVWASSLPEGTSAQKAELVALTQALRLAEGKNINIYTDSRYAFATAHIHGAIYKQRGWLTSAGKDIKNKEEILALLEAIHLPRRVAIIHCPGHQRGSNPVATGNRRADEAAKQAALSTRVLAGTTKPAGKRTADGSEFEKRTADGSEFESPKKKAKVE

SEQ ID NO: 6247 - protein, 2211 aa, synthetic construct
MPAAKRVKLDGGDKKYSIGLDIGTNSVGWAVITDEYKVPSKKFKVLGNTDRHSIKKNLIGALLFDSGETAEATRLKRTARRRYTRRKNRICYLQEIFSNEMAKVDDSFFHRLEESFLVEEDKKHERHPIFGNIVDEVAYHEKYPTIYHLRKKLVDSTDKADLRLIYLALAHMIKFRGHFLIEGDLNPDNSDVDKLFIQLVQTYNQLFEENPINASGVDAKAILSARLSKSRRLENLIAQLPGEKKNGLFGNLIALSLGLTPNFKSNFDLAEDAKLQLSKDTYDDDLDNLLAQIGDQYADLFLAAKNLSDAILLSDILRVNTEITKAPLSASMIKRYDEHHQDLTLLKALVRQQLPEKYKEIFFDQSKNGYAGYIDGGASQEEFYKFIKPILEKMDGTEELLVKLNREDLLRKQRTFDNGSIPHQIHLGELHAILRRQEDFYPFLKDNREKIEKILTFRIPYYVGPLARGNSRFAWMTRKSEETITPWNFEEVVDKGASAQSFIERMTNFDKNLPNEKVLPKHSLLYEYFTVYNELTKVKYVTEGMRKPAFLSGEQKKAIVDLLFKTNRKVTVKQLKEDYFKKIECFDSVEISGVEDRFNASLGTYHDLLKIIKDKDFLDNEENEDILEDIVLTLTLFEDREMIEERLKTYAHLFDDKVMKQLKRRRYTGWGRLSRKLINGIRDKQSGKTILDFLKSDGFANRNFMQLIHDDSLTFKEDIQKAQVSGQGDSLHEHIANLAGSPAIKKGILQTVKVVDELVKVMGRHKPENIVIEMARENQTTQKGQKNSRERMKRIEEGIKELGSQILKEHPVENTQLQNEKLYLYYLQNGRDMYVDQELDINRLSDYDVDHIVPQSFLKDDSIDNKVLTRSDKARGKSDNVPSEEVVKKMKNYWRQLLNAKLITQRKFDNLTKAERGGLSELDKAGFIKRQLVETRQITKHVAQILDSRMNTKYDENDKLIREVKVITLKSKLVSDFRKDFQFYKVREINNYHHAHDAYLNAVVGTALIKKYPKLESEFVYGDYKVYDVRKMIAKSEQEIGKATAKYFFYSNIMNFFKTEITLANGEIRKRPLIETNGETGEIVWDKGRDFATVRKVLSMPQVNIVKKTEVQTGGFSKESILPKRNSDKLIARKKDWDPKKYGGFDSPTVAYSVLVVAKVEKGKSKKLKSVKELLGITIMERSSFEKNPIDFLEAKGYKEVKKDLIIKLPKYSLFELENGRKRMLASAGELQKGNELALPSKYVNFLYLASHYEKLKGSPEDNEQKQLFVEQHKHYLDEIIEQISEFSKRVILADANLDKVLSAYNKHRDKPIREQAENIIHLFTLTNLGAPAAFKYFDTTIDRKRYTSTKEVLDATLIHQSITGLYETRIDLSQLGGDGGGGGGGGTLGDQGSRGSDPLPEPRVTLTVEGIPTEFLVNTGAEHSVLTKPMGKMGSKRTVVAGATGSKVYPWTTKRLLKIGQKQVTHSFLVIPECPAPLLGRDLLTKLKAQIQFSTEGPQVTWEDRPAMCLVLNLEEEYRLHEKPVPPSIDPSWLQLFPMVWAEKAGMGLANQVPPVVVELKSDASPVAVRQYPMSKEAREGIRPHIQRFLDLGILVPCQSPWNTPLLPVKKPGTNDYRPVQDLREVNKRVQDIHPTVPNPYNLLSSLPPSHTWYSVLDLKDAFFCLKLHPNSQPLFAFEWRDPEKGNTGQLTWTRLPQGFKNSPTLFNEALHRDLASFRALNPQVVMLQYVDDLLVAAPTYRDCKEGTRRLLQELSKLGYRVSAKKAQLCREEVTYLGYLLKGGKRWLTPARKATVMKIPTPTTPRQVREFLGTAGFCRLWIPGFASLAAPLYPLTRPKVPFTWTEAHQEAFGRIKEALLSAPALALPDLTKPFALYVDEKEGVARGVLTQTLGPWRRPVAYLSKKLDPVASGWPTCLKAIAAVALLLKDADKLTLGQNVLVIAPHNLESIVRQPPDRWMTNARMTHYQSLLLNERVSFAPPAILNPATLLPVESDDTPIHICSEILAEETGTRPDLRDQPLPGVPAWYTDGSSFIMDGRRQAGAAIVDNKRTVWASNLPEGTSAQKAELIALTQALRLAEGKSINIYTDSRYAFATAHVHGAIYKQRGWLTSAGKDIKNKEEILALLEAIHLPKRVAIIHCPGHQRGTDPVATGNRKADEAAKQAAQSTRILTETTKNAGKRTADGSEFEKRTADGSEFESPKKKAKVE

SEQ ID NO: 6248 - protein, 2089 aa, synthetic construct
MPAAKRVKLDGGDKKYSIGLDIGTNSVGWAVITDEYKVPSKKFKVLGNTDRHSIKKNLIGALLFDSGETAEATRLKRTARRRYTRRKNRICYLQEIFSNEMAKVDDSFFHRLEESFLVEEDKKHERHPIFGNIVDEVAYHEKYPTIYHLRKKLVDSTDKADLRLIYLALAHMIKFRGHFLIEGDLNPDNSDVDKLFIQLVQTYNQLFEENPINASGVDAKAILSARLSKSRRLENLIAQLPGEKKNGLFGNLIALSLGLTPNFKSNFDLAEDAKLQLSKDTYDDDLDNLLAQIGDQYADLFLAAKNLSDAILLSDILRVNTEITKAPLSASMIKRYDEHHQDLTLLKALVRQQLPEKYKEIFFDQSKNGYAGYIDGGASQEEFYKFIKPILEKMDGTEELLVKLNREDLLRKQRTFDNGSIPHQIHLGELHAILRRQEDFYPFLKDNREKIEKILTFRIPYYVGPLARGNSRFAWMTRKSEETITPWNFEEVVDKGASAQSFIERMTNFDKNLPNEKVLPKHSLLYEYFTVYNELTKVKYVTEGMRKPAFLSGEQKKAIVDLLFKTNRKVTVKQLKEDYFKKIECFDSVEISGVEDRFNASLGTYHDLLKIIKDKDFLDNEENEDILEDIVLTLTLFEDREMIEERLKTYAHLFDDKVMKQLKRRRYTGWGRLSRKLINGIRDKQSGKTILDFLKSDGFANRNFMQLIHDDSLTFKEDIQKAQVSGQGDSLHEHIANLAGSPAIKKGILQTVKVVDELVKVMGRHKPENIVIEMARENQTTQKGQKNSRERMKRIEEGIKELGSQILKEHPVENTQLQNEKLYLYYLQNGRDMYVDQELDINRLSDYDVDHIVPQSFLKDDSIDNKVLTRSDKARGKSDNVPSEEVVKKMKNYWRQLLNAKLITQRKFDNLTKAERGGLSELDKAGFIKRQLVETRQITKHVAQILDSRMNTKYDENDKLIREVKVITLKSKLVSDFRKDFQFYKVREINNYHHAHDAYLNAVVGTALIKKYPKLESEFVYGDYKVYDVRKMIAKSEQEIGKATAKYFFYSNIMNFFKTEITLANGEIRKRPLIETNGETGEIVWDKGRDFATVRKVLSMPQVNIVKKTEVQTGGFSKESILPKRNSDKLIARKKDWDPKKYGGFDSPTVAYSVLVVAKVEKGKSKKLKSVKELLGITIMERSSFEKNPIDFLEAKGYKEVKKDLIIKLPKYSLFELENGRKRMLASAGELQKGNELALPSKYVNFLYLASHYEKLKGSPEDNEQKQLFVEQHKHYLDEIIEQISEFSKRVILADANLDKVLSAYNKHRDKPIREQAENIIHLFTLTNLGAPAAFKYFDTTIDRKRYTSTKEVLDATLIHQSITGLYETRIDLSQLGGDGGGGGGGGTLNLEDEYRLYETSAEPEVSPGSTWLSDFPQAWAETGGMGLAVRQAPLIIPLKATSTPVSIKQYPMSQEAKLGIKPHIQRLLDQGILVPCQSPWNTPLLPVKKPGTNDYRPVQDLREVNKRVEDIHPTVPNPYNLLSGLPPSHRWYTVLDLKDAFFCLRLHPTSQPLFAFEWRDPGMGISGQLTWTRLPQGFKNSPTLFNEALHRDLADFRIQHPDLILLQYVDDILLAATSELDCQQGTRALLLTLGNLGYRASAKKAQLCQKQVKYLGYLLKEGQRWLTEARKETVMGQPTPKTPRQLREFLGKAGFCRLFIPGFAEMAAPLYPLTKPGTLFNWGPDQQKAYQEIKQALLTAPALGLPDLTKPFELFVDEKQGYAKGVLTQKLGPWRRPVAYLSKKLDPVAAGWPPCLRMVAAIAVLRKDAGKLTMGQPLVILAPHAVEALVKQPPDRWLSNARMTHYQAMLLDTDRVQFGPVVALNPATLLPLPEEGAPHDCLEILAETHGTRPDLTDQPIPDADHTWYTDGSSFLQEGQRKAGAAVTTETEVIWARALPAGTSAQRAELIALTQALKMAEGKRLNVYTDSRYAFATAHIHGEIYRRRGWLTSEGREIKNKSEILALLKALFLPKRLSIIHCLGHQKGDSAEARGNRLADQAAREAAIKTPPDTSTLLAGKRTADGSEFEKRTADGSEFESPKKKAKVE

SEQ ID NO: 6249 - protein, 2089 aa, synthetic construct
MPAAKRVKLDGGDKKYSIGLDIGTNSVGWAVITDEYKVPSKKFKVLGNTDRHSIKKNLIGALLFDSGETAEATRLKRTARRRYTRRKNRICYLQEIFSNEMAKVDDSFFHRLEESFLVEEDKKHERHPIFGNIVDEVAYHEKYPTIYHLRKKLVDSTDKADLRLIYLALAHMIKFRGHFLIEGDLNPDNSDVDKLFIQLVQTYNQLFEENPINASGVDAKAILSARLSKSRRLENLIAQLPGEKKNGLFGNLIALSLGLTPNFKSNFDLAEDAKLQLSKDTYDDDLDNLLAQIGDQYADLFLAAKNLSDAILLSDILRVNTEITKAPLSASMIKRYDEHHQDLTLLKALVRQQLPEKYKEIFFDQSKNGYAGYIDGGASQEEFYKFIKPILEKMDGTEELLVKLNREDLLRKQRTFDNGSIPHQIHLGELHAILRRQEDFYPFLKDNREKIEKILTFRIPYYVGPLARGNSRFAWMTRKSEETITPWNFEEVVDKGASAQSFIERMTNFDKNLPNEKVLPKHSLLYEYFTVYNELTKVKYVTEGMRKPAFLSGEQKKAIVDLLFKTNRKVTVKQLKEDYFKKIECFDSVEISGVEDRFNASLGTYHDLLKIIKDKDFLDNEENEDILEDIVLTLTLFEDREMIEERLKTYAHLFDDKVMKQLKRRRYTGWGRLSRKLINGIRDKQSGKTILDFLKSDGFANRNFMQLIHDDSLTFKEDIQKAQVSGQGDSLHEHIANLAGSPAIKKGILQTVKVVDELVKVMGRHKPENIVIEMARENQTTQKGQKNSRERMKRIEEGIKELGSQILKEHPVENTQLQNEKLYLYYLQNGRDMYVDQELDINRLSDYDVDHIVPQSFLKDDSIDNKVLTRSDKARGKSDNVPSEEVVKKMKNYWRQLLNAKLITQRKFDNLTKAERGGLSELDKAGFIKRQLVETRQITKHVAQILDSRMNTKYDENDKLIREVKVITLKSKLVSDFRKDFQFYKVREINNYHHAHDAYLNAVVGTALIKKYPKLESEFVYGDYKVYDVRKMIAKSEQEIGKATAKYFFYSNIMNFFKTEITLANGEIRKRPLIETNGETGEIVWDKGRDFATVRKVLSMPQVNIVKKTEVQTGGFSKESILPKRNSDKLIARKKDWDPKKYGGFDSPTVAYSVLVVAKVEKGKSKKLKSVKELLGITIMERSSFEKNPIDFLEAKGYKEVKKDLIIKLPKYSLFELENGRKRMLASAGELQKGNELALPSKYVNFLYLASHYEKLKGSPEDNEQKQLFVEQHKHYLDEIIEQISEFSKRVILADANLDKVLSAYNKHRDKPIREQAENIIHLFTLTNLGAPAAFKYFDTTIDRKRYTSTKEVLDATLIHQSITGLYETRIDLSQLGGDGGGGGGGGLGIEDEYRLHETSTEPDVSLGSTWLSDFPQAWAETGGMGLAVRQAPLIIPLKATSTPVSIQQYPMSHEARLGIKPHIQRLLDQGILVPCQSPWNTPLLPVKKPGTNDYRPVQDLREVNKRVEDIHPTVPNPYNLLSGLPPSHQWYTVLDLKDAFFCLRLHPTSQPLFAFEWRDPGMGISGQLTWTRLPQGFKNSPTLFNEALHRDLADFRIQHPDLILLQYVDDILLAATSELDCQQGTRALLQTLGDLGYRASAKKAQICQKQVKYLGYLLREGQRWLTEARKETVMGQPVPKTPRQLREFLGKAGFCRLFIPGFAEMAAPLYPLTKPGTLFSWGPDQQKAYQEIKQALLTAPALGLPDLTKPFELFVDEKQGYAKGVLTQKLGPWRRPVAYLSKKLDPVAAGWPPCLRMVAAIAVLTKDAGKLTMGQPLVILAPHAVEALVKQPPDRWLSNARMTHYQAMLLDTDRVQFGPVVALNPATLLPLPEEGAPHDCLEILAETHGTRPDLTDQPIPDADHTWYTDGSSFLQEGQRKAGAAVTTETEVIWAGALPAGTSAQRAELIALTQALKMAEGKRLNVYTDSRYAFATAHIHGEIYRRRGWLTSEGREIKNKSEILALLKALFLPKRLSIIHCLGHQKGDSAEARGNRLADQAAREAAIKTPPDTSTLLIAGKRTADGSEFEKRTADGSEFESPKKKAKVE

SEQ ID NO: 6250 - protein, 2092 aa, synthetic construct
MPAAKRVKLDGGDKKYSIGLDIGTNSVGWAVITDEYKVPSKKFKVLGNTDRHSIKKNLIGALLFDSGETAEATRLKRTARRRYTRRKNRICYLQEIFSNEMAKVDDSFFHRLEESFLVEEDKKHERHPIFGNIVDEVAYHEKYPTIYHLRKKLVDSTDKADLRLIYLALAHMIKFRGHFLIEGDLNPDNSDVDKLFIQLVQTYNQLFEENPINASGVDAKAILSARLSKSRRLENLIAQLPGEKKNGLFGNLIALSLGLTPNFKSNFDLAEDAKLQLSKDTYDDDLDNLLAQIGDQYADLFLAAKNLSDAILLSDILRVNTEITKAPLSASMIKRYDEHHQDLTLLKALVRQQLPEKYKEIFFDQSKNGYAGYIDGGASQEEFYKFIKPILEKMDGTEELLVKLNREDLLRKQRTFDNGSIPHQIHLGELHAILRRQEDFYPFLKDNREKIEKILTFRIPYYVGPLARGNSRFAWMTRKSEETITPWNFEEVVDKGASAQSFIERMTNFDKNLPNEKVLPKHSLLYEYFTVYNELTKVKYVTEGMRKPAFLSGEQKKAIVDLLFKTNRKVTVKQLKEDYFKKIECFDSVEISGVEDRFNASLGTYHDLLKIIKDKDFLDNEENEDILEDIVLTLTLFEDREMIEERLKTYAHLFDDKVMKQLKRRRYTGWGRLSRKLINGIRDKQSGKTILDFLKSDGFANRNFMQLIHDDSLTFKEDIQKAQVSGQGDSLHEHIANLAGSPAIKKGILQTVKVVDELVKVMGRHKPENIVIEMARENQTTQKGQKNSRERMKRIEEGIKELGSQILKEHPVENTQLQNEKLYLYYLQNGRDMYVDQELDINRLSDYDVDHIVPQSFLKDDSIDNKVLTRSDKARGKSDNVPSEEVVKKMKNYWRQLLNAKLITQRKFDNLTKAERGGLSELDKAGFIKRQLVETRQITKHVAQILDSRMNTKYDENDKLIREVKVITLKSKLVSDFRKDFQFYKVREINNYHHAHDAYLNAVVGTALIKKYPKLESEFVYGDYKVYDVRKMIAKSEQEIGKATAKYFFYSNIMNFFKTEITLANGEIRKRPLIETNGETGEIVWDKGRDFATVRKVLSMPQVNIVKKTEVQTGGFSKESILPKRNSDKLIARKKDWDPKKYGGFDSPTVAYSVLVVAKVEKGKSKKLKSVKELLGITIMERSSFEKNPIDFLEAKGYKEVKKDLIIKLPKYSLFELENGRKRMLASAGELQKGNELALPSKYVNFLYLASHYEKLKGSPEDNEQKQLFVEQHKHYLDEIIEQISEFSKRVILADANLDKVLSAYNKHRDKPIREQAENIIHLFTLTNLGAPAAFKYFDTTIDRKRYTSTKEVLDATLIHQSITGLYETRIDLSQLGGDGGGGGGGGGTAPLEEEYRLFLEAPIQNVTLLEQWKREIPKVWAEINPPGLASTQAPIHVQLLSTALPVRVRQYPITLEAKRSLRETIRKFRAAGILRPVHSPWNTPLLPVRKSGTSEYRMVQDLREVNKRVETIHPTVPNPYTLLSLLPPDRIWYSVLDLKDAFFCIPLAPESQLIFAFEWADAEEGESGQLTWTRLPQGFKNSPTLFNEALNRDLQGFRLDHPSVSLLQYVDDLLIAADTQAACLSATRDLLMTLAELGYRVSGKKAQLCQEEVTYLGFKIHKGSRSLSNSRTQAILQIPVPKTKRQVREFLGTIGYCRLWIPGFAELAQPLYAATRPGNDPLVWGEKEEEAFQSLKLALTQPPALALPSLDKPFQLFVEETSGAAKGVLTQALGPWKRPVAYLSKRLDPVAAGWPRCLRAIAAAALLTREASKLTFGQDIEITSSHNLESLLRSPPDKWLTNARITQYQVLLLDPPRVRFKQTAALNPATLLPETDDTLPIHHCLDTLDSLTSTRPDLTDQPLAQAEATLFTDGSSYIRDGKRYAGAAVVTLDSVIWAEPLPIGTSAQKAELIALTKALEWSKDKSVNIYTDSRYAFATLHVHGMIYRERGWLTAGGKAIKNAPEILALLTAVWLPKRVAVMHCKGHQKDDAPTSTGNRRADEVAREVAIRPLSTQATISAGKRTADGSEFEKRTADGSEFESPKKKAKVE

SEQ ID NO: 6251 - protein, 2212 aa, synthetic construct
MPAAKRVKLDGGDKKYSIGLDIGTNSVGWAVITDEYKVPSKKFKVLGNTDRHSIKKNLIGALLFDSGETAEATRLKRTARRRYTRRKNRICYLQEIFSNEMAKVDDSFFHRLEESFLVEEDKKHERHPIFGNIVDEVAYHEKYPTIYHLRKKLVDSTDKADLRLIYLALAHMIKFRGHFLIEGDLNPDNSDVDKLFIQLVQTYNQLFEENPINASGVDAKAILSARLSKSRRLENLIAQLPGEKKNGLFGNLIALSLGLTPNFKSNFDLAEDAKLQLSKDTYDDDLDNLLAQIGDQYADLFLAAKNLSDAILLSDILRVNTEITKAPLSASMIKRYDEHHQDLTLLKALVRQQLPEKYKEIFFDQSKNGYAGYIDGGASQEEFYKFIKPILEKMDGTEELLVKLNREDLLRKQRTFDNGSIPHQIHLGELHAILRRQEDFYPFLKDNREKIEKILTFRIPYYVGPLARGNSRFAWMTRKSEETITPWNFEEVVDKGASAQSFIERMTNFDKNLPNEKVLPKHSLLYEYFTVYNELTKVKYVTEGMRKPAFLSGEQKKAIVDLLFKTNRKVTVKQLKEDYFKKIECFDSVEISGVEDRFNASLGTYHDLLKIIKDKDFLDNEENEDILEDIVLTLTLFEDREMIEERLKTYAHLFDDKVMKQLKRRRYTGWGRLSRKLINGIRDKQSGKTILDFLKSDGFANRNFMQLIHDDSLTFKEDIQKAQVSGQGDSLHEHIANLAGSPAIKKGILQTVKVVDELVKVMGRHKPENIVIEMARENQTTQKGQKNSRERMKRIEEGIKELGSQILKEHPVENTQLQNEKLYLYYLQNGRDMYVDQELDINRLSDYDVDHIVPQSFLKDDSIDNKVLTRSDKARGKSDNVPSEEVVKKMKNYWRQLLNAKLITQRKFDNLTKAERGGLSELDKAGFIKRQLVETRQITKHVAQILDSRMNTKYDENDKLIREVKVITLKSKLVSDFRKDFQFYKVREINNYHHAHDAYLNAVVGTALIKKYPKLESEFVYGDYKVYDVRKMIAKSEQEIGKATAKYFFYSNIMNFFKTEITLANGEIRKRPLIETNGETGEIVWDKGRDFATVRKVLSMPQVNIVKKTEVQTGGFSKESILPKRNSDKLIARKKDWDPKKYGGFDSPTVAYSVLVVAKVEKGKSKKLKSVKELLGITIMERSSFEKNPIDFLEAKGYKEVKKDLIIKLPKYSLFELENGRKRMLASAGELQKGNELALPSKYVNFLYLASHYEKLKGSPEDNEQKQLFVEQHKHYLDEIIEQISEFSKRVILADANLDKVLSAYNKHRDKPIREQAENIIHLFTLTNLGAPAAFKYFDTTIDRKRYTSTKEVLDATLIHQSITGLYETRIDLSQLGGDGGGGGGGGGTLGDQGSRGSDPLPEPRVTLTVEGIPTEFLVNTGAEHSVLTKPMGKMGSKRTVVAGATGSKVYPWTTKRLLKIGQKQVTHSFLVIPECPAPLLGRDLLTKLKAQIQFSTEGPQVTWEDRPAMCLVLNLEEEYRLHEKPVPPSIDPSWLQLFPMVWAEKAGMGLANQVPPVVVELKSDASPVAVRQYPMSKEAREGIRPHIQRFLDLGILVPCQSPWNTPLLPVKKPGTNDYRPVQDLREVNKRVQDIHPTVPNPYNLLSSLPPSHTWYSVLDLKDAFFCLKLHPNSQPLFAFEWRDPEKGNTGQLTWTRLPQGFKNSPTLFNEALHRDLASFRALNPQVVMLQYVDDLLVAAPTYRDCKEGTRRLLQELSKLGYRVSAKKAQLCREEVTYLGYLLKGGKRWLTPARKATVMKIPTPTTPRQVREFLGTAGFCRLWIPGFASLAAPLYPLTRPKVPFTWTEAHQEAFGRIKEALLSAPALALPDLTKPFALYVDEKEGVARGVLTQTLGPWRRPVAYLSKKLDPVASGWPTCLKAIAAVALLLKDADKLTLGQNVLVIAPHNLESIVRQPPDRWMTNARMTHYQSLLLNERVSFAPPAILNPATLLPVESDDTPIHICSEILAEETGTRPDLRDQPLPGVPAWYTDGSSFIMDGRRQAGAAIVDNKRTVWASNLPEGTSAQKAELIALTQALRLAEGKSINIYTDSRYAFATAHVHGAIYKQRGWLTSAGKDIKNKEEILALLEAIHLPKRVAIIHCPGHQRGTDPVATGNRKADEAAKQAAQSTRILTETTKNAGKRTADGSEFEKRTADGSEFESPKKKAKVE

SEQ ID NO: 6252 - protein, 2088 aa, synthetic construct
MPAAKRVKLDGGDKKYSIGLDIGTNSVGWAVITDEYKVPSKKFKVLGNTDRHSIKKNLIGALLFDSGETAEATRLKRTARRRYTRRKNRICYLQEIFSNEMAKVDDSFFHRLEESFLVEEDKKHERHPIFGNIVDEVAYHEKYPTIYHLRKKLVDSTDKADLRLIYLALAHMIKFRGHFLIEGDLNPDNSDVDKLFIQLVQTYNQLFEENPINASGVDAKAILSARLSKSRRLENLIAQLPGEKKNGLFGNLIALSLGLTPNFKSNFDLAEDAKLQLSKDTYDDDLDNLLAQIGDQYADLFLAAKNLSDAILLSDILRVNTEITKAPLSASMIKRYDEHHQDLTLLKALVRQQLPEKYKEIFFDQSKNGYAGYIDGGASQEEFYKFIKPILEKMDGTEELLVKLNREDLLRKQRTFDNGSIPHQIHLGELHAILRRQEDFYPFLKDNREKIEKILTFRIPYYVGPLARGNSRFAWMTRKSEETITPWNFEEVVDKGASAQSFIERMTNFDKNLPNEKVLPKHSLLYEYFTVYNELTKVKYVTEGMRKPAFLSGEQKKAIVDLLFKTNRKVTVKQLKEDYFKKIECFDSVEISGVEDRFNASLGTYHDLLKIIKDKDFLDNEENEDILEDIVLTLTLFEDREMIEERLKTYAHLFDDKVMKQLKRRRYTGWGRLSRKLINGIRDKQSGKTILDFLKSDGFANRNFMQLIHDDSLTFKEDIQKAQVSGQGDSLHEHIANLAGSPAIKKGILQTVKVVDELVKVMGRHKPENIVIEMARENQTTQKGQKNSRERMKRIEEGIKELGSQILKEHPVENTQLQNEKLYLYYLQNGRDMYVDQELDINRLSDYDVDHIVPQSFLKDDSIDNKVLTRSDKARGKSDNVPSEEVVKKMKNYWRQLLNAKLITQRKFDNLTKAERGGLSELDKAGFIKRQLVETRQITKHVAQILDSRMNTKYDENDKLIREVKVITLKSKLVSDFRKDFQFYKVREINNYHHAHDAYLNAVVGTALIKKYPKLESEFVYGDYKVYDVRKMIAKSEQEIGKATAKYFFYSNIMNFFKTEITLANGEIRKRPLIETNGETGEIVWDKGRDFATVRKVLSMPQVNIVKKTEVQTGGFSKESILPKRNSDKLIARKKDWDPKKYGGFDSPTVAYSVLVVAKVEKGKSKKLKSVKELLGITIMERSSFEKNPIDFLEAKGYKEVKKDLIIKLPKYSLFELENGRKRMLASAGELQKGNELALPSKYVNFLYLASHYEKLKGSPEDNEQKQLFVEQHKHYLDEIIEQISEFSKRVILADANLDKVLSAYNKHRDKPIREQAENIIHLFTLTNLGAPAAFKYFDTTIDRKRYTSTKEVLDATLIHQSITGLYETRIDLSQLGGDGGGGGGGGGVLNLEEEYRLHEKPVPSSIDPSWLQLFPTVWAERAGMGLANQVPPVVVELRSGASPVAVRQYPMSKEAREGIRPHIQRFLDLGVLVPCQSPWNTPLLPVKKPGTNDYRPVQDLREINKRVQDIHPTVPNPYNLLSSLPPSHTWYSVLDLKDAFFCLKLHPNSQPLFAFEWRDPEKGNTGQLTWTRLPQGFKNSPTLFDEALHRDLAPFRALNPQVVLLQYVDDLLVAAPTYRDCKEGTQKLLQELSKLGYRVSAKKAQLCQKEVTYLGYLLKEGKRWLTPARKATVMKIPPPTTPRQVREFLGTAGFCRLWIPGFASLAAPLYPLTKESIPFIWTEEHQKAFDRIKEALLSAPALALPDLTKPFTLYVDERAGVARGVLTQTLGPWRRPVAYLSKKLDPVASGWPTCLKAVAAVALLLKDADKLTLGQNVTVIASHSLESIVRQPPDRWMTNARMTHYQSLLLNERVSFAPPAVLNPATLLPVESEATPVHRCSEILAEETGTRRDLKDQPLPGVPAWYTDGSSFIAEGKRRAGAAIVDGKRTVWASSLPEGTSAQKAELVALTQALRLAEGKDINIYTDSRYAFATAHIHGAIYKQRGLLTSAGKDIKNKEEILALLEAIHLPKRVAIIHCPGHQKGNDPVATGNRRADEAAKQAALSTRVLAETTKPAGKRTADGSEFEKRTADGSEFESPKKKAKVE

SEQ ID NO: 6253 - protein, 2090 aa, synthetic construct
MPAAKRVKLDGGDKKYSIGLDIGTNSVGWAVITDEYKVPSKKFKVLGNTDRHSIKKNLIGALLFDSGETAEATRLKRTARRRYTRRKNRICYLQEIFSNEMAKVDDSFFHRLEESFLVEEDKKHERHPIFGNIVDEVAYHEKYPTIYHLRKKLVDSTDKADLRLIYLALAHMIKFRGHFLIEGDLNPDNSDVDKLFIQLVQTYNQLFEENPINASGVDAKAILSARLSKSRRLENLIAQLPGEKKNGLFGNLIALSLGLTPNFKSNFDLAEDAKLQLSKDTYDDDLDNLLAQIGDQYADLFLAAKNLSDAILLSDILRVNTEITKAPLSASMIKRYDEHHQDLTLLKALVRQQLPEKYKEIFFDQSKNGYAGYIDGGASQEEFYKFIKPILEKMDGTEELLVKLNREDLLRKQRTFDNGSIPHQIHLGELHAILRRQEDFYPFLKDNREKIEKILTFRIPYYVGPLARGNSRFAWMTRKSEETITPWNFEEVVDKGASAQSFIERMTNFDKNLPNEKVLPKHSLLYEYFTVYNELTKVKYVTEGMRKPAFLSGEQKKAIVDLLFKTNRKVTVKQLKEDYFKKIECFDSVEISGVEDRFNASLGTYHDLLKIIKDKDFLDNEENEDILEDIVLTLTLFEDREMIEERLKTYAHLFDDKVMKQLKRRRYTGWGRLSRKLINGIRDKQSGKTILDFLKSDGFANRNFMQLIHDDSLTFKEDIQKAQVSGQGDSLHEHIANLAGSPAIKKGILQTVKVVDELVKVMGRHKPENIVIEMARENQTTQKGQKNSRERMKRIEEGIKELGSQILKEHPVENTQLQNEKLYLYYLQNGRDMYVDQELDINRLSDYDVDHIVPQSFLKDDSIDNKVLTRSDKARGKSDNVPSEEVVKKMKNYWRQLLNAKLITQRKFDNLTKAERGGLSELDKAGFIKRQLVETRQITKHVAQILDSRMNTKYDENDKLIREVKVITLKSKLVSDFRKDFQFYKVREINNYHHAHDAYLNAVVGTALIKKYPKLESEFVYGDYKVYDVRKMIAKSEQEIGKATAKYFFYSNIMNFFKTEITLANGEIRKRPLIETNGETGEIVWDKGRDFATVRKVLSMPQVNIVKKTEVQTGGFSKESILPKRNSDKLIARKKDWDPKKYGGFDSPTVAYSVLVVAKVEKGKSKKLKSVKELLGITIMERSSFEKNPIDFLEAKGYKEVKKDLIIKLPKYSLFELENGRKRMLASAGELQKGNELALPSKYVNFLYLASHYEKLKGSPEDNEQKQLFVEQHKHYLDEIIEQISEFSKRVILADANLDKVLSAYNKHRDKPIREQAENIIHLFTLTNLGAPAAFKYFDTTIDRKRYTSTKEVLDATLIHQSITGLYETRIDLSQLGGDGGGGGGGGGTLNIEDEYRLHETSKEPDVPLGSTWLSDFPQAWAETGGMGLAVRQAPLIIPLKATSTPVSIKQYPMSQEARLGIKPHIQRLLDQGILVPCQSPWNTPLLPVKKPGTNDYRPVQDLREVNKRVEDIHPTVPNPYNLLSGLPPSHQWYTVLDLKDAFFCLRLHPTSQPLFAFEWRDPEMGISGQLTWTRLPQGFKNSPTLFNEALHRDLADFRIQHPDLILLQYVDDLLLAATSEQDCQRGTRALLQTLGNLGYRASAKKAQICQKQVKYLGYLLKEGQRWLTEARKETVMGQPTPKTPRQLREFLGKAGFCRLFIPGFAEMAAPLYPLTKPGTLFNWGPDQQKAYQEIKQALLTAPALGLPDLTKPFELFVDEKQGYAKGVLTQKLGPWRRPVAYLSKKLDPVAAGWPPCLRMVAAIAVLTKDAGKLTMGQPLVILAPHAVEALVKQPPDRWLSNARMTHYQAMLLDTDRVQFGPVVALNPATLLPLPEKEAPHDCLEILAETHGTRPDLTDQPIPDADYTWYTDGSSFLQEGQRRAGAAVTTETEVIWARALPAGTSAQRAELIALTQALKMAEGKKLNVYTDSRYAFATAHVHGEIYRRRGWLTSEGREIKNKNEILALLKALFLPKRLSIIHCPGHQKGNSAEARGNRMADQAAREAAMKAVLETSTLLAGKRTADGSEFEKRTADGSEFESPKKKAKVE

SEQ ID NO: 6254 - protein, 2093 aa, synthetic construct
MPAAKRVKLDGGDKKYSIGLDIGTNSVGWAVITDEYKVPSKKFKVLGNTDRHSIKKNLIGALLFDSGETAEATRLKRTARRRYTRRKNRICYLQEIFSNEMAKVDDSFFHRLEESFLVEEDKKHERHPIFGNIVDEVAYHEKYPTIYHLRKKLVDSTDKADLRLIYLALAHMIKFRGHFLIEGDLNPDNSDVDKLFIQLVQTYNQLFEENPINASGVDAKAILSARLSKSRRLENLIAQLPGEKKNGLFGNLIALSLGLTPNFKSNFDLAEDAKLQLSKDTYDDDLDNLLAQIGDQYADLFLAAKNLSDAILLSDILRVNTEITKAPLSASMIKRYDEHHQDLTLLKALVRQQLPEKYKEIFFDQSKNGYAGYIDGGASQEEFYKFIKPILEKMDGTEELLVKLNREDLLRKQRTFDNGSIPHQIHLGELHAILRRQEDFYPFLKDNREKIEKILTFRIPYYVGPLARGNSRFAWMTRKSEETITPWNFEEVVDKGASAQSFIERMTNFDKNLPNEKVLPKHSLLYEYFTVYNELTKVKYVTEGMRKPAFLSGEQKKAIVDLLFKTNRKVTVKQLKEDYFKKIECFDSVEISGVEDRFNASLGTYHDLLKIIKDKDFLDNEENEDILEDIVLTLTLFEDREMIEERLKTYAHLFDDKVMKQLKRRRYTGWGRLSRKLINGIRDKQSGKTILDFLKSDGFANRNFMQLIHDDSLTFKEDIQKAQVSGQGDSLHEHIANLAGSPAIKKGILQTVKVVDELVKVMGRHKPENIVIEMARENQTTQKGQKNSRERMKRIEEGIKELGSQILKEHPVENTQLQNEKLYLYYLQNGRDMYVDQELDINRLSDYDVDHIVPQSFLKDDSIDNKVLTRSDKARGKSDNVPSEEVVKKMKNYWRQLLNAKLITQRKFDNLTKAERGGLSELDKAGFIKRQLVETRQITKHVAQILDSRMNTKYDENDKLIREVKVITLKSKLVSDFRKDFQFYKVREINNYHHAHDAYLNAVVGTALIKKYPKLESEFVYGDYKVYDVRKMIAKSEQEIGKATAKYFFYSNIMNFFKTEITLANGEIRKRPLIETNGETGEIVWDKGRDFATVRKVLSMPQVNIVKKTEVQTGGFSKESILPKRNSDKLIARKKDWDPKKYGGFDSPTVAYSVLVVAKVEKGKSKKLKSVKELLGITIMERSSFEKNPIDFLEAKGYKEVKKDLIIKLPKYSLFELENGRKRMLASAGELQKGNELALPSKYVNFLYLASHYEKLKGSPEDNEQKQLFVEQHKHYLDEIIEQISEFSKRVILADANLDKVLSAYNKHRDKPIREQAENIIHLFTLTNLGAPAAFKYFDTTIDRKRYTSTKEVLDATLIHQSITGLYETRIDLSQLGGDGGGGGGGGGGTAPLEEEYRLFLEAPIQNVTLLEQWKREIPKVWAEINPPGLASTQAPIHVQLLSTALPVRVRQYPITLEAKRSLRETIRKFRAAGILRPVHSPWNTPLLPVRKSGTSEYRMVQDLREVNKRVETIHPTVPNPYTLLSLLPPDRIWYSVLDLKDAFFCIPLAPESQLIFAFEWADAEEGESGQLTWTRLPQGFKNSPTLFDEALNRDLQGFRLDHPSVSLLQYVDDLLIAADTQAACLSATRDLLMTLAELGYRVSGKKAQLCQEEVTYLGFKIHKGSRSLSNSRTQAILQIPVPKTKRQVREFLGTIGYCRLWIPGFAELAQPLYAATRGGNDPLVWGEKEEEAFQSLKLALTQPPALALPSLDKPFQLFVEETSGAAKGVLTQALGPWKRPVAYLSKRLDPVAAGWPRCLRAIAAAALLTREASKLTFGQDIEITSSHNLESLLRSPPDKWLTNARITQYQVLLLDPPRVRFKQTAALNPATLLPETDDTLPIHHCLDTLDSLTSTRPDLTDQPLAQAEATLFTDGSSYIRDGKRYAGAAVVTLDSVIWAEPLPIGTSAQKAELIALTKALEWSKDKSVNIYTDSRYAFATLHVHGMIYRERGLLTAGGKAIKNAPEILALLTAVWLPKRVAVMHCKGHQKDDAPTSTGNRRADEVAREVAIRPLSTQATISAGKRTADGSEFEKRTADGSEFESPKKKAKVE

SEQ ID NO: 6255 - protein, 1996 aa, synthetic construct
MPAAKRVKLDGGDKKYSIGLDIGTNSVGWAVITDEYKVPSKKFKVLGNTDRHSIKKNLIGALLFDSGETAEATRLKRTARRRYTRRKNRICYLQEIFSNEMAKVDDSFFHRLEESFLVEEDKKHERHPIFGNIVDEVAYHEKYPTIYHLRKKLVDSTDKADLRLIYLALAHMIKFRGHFLIEGDLNPDNSDVDKLFIQLVQTYNQLFEENPINASGVDAKAILSARLSKSRRLENLIAQLPGEKKNGLFGNLIALSLGLTPNFKSNFDLAEDAKLQLSKDTYDDDLDNLLAQIGDQYADLFLAAKNLSDAILLSDILRVNTEITKAPLSASMIKRYDEHHQDLTLLKALVRQQLPEKYKEIFFDQSKNGYAGYIDGGASQEEFYKFIKPILEKMDGTEELLVKLNREDLLRKQRTFDNGSIPHQIHLGELHAILRRQEDFYPFLKDNREKIEKILTFRIPYYVGPLARGNSRFAWMTRKSEETITPWNFEEVVDKGASAQSFIERMTNFDKNLPNEKVLPKHSLLYEYFTVYNELTKVKYVTEGMRKPAFLSGEQKKAIVDLLFKTNRKVTVKQLKEDYFKKIECFDSVEISGVEDRFNASLGTYHDLLKIIKDKDFLDNEENEDILEDIVLTLTLFEDREMIEERLKTYAHLFDDKVMKQLKRRRYTGWGRLSRKLINGIRDKQSGKTILDFLKSDGFANRNFMQLIHDDSLTFKEDIQKAQVSGQGDSLHEHIANLAGSPAIKKGILQTVKVVDELVKVMGRHKPENIVIEMARENQTTQKGQKNSRERMKRIEEGIKELGSQILKEHPVENTQLQNEKLYLYYLQNGRDMYVDQELDINRLSDYDVDHIVPQSFLKDDSIDNKVLTRSDKARGKSDNVPSEEVVKKMKNYWRQLLNAKLITQRKFDNLTKAERGGLSELDKAGFIKRQLVETRQITKHVAQILDSRMNTKYDENDKLIREVKVITLKSKLVSDFRKDFQFYKVREINNYHHAHDAYLNAVVGTALIKKYPKLESEFVYGDYKVYDVRKMIAKSEQEIGKATAKYFFYSNIMNFFKTEITLANGEIRKRPLIETNGETGEIVWDKGRDFATVRKVLSMPQVNIVKKTEVQTGGFSKESILPKRNSDKLIARKKDWDPKKYGGFDSPTVAYSVLVVAKVEKGKSKKLKSVKELLGITIMERSSFEKNPIDFLEAKGYKEVKKDLIIKLPKYSLFELENGRKRMLASAGELQKGNELALPSKYVNFLYLASHYEKLKGSPEDNEQKQLFVEQHKHYLDEIIEQISEFSKRVILADANLDKVLSAYNKHRDKPIREQAENIIHLFTLTNLGAPAAFKYFDTTIDRKRYTSTKEVLDATLIHQSITGLYETRIDLSQLGGDGGGGGGGGGGGVLDTPPSHIGLEHLPPPPEVPQFPLNLERLQALQDLVHRSLEAGYISPWDGPGNNPVFPVRKPNGAWRFVHDLRATNALTKPIPALSPGPPDLTAPPTHPPHIICLDLKDAFFQIPVEDRFRFYLSFTLPSPGGLQPHRRFAWRVLPQGFINSPALFQRALQEPLRQVSAAFSQSLLVSYMDDILYASPTEEQRSQCYQALAARLRDLGFQVASEKTSQTPSPVPFLGQMVHEQIVTYQSLPTLQISSPISLHQLQAVLGDLQWVSRGTPTTRRPLQLLYSSLKRHHDPRAIIQLSPEQLQGIAELRQALSHNARSRYNEQEPLLAYVHLTRAGSTLVLFQKGAQFPLAYFQTPLTDNQASPWGLLLLLGCQYLQTQALSSYAKPILKYYHNLPKTSLDNWIQSSEDPRVQELLQLWPQISSQGIQPPGPWKTLITRAEVFLTPQFSPDPIPAALCLFSDGATGRGAYCLWKDHLLDFQAVPAPESAQKGELAGLLAGLAAAPPEPVNIWVDSKYLYSLLRTWVLGAWLQPDPVPSYALLYKSLLRHPAIVVGHVRSHSSASHPIASLNNYVDQLAGKRTADGSEFEKRTADGSEFESPKKKAKVE

SEQ ID NO: 6256 - protein, 2089 aa, synthetic construct
MPAAKRVKLDGGDKKYSIGLDIGTNSVGWAVITDEYKVPSKKFKVLGNTDRHSIKKNLIGALLFDSGETAEATRLKRTARRRYTRRKNRICYLQEIFSNEMAKVDDSFFHRLEESFLVEEDKKHERHPIFGNIVDEVAYHEKYPTIYHLRKKLVDSTDKADLRLIYLALAHMIKFRGHFLIEGDLNPDNSDVDKLFIQLVQTYNQLFEENPINASGVDAKAILSARLSKSRRLENLIAQLPGEKKNGLFGNLIALSLGLTPNFKSNFDLAEDAKLQLSKDTYDDDLDNLLAQIGDQYADLFLAAKNLSDAILLSDILRVNTEITKAPLSASMIKRYDEHHQDLTLLKALVRQQLPEKYKEIFFDQSKNGYAGYIDGGASQEEFYKFIKPILEKMDGTEELLVKLNREDLLRKQRTFDNGSIPHQIHLGELHAILRRQEDFYPFLKDNREKIEKILTFRIPYYVGPLARGNSRFAWMTRKSEETITPWNFEEVVDKGASAQSFIERMTNFDKNLPNEKVLPKHSLLYEYFTVYNELTKVKYVTEGMRKPAFLSGEQKKAIVDLLFKTNRKVTVKQLKEDYFKKIECFDSVEISGVEDRFNASLGTYHDLLKIIKDKDFLDNEENEDILEDIVLTLTLFEDREMIEERLKTYAHLFDDKVMKQLKRRRYTGWGRLSRKLINGIRDKQSGKTILDFLKSDGFANRNFMQLIHDDSLTFKEDIQKAQVSGQGDSLHEHIANLAGSPAIKKGILQTVKVVDELVKVMGRHKPENIVIEMARENQTTQKGQKNSRERMKRIEEGIKELGSQILKEHPVENTQLQNEKLYLYYLQNGRDMYVDQELDINRLSDYDVDHIVPQSFLKDDSIDNKVLTRSDKARGKSDNVPSEEVVKKMKNYWRQLLNAKLITQRKFDNLTKAERGGLSELDKAGFIKRQLVETRQITKHVAQILDSRMNTKYDENDKLIREVKVITLKSKLVSDFRKDFQFYKVREINNYHHAHDAYLNAVVGTALIKKYPKLESEFVYGDYKVYDVRKMIAKSEQEIGKATAKYFFYSNIMNFFKTEITLANGEIRKRPLIETNGETGEIVWDKGRDFATVRKVLSMPQVNIVKKTEVQTGGFSKESILPKRNSDKLIARKKDWDPKKYGGFDSPTVAYSVLVVAKVEKGKSKKLKSVKELLGITIMERSSFEKNPIDFLEAKGYKEVKKDLIIKLPKYSLFELENGRKRMLASAGELQKGNELALPSKYVNFLYLASHYEKLKGSPEDNEQKQLFVEQHKHYLDEIIEQISEFSKRVILADANLDKVLSAYNKHRDKPIREQAENIIHLFTLTNLGAPAAFKYFDTTIDRKRYTSTKEVLDATLIHQSITGLYETRIDLSQLGGDGGGGGGGGGGVLNLEEEYRLHEKPVPSSIDPSWLQLFPTVWAERAGMGLANQVPPVVVELRSGASPVAVRQYPMSKEAREGIRPHIQKFLDLGVLVPCRSPWNTPLLPVKKPGTNDYRPVQDLREINKRVQDIHPTVPNPYNLLSSLPPSYTWYSVLDLKDAFFCLRLHPNSQPLFAFEWKDPEKGNTGQLTWTRLPQGFKNSPTLFNEALHRDLAPFRALNPQVVLLQYVDDLLVAAPTYEDCKKGTQKLLQELSKLGYRVSAKKAQLCQREVTYLGYLLKEGKRWLTPARKATVMKIPVPTTPRQVREFLGKAGFCRLFIPGFASLAAPLYPLTKPSIPFIWTEEHQQAFDHIKKALLSAPALALPDLTKPFTLYIDERAGVARGVLTQTLGPWRRPVAYLSKKLDPVASGWPTCLKAVAAVALLLKDADKLTLGQNVTVIASHSLESIVRQPPDRWMTNARMTHYQSLLLNERVSFAPPAVLNPATLLPVESEATPVHRCSEILAEETGTRRDLEDQPLPGVPTWYTDGSSFITEGKRRAGAPIVDGKRTVWASSLPEGTSAQKAELVALTQALRLAEGKNINIYTDSRYAFATAHIHGAIYKQRGWLTSAGKDIKNKEEILALLEAIHLPRRVAIIHCPGHQRGSNPVATGNRRADEAAKQAALSTRVLAGTTKPAGKRTADGSEFEKRTADGSEFESPKKKAKVE

SEQ ID NO: 6257 - protein, 2213 aa, synthetic construct
MPAAKRVKLDGGDKKYSIGLDIGTNSVGWAVITDEYKVPSKKFKVLGNTDRHSIKKNLIGALLFDSGETAEATRLKRTARRRYTRRKNRICYLQEIFSNEMAKVDDSFFHRLEESFLVEEDKKHERHPIFGNIVDEVAYHEKYPTIYHLRKKLVDSTDKADLRLIYLALAHMIKFRGHFLIEGDLNPDNSDVDKLFIQLVQTYNQLFEENPINASGVDAKAILSARLSKSRRLENLIAQLPGEKKNGLFGNLIALSLGLTPNFKSNFDLAEDAKLQLSKDTYDDDLDNLLAQIGDQYADLFLAAKNLSDAILLSDILRVNTEITKAPLSASMIKRYDEHHQDLTLLKALVRQQLPEKYKEIFFDQSKNGYAGYIDGGASQEEFYKFIKPILEKMDGTEELLVKLNREDLLRKQRTFDNGSIPHQIHLGELHAILRRQEDFYPFLKDNREKIEKILTFRIPYYVGPLARGNSRFAWMTRKSEETITPWNFEEVVDKGASAQSFIERMTNFDKNLPNEKVLPKHSLLYEYFTVYNELTKVKYVTEGMRKPAFLSGEQKKAIVDLLFKTNRKVTVKQLKEDYFKKIECFDSVEISGVEDRFNASLGTYHDLLKIIKDKDFLDNEENEDILEDIVLTLTLFEDREMIEERLKTYAHLFDDKVMKQLKRRRYTGWGRLSRKLINGIRDKQSGKTILDFLKSDGFANRNFMQLIHDDSLTFKEDIQKAQVSGQGDSLHEHIANLAGSPAIKKGILQTVKVVDELVKVMGRHKPENIVIEMARENQTTQKGQKNSRERMKRIEEGIKELGSQILKEHPVENTQLQNEKLYLYYLQNGRDMYVDQELDINRLSDYDVDHIVPQSFLKDDSIDNKVLTRSDKARGKSDNVPSEEVVKKMKNYWRQLLNAKLITQRKFDNLTKAERGGLSELDKAGFIKRQLVETRQITKHVAQILDSRMNTKYDENDKLIREVKVITLKSKLVSDFRKDFQFYKVREINNYHHAHDAYLNAVVGTALIKKYPKLESEFVYGDYKVYDVRKMIAKSEQEIGKATAKYFFYSNIMNFFKTEITLANGEIRKRPLIETNGETGEIVWDKGRDFATVRKVLSMPQVNIVKKTEVQTGGFSKESILPKRNSDKLIARKKDWDPKKYGGFDSPTVAYSVLVVAKVEKGKSKKLKSVKELLGITIMERSSFEKNPIDFLEAKGYKEVKKDLIIKLPKYSLFELENGRKRMLASAGELQKGNELALPSKYVNFLYLASHYEKLKGSPEDNEQKQLFVEQHKHYLDEIIEQISEFSKRVILADANLDKVLSAYNKHRDKPIREQAENIIHLFTLTNLGAPAAFKYFDTTIDRKRYTSTKEVLDATLIHQSITGLYETRIDLSQLGGDGGGGGGGGGGTLGDQGSRGSDPLPEPRVTLTVEGIPTEFLVNTGAEHSVLTKPMGKMGSKRTVVAGATGSKVYPWTTKRLLKIGQKQVTHSFLVIPECPAPLLGRDLLTKLKAQIQFSTEGPQVTWEDRPAMCLVLNLEEEYRLHEKPVPPSIDPSWLQLFPMVWAEKAGMGLANQVPPVVVELKSDASPVAVRQYPMSKEAREGIRPHIQRFLDLGILVPCQSPWNTPLLPVKKPGTNDYRPVQDLREVNKRVQDIHPTVPNPYNLLSSLPPSHTWYSVLDLKDAFFCLKLHPNSQPLFAFEWRDPEKGNTGQLTWTRLPQGFKNSPTLFNEALHRDLASFRALNPQVVMLQYVDDLLVAAPTYRDCKEGTRRLLQELSKLGYRVSAKKAQLCREEVTYLGYLLKGGKRWLTPARKATVMKIPTPTTPRQVREFLGTAGFCRLWIPGFASLAAPLYPLTRPKVPFTWTEAHQEAFGRIKEALLSAPALALPDLTKPFALYVDEKEGVARGVLTQTLGPWRRPVAYLSKKLDPVASGWPTCLKAIAAVALLLKDADKLTLGQNVLVIAPHNLESIVRQPPDRWMTNARMTHYQSLLLNERVSFAPPAILNPATLLPVESDDTPIHICSEILAEETGTRPDLRDQPLPGVPAWYTDGSSFIMDGRRQAGAAIVDNKRTVWASNLPEGTSAQKAELIALTQALRLAEGKSINIYTDSRYAFATAHVHGAIYKQRGWLTSAGKDIKNKEEILALLEAIHLPKRVAIIHCPGHQRGTDPVATGNRKADEAAKQAAQSTRILTETTKNAGKRTADGSEFEKRTADGSEFESPKKKAKVE

SEQ ID NO: 6258 - protein, 2213 aa, synthetic construct
MPAAKRVKLDGGDKKYSIGLDIGTNSVGWAVITDEYKVPSKKFKVLGNTDRHSIKKNLIGALLFDSGETAEATRLKRTARRRYTRRKNRICYLQEIFSNEMAKVDDSFFHRLEESFLVEEDKKHERHPIFGNIVDEVAYHEKYPTIYHLRKKLVDSTDKADLRLIYLALAHMIKFRGHFLIEGDLNPDNSDVDKLFIQLVQTYNQLFEENPINASGVDAKAILSARLSKSRRLENLIAQLPGEKKNGLFGNLIALSLGLTPNFKSNFDLAEDAKLQLSKDTYDDDLDNLLAQIGDQYADLFLAAKNLSDAILLSDILRVNTEITKAPLSASMIKRYDEHHQDLTLLKALVRQQLPEKYKEIFFDQSKNGYAGYIDGGASQEEFYKFIKPILEKMDGTEELLVKLNREDLLRKQRTFDNGSIPHQIHLGELHAILRRQEDFYPFLKDNREKIEKILTFRIPYYVGPLARGNSRFAWMTRKSEETITPWNFEEVVDKGASAQSFIERMTNFDKNLPNEKVLPKHSLLYEYFTVYNELTKVKYVTEGMRKPAFLSGEQKKAIVDLLFKTNRKVTVKQLKEDYFKKIECFDSVEISGVEDRFNASLGTYHDLLKIIKDKDFLDNEENEDILEDIVLTLTLFEDREMIEERLKTYAHLFDDKVMKQLKRRRYTGWGRLSRKLINGIRDKQSGKTILDFLKSDGFANRNFMQLIHDDSLTFKEDIQKAQVSGQGDSLHEHIANLAGSPAIKKGILQTVKVVDELVKVMGRHKPENIVIEMARENQTTQKGQKNSRERMKRIEEGIKELGSQILKEHPVENTQLQNEKLYLYYLQNGRDMYVDQELDINRLSDYDVDHIVPQSFLKDDSIDNKVLTRSDKARGKSDNVPSEEVVKKMKNYWRQLLNAKLITQRKFDNLTKAERGGLSELDKAGFIKRQLVETRQITKHVAQILDSRMNTKYDENDKLIREVKVITLKSKLVSDFRKDFQFYKVREINNYHHAHDAYLNAVVGTALIKKYPKLESEFVYGDYKVYDVRKMIAKSEQEIGKATAKYFFYSNIMNFFKTEITLANGEIRKRPLIETNGETGEIVWDKGRDFATVRKVLSMPQVNIVKKTEVQTGGFSKESILPKRNSDKLIARKKDWDPKKYGGFDSPTVAYSVLVVAKVEKGKSKKLKSVKELLGITIMERSSFEKNPIDFLEAKGYKEVKKDLIIKLPKYSLFELENGRKRMLASAGELQKGNELALPSKYVNFLYLASHYEKLKGSPEDNEQKQLFVEQHKHYLDEIIEQISEFSKRVILADANLDKVLSAYNKHRDKPIREQAENIIHLFTLTNLGAPAAFKYFDTTIDRKRYTSTKEVLDATLIHQSITGLYETRIDLSQLGGDGGGGGGGGGGTLGDQGSRGSDPLPEPRVTLTVEGIPTEFLVNTGAEHSVLTKPMGKMGSKRTVVAGATGSKVYPWTTKRLLKIGQKQVTHSFLVIPECPAPLLGRDLLTKLKAQIQFSTEGPQVTWEDRPAMCLVLNLEEEYRLHEKPVPPSIDPSWLQLFPMVWAEKAGMGLANQVPPVVVELKSDASPVAVRQYPMSKEAREGIRPHIQRFLDLGILVPCQSPWNTPLLPVKKPGTNDYRPVQDLREVNKRVQDIHPTVPNPYNLLSSLPPSHTWYSVLDLKDAFFCLKLHPNSQPLFAFEWRDPEKGNTGQLTWTRLPQGFKNSPTLFNEALHRDLASFRALNPQVVMLQYVDDLLVAAPTYRDCKEGTRRLLQELSKLGYRVSAKKAQLCREEVTYLGYLLKGGKRWLTPARKATVMKIPTPTTPRQVREFLGKAGFCRLFIPGFASLAAPLYPLTRPKVPFTWTEAHQEAFGRIKEALLSAPALALPDLTKPFALYVDEKEGVARGVLTQTLGPWRRPVAYLSKKLDPVASGWPTCLKAIAAVALLLKDADKLTLGQNVLVIAPHNLESIVRQPPDRWMTNARMTHYQSLLLNERVSFAPPAILNPATLLPVESDDTPIHICSEILAEETGTRPDLRDQPLPGVPAWYTDGSSFIMDGRRQAGAAIVDNKRTVWASNLPEGTSAQKAELIALTQALRLAEGKSINIYTDSRYAFATAHVHGAIYKQRGWLTSAGKDIKNKEEILALLEAIHLPKRVAIIHCPGHQRGTDPVATGNRKADEAAKQAAQSTRILTETTKNAGKRTADGSEFEKRTADGSEFESPKKKAKVE

SEQ ID NO: 6259 - protein, 2091 aa, synthetic construct
MPAAKRVKLDGGDKKYSIGLDIGTNSVGWAVITDEYKVPSKKFKVLGNTDRHSIKKNLIGALLFDSGETAEATRLKRTARRRYTRRKNRICYLQEIFSNEMAKVDDSFFHRLEESFLVEEDKKHERHPIFGNIVDEVAYHEKYPTIYHLRKKLVDSTDKADLRLIYLALAHMIKFRGHFLIEGDLNPDNSDVDKLFIQLVQTYNQLFEENPINASGVDAKAILSARLSKSRRLENLIAQLPGEKKNGLFGNLIALSLGLTPNFKSNFDLAEDAKLQLSKDTYDDDLDNLLAQIGDQYADLFLAAKNLSDAILLSDILRVNTEITKAPLSASMIKRYDEHHQDLTLLKALVRQQLPEKYKEIFFDQSKNGYAGYIDGGASQEEFYKFIKPILEKMDGTEELLVKLNREDLLRKQRTFDNGSIPHQIHLGELHAILRRQEDFYPFLKDNREKIEKILTFRIPYYVGPLARGNSRFAWMTRKSEETITPWNFEEVVDKGASAQSFIERMTNFDKNLPNEKVLPKHSLLYEYFTVYNELTKVKYVTEGMRKPAFLSGEQKKAIVDLLFKTNRKVTVKQLKEDYFKKIECFDSVEISGVEDRFNASLGTYHDLLKIIKDKDFLDNEENEDILEDIVLTLTLFEDREMIEERLKTYAHLFDDKVMKQLKRRRYTGWGRLSRKLINGIRDKQSGKTILDFLKSDGFANRNFMQLIHDDSLTFKEDIQKAQVSGQGDSLHEHIANLAGSPAIKKGILQTVKVVDELVKVMGRHKPENIVIEMARENQTTQKGQKNSRERMKRIEEGIKELGSQILKEHPVENTQLQNEKLYLYYLQNGRDMYVDQELDINRLSDYDVDHIVPQSFLKDDSIDNKVLTRSDKARGKSDNVPSEEVVKKMKNYWRQLLNAKLITQRKFDNLTKAERGGLSELDKAGFIKRQLVETRQITKHVAQILDSRMNTKYDENDKLIREVKVITLKSKLVSDFRKDFQFYKVREINNYHHAHDAYLNAVVGTALIKKYPKLESEFVYGDYKVYDVRKMIAKSEQEIGKATAKYFFYSNIMNFFKTEITLANGEIRKRPLIETNGETGEIVWDKGRDFATVRKVLSMPQVNIVKKTEVQTGGFSKESILPKRNSDKLIARKKDWDPKKYGGFDSPTVAYSVLVVAKVEKGKSKKLKSVKELLGITIMERSSFEKNPIDFLEAKGYKEVKKDLIIKLPKYSLFELENGRKRMLASAGELQKGNELALPSKYVNFLYLASHYEKLKGSPEDNEQKQLFVEQHKHYLDEIIEQISEFSKRVILADANLDKVLSAYNKHRDKPIREQAENIIHLFTLTNLGAPAAFKYFDTTIDRKRYTSTKEVLDATLIHQSITGLYETRIDLSQLGGDGGGGGGGGGGTLNLEDEYRLYETSAEPEVSPGSTWLSDFPQAWAETGGMGLAVRQAPLIIPLKATSTPVSIKQYPMSQEAKLGIKPHIQRLLDQGILVPCQSPWNTPLLPVKKPGTNDYRPVQDLREVNKRVEDIHPTVPNPYNLLSGLPPSHRWYTVLDLKDAFFCLRLHPTSQPLFAFEWRDPGMGISGQLTWTRLPQGFKNSPTLFNEALHRDLADFRIQHPDLILLQYVDDILLAATSELDCQQGTRALLLTLGNLGYRASAKKAQLCQKQVKYLGYLLKEGQRWLTEARKETVMGQPTPKTPRQLREFLGTAGFCRLWIPGFAEMAAPLYPLTKPGTLFNWGPDQQKAYQEIKQALLTAPALGLPDLTKPFELFVDEKQGYAKGVLTQKLGPWRRPVAYLSKKLDPVAAGWPPCLRMVAAIAVLRKDAGKLTMGQPLVILAPHAVEALVKQPPDRWLSNARMTHYQAMLLDTDRVQFGPVVALNPATLLPLPEEGAPHDCLEILAETHGTRPDLTDQPIPDADHTWYTDGSSFLQEGQRKAGAAVTTETEVIWARALPAGTSAQRAELIALTQALKMAEGKRLNVYTDSRYAFATAHIHGEIYRRRGWLTSEGREIKNKSEILALLKALFLPKRLSIIHCLGHQKGDSAEARGNRLADQAAREAAIKTPPDTSTLLAGKRTADGSEFEKRTADGSEFESPKKKAKVE

SEQ ID NO: 6260 - protein, 2091 aa, synthetic construct
MPAAKRVKLDGGDKKYSIGLDIGTNSVGWAVITDEYKVPSKKFKVLGNTDRHSIKKNLIGALLFDSGETAEATRLKRTARRRYTRRKNRICYLQEIFSNEMAKVDDSFFHRLEESFLVEEDKKHERHPIFGNIVDEVAYHEKYPTIYHLRKKLVDSTDKADLRLIYLALAHMIKFRGHFLIEGDLNPDNSDVDKLFIQLVQTYNQLFEENPINASGVDAKAILSARLSKSRRLENLIAQLPGEKKNGLFGNLIALSLGLTPNFKSNFDLAEDAKLQLSKDTYDDDLDNLLAQIGDQYADLFLAAKNLSDAILLSDILRVNTEITKAPLSASMIKRYDEHHQDLTLLKALVRQQLPEKYKEIFFDQSKNGYAGYIDGGASQEEFYKFIKPILEKMDGTEELLVKLNREDLLRKQRTFDNGSIPHQIHLGELHAILRRQEDFYPFLKDNREKIEKILTFRIPYYVGPLARGNSRFAWMTRKSEETITPWNFEEVVDKGASAQSFIERMTNFDKNLPNEKVLPKHSLLYEYFTVYNELTKVKYVTEGMRKPAFLSGEQKKAIVDLLFKTNRKVTVKQLKEDYFKKIECFDSVEISGVEDRFNASLGTYHDLLKIIKDKDFLDNEENEDILEDIVLTLTLFEDREMIEERLKTYAHLFDDKVMKQLKRRRYTGWGRLSRKLINGIRDKQSGKTILDFLKSDGFANRNFMQLIHDDSLTFKEDIQKAQVSGQGDSLHEHIANLAGSPAIKKGILQTVKVVDELVKVMGRHKPENIVIEMARENQTTQKGQKNSRERMKRIEEGIKELGSQILKEHPVENTQLQNEKLYLYYLQNGRDMYVDQELDINRLSDYDVDHIVPQSFLKDDSIDNKVLTRSDKARGKSDNVPSEEVVKKMKNYWRQLLNAKLITQRKFDNLTKAERGGLSELDKAGFIKRQLVETRQITKHVAQILDSRMNTKYDENDKLIREVKVITLKSKLVSDFRKDFQFYKVREINNYHHAHDAYLNAVVGTALIKKYPKLESEFVYGDYKVYDVRKMIAKSEQEIGKATAKYFFYSNIMNFFKTEITLANGEIRKRPLIETNGETGEIVWDKGRDFATVRKVLSMPQVNIVKKTEVQTGGFSKESILPKRNSDKLIARKKDWDPKKYGGFDSPTVAYSVLVVAKVEKGKSKKLKSVKELLGITIMERSSFEKNPIDFLEAKGYKEVKKDLIIKLPKYSLFELENGRKRMLASAGELQKGNELALPSKYVNFLYLASHYEKLKGSPEDNEQKQLFVEQHKHYLDEIIEQISEFSKRVILADANLDKVLSAYNKHRDKPIREQAENIIHLFTLTNLGAPAAFKYFDTTIDRKRYTSTKEVLDATLIHQSITGLYETRIDLSQLGGDGGGGGGGGGGTLNIEDEYRLHETSKEPDVSLGSTWLSDFPQAWAETGGMGLAVRQAPLIIPLKATSTPVSIKQYPMSQEARLGIKPHIQRLLDQGILVPCQSPWNTPLLPVKKPGTNDYRPVQDLREVNKRVEDIHPTVPNPYNLLSGLPPSHQWYTVLDLKDAFFCLRLHPTSQPLFAFEWRDPEMGISGQLTWTRLPQGFKNSPTLFNEALHRDLAGFRIQHPDLILLQYVDDLLLAATSELDCQQGTRALLQTLGDLGYRASAKKAQICQKQVKYLGYLLKEGQRWLTEARKETVMGQPIPKTPRQLREFLGTAGFCRLWIPGFAEMAAPLYPLTKPGTLFNWGPDQQKAFQEIKQALLTAPALGLPDLTKPFELFVDEKQGYAKGVLTQKLGPWRRPVAYLSKKLDPVAAGWPPCLRMVAAIAVLTKDAGKLTMGQPLVILAPHAVEALVKQPPDRWLSNARMTHYQALLLDTDRVQFGPVVALNPATLLPLPEEGLQHDCLDILAEAHGTRSDLMDQPLPDADHTWYTDGSSFLQEGQRKAGAAVTTETEVIWARALPAGTSAQRAELIALTQALKMAEGKKLNVYTDSRYAFATAHIHGEIYRRRGWLTSEGKEIKNKDEILALLKALFLPKRLSIIHCPGHQKGNSAEARGNRMADQAAREVATRETPETSTLLAGKRTADGSEFEKRTADGSEFESPKKKAKVE

SEQ ID NO: 6261 - protein, 2082 aa, synthetic construct
MPAAKRVKLDGGDKKYSIGLDIGTNSVGWAVITDEYKVPSKKFKVLGNTDRHSIKKNLIGALLFDSGETAEATRLKRTARRRYTRRKNRICYLQEIFSNEMAKVDDSFFHRLEESFLVEEDKKHERHPIFGNIVDEVAYHEKYPTIYHLRKKLVDSTDKADLRLIYLALAHMIKFRGHFLIEGDLNPDNSDVDKLFIQLVQTYNQLFEENPINASGVDAKAILSARLSKSRRLENLIAQLPGEKKNGLFGNLIALSLGLTPNFKSNFDLAEDAKLQLSKDTYDDDLDNLLAQIGDQYADLFLAAKNLSDAILLSDILRVNTEITKAPLSASMIKRYDEHHQDLTLLKALVRQQLPEKYKEIFFDQSKNGYAGYIDGGASQEEFYKFIKPILEKMDGTEELLVKLNREDLLRKQRTFDNGSIPHQIHLGELHAILRRQEDFYPFLKDNREKIEKILTFRIPYYVGPLARGNSRFAWMTRKSEETITPWNFEEVVDKGASAQSFIERMTNFDKNLPNEKVLPKHSLLYEYFTVYNELTKVKYVTEGMRKPAFLSGEQKKAIVDLLFKTNRKVTVKQLKEDYFKKIECFDSVEISGVEDRFNASLGTYHDLLKIIKDKDFLDNEENEDILEDIVLTLTLFEDREMIEERLKTYAHLFDDKVMKQLKRRRYTGWGRLSRKLINGIRDKQSGKTILDFLKSDGFANRNFMQLIHDDSLTFKEDIQKAQVSGQGDSLHEHIANLAGSPAIKKGILQTVKVVDELVKVMGRHKPENIVIEMARENQTTQKGQKNSRERMKRIEEGIKELGSQILKEHPVENTQLQNEKLYLYYLQNGRDMYVDQELDINRLSDYDVDHIVPQSFLKDDSIDNKVLTRSDKARGKSDNVPSEEVVKKMKNYWRQLLNAKLITQRKFDNLTKAERGGLSELDKAGFIKRQLVETRQITKHVAQILDSRMNTKYDENDKLIREVKVITLKSKLVSDFRKDFQFYKVREINNYHHAHDAYLNAVVGTALIKKYPKLESEFVYGDYKVYDVRKMIAKSEQEIGKATAKYFFYSNIMNFFKTEITLANGEIRKRPLIETNGETGEIVWDKGRDFATVRKVLSMPQVNIVKKTEVQTGGFSKESILPKRNSDKLIARKKDWDPKKYGGFDSPTVAYSVLVVAKVEKGKSKKLKSVKELLGITIMERSSFEKNPIDFLEAKGYKEVKKDLIIKLPKYSLFELENGRKRMLASAGELQKGNELALPSKYVNFLYLASHYEKLKGSPEDNEQKQLFVEQHKHYLDEIIEQISEFSKRVILADANLDKVLSAYNKHRDKPIREQAENIIHLFTLTNLGAPAAFKYFDTTIDRKRYTSTKEVLDATLIHQSITGLYETRIDLSQLGGDGGGGGGGGGGIPWLMKKPLQLTTLVPLQEYEERLLKQTMLTGSYKEKLQSLFLKYDALWQHWENQVGHRRIKPHHIATGTVNPRPQKQYPINPKAKASIQTVINDLLKQGVLIQQNSIMNTPVYPVPKPDGKWRMVLDYREVNKTIPLIAAQNQHSAGILSSIFRGKYKTTLDLSNGFWAHSITPESYWLTAFTWLGQQYCWTRLPQGFLNSPALFNADVVDLLKEVPNVQVYVDDIYISHDDPREHLEQLEKVFSLLLNAGYVVSLKKSEIAQHEVEFLGFNITKEGRGLTETFKQKLLNITPPRDLKQLQSILGLLNFARNFIPNFSELVKPLYNIIATAPGKYITWTTDNSQQLQNIISMLNSAENLEERNPEVRLIMKVNTSPSAGYIRFYNEFAKRPIMYLNYVYTKAEVKFTNTEKLLTTIHKGLIKALDLGMGQEILVYSPIVSMTKIQKTPLPERKALPIRWITWMSYLEDPRIQFHYDKTLPELQQVPTVTDDIIAKIKHPSEFSMVFYTDGSAIKHPNVNKSHNAGMGIAQVQFKPEFTVINTWSIPLGDHTAQLAEVAAVEFACKKALKIDGPVLIVTDSFYVAESVNKELPYWQSNGFFNNKKKPLKHVSKWKSIADCIQLKPDIIIIHEKGHQPTASTFHTEGNNLADKLATQGSYVVNAGKRTADGSEFEKRTADGSEFESPKKKAKVE

SEQ ID NO: 6262 - protein, 2091 aa, synthetic construct
MPAAKRVKLDGGDKKYSIGLDIGTNSVGWAVITDEYKVPSKKFKVLGNTDRHSIKKNLIGALLFDSGETAEATRLKRTARRRYTRRKNRICYLQEIFSNEMAKVDDSFFHRLEESFLVEEDKKHERHPIFGNIVDEVAYHEKYPTIYHLRKKLVDSTDKADLRLIYLALAHMIKFRGHFLIEGDLNPDNSDVDKLFIQLVQTYNQLFEENPINASGVDAKAILSARLSKSRRLENLIAQLPGEKKNGLFGNLIALSLGLTPNFKSNFDLAEDAKLQLSKDTYDDDLDNLLAQIGDQYADLFLAAKNLSDAILLSDILRVNTEITKAPLSASMIKRYDEHHQDLTLLKALVRQQLPEKYKEIFFDQSKNGYAGYIDGGASQEEFYKFIKPILEKMDGTEELLVKLNREDLLRKQRTFDNGSIPHQIHLGELHAILRRQEDFYPFLKDNREKIEKILTFRIPYYVGPLARGNSRFAWMTRKSEETITPWNFEEVVDKGASAQSFIERMTNFDKNLPNEKVLPKHSLLYEYFTVYNELTKVKYVTEGMRKPAFLSGEQKKAIVDLLFKTNRKVTVKQLKEDYFKKIECFDSVEISGVEDRFNASLGTYHDLLKIIKDKDFLDNEENEDILEDIVLTLTLFEDREMIEERLKTYAHLFDDKVMKQLKRRRYTGWGRLSRKLINGIRDKQSGKTILDFLKSDGFANRNFMQLIHDDSLTFKEDIQKAQVSGQGDSLHEHIANLAGSPAIKKGILQTVKVVDELVKVMGRHKPENIVIEMARENQTTQKGQKNSRERMKRIEEGIKELGSQILKEHPVENTQLQNEKLYLYYLQNGRDMYVDQELDINRLSDYDVDHIVPQSFLKDDSIDNKVLTRSDKARGKSDNVPSEEVVKKMKNYWRQLLNAKLITQRKFDNLTKAERGGLSELDKAGFIKRQLVETRQITKHVAQILDSRMNTKYDENDKLIREVKVITLKSKLVSDFRKDFQFYKVREINNYHHAHDAYLNAVVGTALIKKYPKLESEFVYGDYKVYDVRKMIAKSEQEIGKATAKYFFYSNIMNFFKTEITLANGEIRKRPLIETNGETGEIVWDKGRDFATVRKVLSMPQVNIVKKTEVQTGGFSKESILPKRNSDKLIARKKDWDPKKYGGFDSPTVAYSVLVVAKVEKGKSKKLKSVKELLGITIMERSSFEKNPIDFLEAKGYKEVKKDLIIKLPKYSLFELENGRKRMLASAGELQKGNELALPSKYVNFLYLASHYEKLKGSPEDNEQKQLFVEQHKHYLDEIIEQISEFSKRVILADANLDKVLSAYNKHRDKPIREQAENIIHLFTLTNLGAPAAFKYFDTTIDRKRYTSTKEVLDATLIHQSITGLYETRIDLSQLGGDGGGGGGGGGGTLNIEDEYRLHETSKEPDVPLGSTWLSDFPQAWAETGGMGLAVRQAPLIIPLKATSTPVSIKQYPMSQEARLGIKPHIQRLLDQGILVPCQSPWNTPLLPVKKPGTNDYRPVQDLREVNKRVEDIHPTVPNPYNLLSGLPPSHQWYTVLDLKDAFFCLRLHPTSQPLFAFEWRDPEMGISGQLTWTRLPQGFKNSPTLFNEALHRDLADFRIQHPDLILLQYVDDLLLAATSEQDCQRGTRALLQTLGNLGYRASAKKAQICQKQVKYLGYLLKEGQRWLTEARKETVMGQPTPKTPRQLREFLGTAGFCRLWIPGFAEMAAPLYPLTKPGTLFNWGPDQQKAYQEIKQALLTAPALGLPDLTKPFELFVDEKQGYAKGVLTQKLGPWRRPVAYLSKKLDPVAAGWPPCLRMVAAIAVLTKDAGKLTMGQPLVILAPHAVEALVKQPPDRWLSNARMTHYQAMLLDTDRVQFGPVVALNPATLLPLPEKEAPHDCLEILAETHGTRPDLTDQPIPDADYTWYTDGSSFLQEGQRRAGAAVTTETEVIWARALPAGTSAQRAELIALTQALKMAEGKKLNVYTDSRYAFATAHVHGEIYRRRGWLTSEGREIKNKNEILALLKALFLPKRLSIIHCPGHQKGNSAEARGNRMADQAAREAAMKAVLETSTLLAGKRTADGSEFEKRTADGSEFESPKKKAKVE

SEQ ID NO: 6263 - protein, 2091 aa, synthetic construct
MPAAKRVKLDGGDKKYSIGLDIGTNSVGWAVITDEYKVPSKKFKVLGNTDRHSIKKNLIGALLFDSGETAEATRLKRTARRRYTRRKNRICYLQEIFSNEMAKVDDSFFHRLEESFLVEEDKKHERHPIFGNIVDEVAYHEKYPTIYHLRKKLVDSTDKADLRLIYLALAHMIKFRGHFLIEGDLNPDNSDVDKLFIQLVQTYNQLFEENPINASGVDAKAILSARLSKSRRLENLIAQLPGEKKNGLFGNLIALSLGLTPNFKSNFDLAEDAKLQLSKDTYDDDLDNLLAQIGDQYADLFLAAKNLSDAILLSDILRVNTEITKAPLSASMIKRYDEHHQDLTLLKALVRQQLPEKYKEIFFDQSKNGYAGYIDGGASQEEFYKFIKPILEKMDGTEELLVKLNREDLLRKQRTFDNGSIPHQIHLGELHAILRRQEDFYPFLKDNREKIEKILTFRIPYYVGPLARGNSRFAWMTRKSEETITPWNFEEVVDKGASAQSFIERMTNFDKNLPNEKVLPKHSLLYEYFTVYNELTKVKYVTEGMRKPAFLSGEQKKAIVDLLFKTNRKVTVKQLKEDYFKKIECFDSVEISGVEDRFNASLGTYHDLLKIIKDKDFLDNEENEDILEDIVLTLTLFEDREMIEERLKTYAHLFDDKVMKQLKRRRYTGWGRLSRKLINGIRDKQSGKTILDFLKSDGFANRNFMQLIHDDSLTFKEDIQKAQVSGQGDSLHEHIANLAGSPAIKKGILQTVKVVDELVKVMGRHKPENIVIEMARENQTTQKGQKNSRERMKRIEEGIKELGSQILKEHPVENTQLQNEKLYLYYLQNGRDMYVDQELDINRLSDYDVDHIVPQSFLKDDSIDNKVLTRSDKARGKSDNVPSEEVVKKMKNYWRQLLNAKLITQRKFDNLTKAERGGLSELDKAGFIKRQLVETRQITKHVAQILDSRMNTKYDENDKLIREVKVITLKSKLVSDFRKDFQFYKVREINNYHHAHDAYLNAVVGTALIKKYPKLESEFVYGDYKVYDVRKMIAKSEQEIGKATAKYFFYSNIMNFFKTEITLANGEIRKRPLIETNGETGEIVWDKGRDFATVRKVLSMPQVNIVKKTEVQTGGFSKESILPKRNSDKLIARKKDWDPKKYGGFDSPTVAYSVLVVAKVEKGKSKKLKSVKELLGITIMERSSFEKNPIDFLEAKGYKEVKKDLIIKLPKYSLFELENGRKRMLASAGELQKGNELALPSKYVNFLYLASHYEKLKGSPEDNEQKQLFVEQHKHYLDEIIEQISEFSKRVILADANLDKVLSAYNKHRDKPIREQAENIIHLFTLTNLGAPAAFKYFDTTIDRKRYTSTKEVLDATLIHQSITGLYETRIDLSQLGGDGGGGGGGGGGTLNIEDEYRLHETSKEPDVPLGSTWLSDFPQAWAETGGMGLAVRQAPLIIPLKATSTPVSIKQYPMSQEARLGIKPHIQRLLDQGILVPCQSPWNTPLLPVKKPGTNDYRPVQDLREVNKRVEDIHPTVPNPYNLLSGLPPSHQWYTVLDLKDAFFCLRLHPTSQPLFAFEWRDPEMGISGQLTWTRLPQGFKNSPTLFNEALHRDLADFRIQHPDLILLQYVDDLLLAATSEQDCQRGTRALLQTLGNLGYRASAKKAQICQKQVKYLGYLLKEGQRWLTEARKETVMGQPTPKTPRQLREFLGKAGFCRLFIPGFAEMAAPLYPLTKPGTLFNWGPDQQKAYQEIKQALLTAPALGLPDLTKPFELFVDEKQGYAKGVLTQKLGPWRRPVAYLSKKLDPVAAGWPPCLRMVAAIAVLTKDAGKLTMGQPLVILAPHAVEALVKQPPDRWLSNARMTHYQAMLLDTDRVQFGPVVALNPATLLPLPEKEAPHDCLEILAETHGTRPDLTDQPIPDADYTWYTDGSSFLQEGQRRAGAAVTTETEVIWARALPAGTSAQRAELIALTQALKMAEGKKLNVYTDSRYAFATAHVHGEIYRRRGWLTSEGREIKNKNEILALLKALFLPKRLSIIHCPGHQKGNSAEARGNRMADQAAREAAMKAVLETSTLLAGKRTADGSEFEKRTADGSEFESPKKKAKVE

SEQ ID NO: 6264 - protein, 2094 aa, synthetic construct
MPAAKRVKLDGGDKKYSIGLDIGTNSVGWAVITDEYKVPSKKFKVLGNTDRHSIKKNLIGALLFDSGETAEATRLKRTARRRYTRRKNRICYLQEIFSNEMAKVDDSFFHRLEESFLVEEDKKHERHPIFGNIVDEVAYHEKYPTIYHLRKKLVDSTDKADLRLIYLALAHMIKFRGHFLIEGDLNPDNSDVDKLFIQLVQTYNQLFEENPINASGVDAKAILSARLSKSRRLENLIAQLPGEKKNGLFGNLIALSLGLTPNFKSNFDLAEDAKLQLSKDTYDDDLDNLLAQIGDQYADLFLAAKNLSDAILLSDILRVNTEITKAPLSASMIKRYDEHHQDLTLLKALVRQQLPEKYKEIFFDQSKNGYAGYIDGGASQEEFYKFIKPILEKMDGTEELLVKLNREDLLRKQRTFDNGSIPHQIHLGELHAILRRQEDFYPFLKDNREKIEKILTFRIPYYVGPLARGNSRFAWMTRKSEETITPWNFEEVVDKGASAQSFIERMTNFDKNLPNEKVLPKHSLLYEYFTVYNELTKVKYVTEGMRKPAFLSGEQKKAIVDLLFKTNRKVTVKQLKEDYFKKIECFDSVEISGVEDRFNASLGTYHDLLKIIKDKDFLDNEENEDILEDIVLTLTLFEDREMIEERLKTYAHLFDDKVMKQLKRRRYTGWGRLSRKLINGIRDKQSGKTILDFLKSDGFANRNFMQLIHDDSLTFKEDIQKAQVSGQGDSLHEHIANLAGSPAIKKGILQTVKVVDELVKVMGRHKPENIVIEMARENQTTQKGQKNSRERMKRIEEGIKELGSQILKEHPVENTQLQNEKLYLYYLQNGRDMYVDQELDINRLSDYDVDHIVPQSFLKDDSIDNKVLTRSDKARGKSDNVPSEEVVKKMKNYWRQLLNAKLITQRKFDNLTKAERGGLSELDKAGFIKRQLVETRQITKHVAQILDSRMNTKYDENDKLIREVKVITLKSKLVSDFRKDFQFYKVREINNYHHAHDAYLNAVVGTALIKKYPKLESEFVYGDYKVYDVRKMIAKSEQEIGKATAKYFFYSNIMNFFKTEITLANGEIRKRPLIETNGETGEIVWDKGRDFATVRKVLSMPQVNIVKKTEVQTGGFSKESILPKRNSDKLIARKKDWDPKKYGGFDSPTVAYSVLVVAKVEKGKSKKLKSVKELLGITIMERSSFEKNPIDFLEAKGYKEVKKDLIIKLPKYSLFELENGRKRMLASAGELQKGNELALPSKYVNFLYLASHYEKLKGSPEDNEQKQLFVEQHKHYLDEIIEQISEFSKRVILADANLDKVLSAYNKHRDKPIREQAENIIHLFTLTNLGAPAAFKYFDTTIDRKRYTSTKEVLDATLIHQSITGLYETRIDLSQLGGDGGGGGGGGGGGTAPLEEEYRLFLEAPIQNVTLLEQWKREIPKVWAEINPPGLASTQAPIHVQLLSTALPVRVRQYPITLEAKRSLRETIRKFRAAGILRPVHSPWNTPLLPVRKSGTSEYRMVQDLREVNKRVETIHPTVPNPYTLLSLLPPDRIWYSVLDLKDAFFCIPLAPESQLIFAFEWADAEEGESGQLTWTRLPQGFKNSPTLFNEALNRDLQGFRLDHPSVSLLQYVDDLLIAADTQAACLSATRDLLMTLAELGYRVSGKKAQLCQEEVTYLGFKIHKGSRSLSNSRTQAILQIPVPKTKRQVREFLGTIGYCRLWIPGFAELAQPLYAATRPGNDPLVWGEKEEEAFQSLKLALTQPPALALPSLDKPFQLFVEETSGAAKGVLTQALGPWKRPVAYLSKRLDPVAAGWPRCLRAIAAAALLTREASKLTFGQDIEITSSHNLESLLRSPPDKWLTNARITQYQVLLLDPPRVRFKQTAALNPATLLPETDDTLPIHHCLDTLDSLTSTRPDLTDQPLAQAEATLFTDGSSYIRDGKRYAGAAVVTLDSVIWAEPLPIGTSAQKAELIALTKALEWSKDKSVNIYTDSRYAFATLHVHGMIYRERGWLTAGGKAIKNAPEILALLTAVWLPKRVAVMHCKGHQKDDAPTSTGNRRADEVAREVAIRPLSTQATISAGKRTADGSEFEKRTADGSEFESPKKKAKVE

SEQ ID NO: 6265 - protein, 2094 aa, synthetic construct
MPAAKRVKLDGGDKKYSIGLDIGTNSVGWAVITDEYKVPSKKFKVLGNTDRHSIKKNLIGALLFDSGETAEATRLKRTARRRYTRRKNRICYLQEIFSNEMAKVDDSFFHRLEESFLVEEDKKHERHPIFGNIVDEVAYHEKYPTIYHLRKKLVDSTDKADLRLIYLALAHMIKFRGHFLIEGDLNPDNSDVDKLFIQLVQTYNQLFEENPINASGVDAKAILSARLSKSRRLENLIAQLPGEKKNGLFGNLIALSLGLTPNFKSNFDLAEDAKLQLSKDTYDDDLDNLLAQIGDQYADLFLAAKNLSDAILLSDILRVNTEITKAPLSASMIKRYDEHHQDLTLLKALVRQQLPEKYKEIFFDQSKNGYAGYIDGGASQEEFYKFIKPILEKMDGTEELLVKLNREDLLRKQRTFDNGSIPHQIHLGELHAILRRQEDFYPFLKDNREKIEKILTFRIPYYVGPLARGNSRFAWMTRKSEETITPWNFEEVVDKGASAQSFIERMTNFDKNLPNEKVLPKHSLLYEYFTVYNELTKVKYVTEGMRKPAFLSGEQKKAIVDLLFKTNRKVTVKQLKEDYFKKIECFDSVEISGVEDRFNASLGTYHDLLKIIKDKDFLDNEENEDILEDIVLTLTLFEDREMIEERLKTYAHLFDDKVMKQLKRRRYTGWGRLSRKLINGIRDKQSGKTILDFLKSDGFANRNFMQLIHDDSLTFKEDIQKAQVSGQGDSLHEHIANLAGSPAIKKGILQTVKVVDELVKVMGRHKPENIVIEMARENQTTQKGQKNSRERMKRIEEGIKELGSQILKEHPVENTQLQNEKLYLYYLQNGRDMYVDQELDINRLSDYDVDHIVPQSFLKDDSIDNKVLTRSDKARGKSDNVPSEEVVKKMKNYWRQLLNAKLITQRKFDNLTKAERGGLSELDKAGFIKRQLVETRQITKHVAQILDSRMNTKYDENDKLIREVKVITLKSKLVSDFRKDFQFYKVREINNYHHAHDAYLNAVVGTALIKKYPKLESEFVYGDYKVYDVRKMIAKSEQEIGKATAKYFFYSNIMNFFKTEITLANGEIRKRPLIETNGETGEIVWDKGRDFATVRKVLSMPQVNIVKKTEVQTGGFSKESILPKRNSDKLIARKKDWDPKKYGGFDSPTVAYSVLVVAKVEKGKSKKLKSVKELLGITIMERSSFEKNPIDFLEAKGYKEVKKDLIIKLPKYSLFELENGRKRMLASAGELQKGNELALPSKYVNFLYLASHYEKLKGSPEDNEQKQLFVEQHKHYLDEIIEQISEFSKRVILADANLDKVLSAYNKHRDKPIREQAENIIHLFTLTNLGAPAAFKYFDTTIDRKRYTSTKEVLDATLIHQSITGLYETRIDLSQLGGDGGGGGGGGGGGTAPLEEEYRLFLEAPIQNVTLLEQWKREIPKVWAEINPPGLASTQAPIHVQLLSTALPVRVRQYPITLEAKRSLRETIRKFRAAGILRPVHSPWNTPLLPVRKSGTSEYRMVQDLREVNKRVETIHPTVPNPYTLLSLLPPDRIWYSVLDLKDAFFCIPLAPESQLIFAFEWADAEEGESGQLTWTRLPQGFKNSPTLFNEALNRDLQGFRLDHPSVSLLQYVDDLLIAADTQAACLSATRDLLMTLAELGYRVSGKKAQLCQEEVTYLGFKIHKGSRSLSNSRTQAILQIPVPKTKRQVREFLGKIGYCRLFIPGFAELAQPLYAATRPGNDPLVWGEKEEEAFQSLKLALTQPPALALPSLDKPFQLFVEETSGAAKGVLTQALGPWKRPVAYLSKRLDPVAAGWPRCLRAIAAAALLTREASKLTFGQDIEITSSHNLESLLRSPPDKWLTNARITQYQVLLLDPPRVRFKQTAALNPATLLPETDDTLPIHHCLDTLDSLTSTRPDLTDQPLAQAEATLFTDGSSYIRDGKRYAGAAVVTLDSVIWAEPLPIGTSAQKAELIALTKALEWSKDKSVNIYTDSRYAFATLHVHGMIYRERGWLTAGGKAIKNAPEILALLTAVWLPKRVAVMHCKGHQKDDAPTSTGNRRADEVAREVAIRPLSTQATISAGKRTADGSEFEKRTADGSEFESPKKKAKVE

SEQ ID NO: 6266 - protein, 2098 aa, synthetic construct
MPAAKRVKLDGGDKKYSIGLDIGTNSVGWAVITDEYKVPSKKFKVLGNTDRHSIKKNLIGALLFDSGETAEATRLKRTARRRYTRRKNRICYLQEIFSNEMAKVDDSFFHRLEESFLVEEDKKHERHPIFGNIVDEVAYHEKYPTIYHLRKKLVDSTDKADLRLIYLALAHMIKFRGHFLIEGDLNPDNSDVDKLFIQLVQTYNQLFEENPINASGVDAKAILSARLSKSRRLENLIAQLPGEKKNGLFGNLIALSLGLTPNFKSNFDLAEDAKLQLSKDTYDDDLDNLLAQIGDQYADLFLAAKNLSDAILLSDILRVNTEITKAPLSASMIKRYDEHHQDLTLLKALVRQQLPEKYKEIFFDQSKNGYAGYIDGGASQEEFYKFIKPILEKMDGTEELLVKLNREDLLRKQRTFDNGSIPHQIHLGELHAILRRQEDFYPFLKDNREKIEKILTFRIPYYVGPLARGNSRFAWMTRKSEETITPWNFEEVVDKGASAQSFIERMTNFDKNLPNEKVLPKHSLLYEYFTVYNELTKVKYVTEGMRKPAFLSGEQKKAIVDLLFKTNRKVTVKQLKEDYFKKIECFDSVEISGVEDRFNASLGTYHDLLKIIKDKDFLDNEENEDILEDIVLTLTLFEDREMIEERLKTYAHLFDDKVMKQLKRRRYTGWGRLSRKLINGIRDKQSGKTILDFLKSDGFANRNFMQLIHDDSLTFKEDIQKAQVSGQGDSLHEHIANLAGSPAIKKGILQTVKVVDELVKVMGRHKPENIVIEMARENQTTQKGQKNSRERMKRIEEGIKELGSQILKEHPVENTQLQNEKLYLYYLQNGRDMYVDQELDINRLSDYDVDHIVPQSFLKDDSIDNKVLTRSDKARGKSDNVPSEEVVKKMKNYWRQLLNAKLITQRKFDNLTKAERGGLSELDKAGFIKRQLVETRQITKHVAQILDSRMNTKYDENDKLIREVKVITLKSKLVSDFRKDFQFYKVREINNYHHAHDAYLNAVVGTALIKKYPKLESEFVYGDYKVYDVRKMIAKSEQEIGKATAKYFFYSNIMNFFKTEITLANGEIRKRPLIETNGETGEIVWDKGRDFATVRKVLSMPQVNIVKKTEVQTGGFSKESILPKRNSDKLIARKKDWDPKKYGGFDSPTVAYSVLVVAKVEKGKSKKLKSVKELLGITIMERSSFEKNPIDFLEAKGYKEVKKDLIIKLPKYSLFELENGRKRMLASAGELQKGNELALPSKYVNFLYLASHYEKLKGSPEDNEQKQLFVEQHKHYLDEIIEQISEFSKRVILADANLDKVLSAYNKHRDKPIREQAENIIHLFTLTNLGAPAAFKYFDTTIDRKRYTSTKEVLDATLIHQSITGLYETRIDLSQLGGDGGGGGGGGGGGTVSLQDEHRLFDIPVTTSLPDVWLQDFPQAWAETGGLGRAKCQAPIIIDLKPTAVPVSIKQYPMSLEAHMGIRQHIIKFLELGVLRPCRSPWNTPLLPVKKPGTQDYRPVQDLREINKRTVDIHPTVPNPYNLLSTLKPDYSWYTVLDLKDAFFCLPLAPQSQELFAFEWKDPERGISGQLTWTRLPQGFKNSPTLFNEALHRDLTDFRTQHPEVTLLQYVDDLLLAAPTKKACTQGTRHLLQELGEKGYRASAKKAQICQTKVTYLGYILSEGKRWLTPGRIETVARIPPPRNPREVREFLGKAGFCRLFIPGFAELAAPLYALTKPSTPFTWQTEHQLAFEALKKALLSAPALGLPDTSKPFTLFLDERQGIAKGVLTQKLGPWKRPVAYLSKKLDPVAAGWPPCLRIMAATAMLVKDSAKLTLGQPLTVITPHTLEAIVRQPPDRWITNARLTHYQALLLDTDRVQFGPPVTLNPATLLPVPENQPSPHDCRQVLAETHGTREDLKDQELPDADHTWYTDGSSYLDSGTRRAGAAVVDGHNTIWAQSLPPGTSAQKAELIALTKALELSKGKKANIYTDSRYAFATAHTHGSIYERRGWLTSEGKEIKNKAEIIALLKALFLPQEVAIIHCPGHQKGQDPVAVGNRQADRVARQAAMAEVLTLATEPDNTSHITAGKRTADGSEFEKRTADGSEFESPKKKAKVE

SEQ ID NO: 6267 - protein, 2091 aa, synthetic construct
MPAAKRVKLDGGDKKYSIGLDIGTNSVGWAVITDEYKVPSKKFKVLGNTDRHSIKKNLIGALLFDSGETAEATRLKRTARRRYTRRKNRICYLQEIFSNEMAKVDDSFFHRLEESFLVEEDKKHERHPIFGNIVDEVAYHEKYPTIYHLRKKLVDSTDKADLRLIYLALAHMIKFRGHFLIEGDLNPDNSDVDKLFIQLVQTYNQLFEENPINASGVDAKAILSARLSKSRRLENLIAQLPGEKKNGLFGNLIALSLGLTPNFKSNFDLAEDAKLQLSKDTYDDDLDNLLAQIGDQYADLFLAAKNLSDAILLSDILRVNTEITKAPLSASMIKRYDEHHQDLTLLKALVRQQLPEKYKEIFFDQSKNGYAGYIDGGASQEEFYKFIKPILEKMDGTEELLVKLNREDLLRKQRTFDNGSIPHQIHLGELHAILRRQEDFYPFLKDNREKIEKILTFRIPYYVGPLARGNSRFAWMTRKSEETITPWNFEEVVDKGASAQSFIERMTNFDKNLPNEKVLPKHSLLYEYFTVYNELTKVKYVTEGMRKPAFLSGEQKKAIVDLLFKTNRKVTVKQLKEDYFKKIECFDSVEISGVEDRFNASLGTYHDLLKIIKDKDFLDNEENEDILEDIVLTLTLFEDREMIEERLKTYAHLFDDKVMKQLKRRRYTGWGRLSRKLINGIRDKQSGKTILDFLKSDGFANRNFMQLIHDDSLTFKEDIQKAQVSGQGDSLHEHIANLAGSPAIKKGILQTVKVVDELVKVMGRHKPENIVIEMARENQTTQKGQKNSRERMKRIEEGIKELGSQILKEHPVENTQLQNEKLYLYYLQNGRDMYVDQELDINRLSDYDVDHIVPQSFLKDDSIDNKVLTRSDKARGKSDNVPSEEVVKKMKNYWRQLLNAKLITQRKFDNLTKAERGGLSELDKAGFIKRQLVETRQITKHVAQILDSRMNTKYDENDKLIREVKVITLKSKLVSDFRKDFQFYKVREINNYHHAHDAYLNAVVGTALIKKYPKLESEFVYGDYKVYDVRKMIAKSEQEIGKATAKYFFYSNIMNFFKTEITLANGEIRKRPLIETNGETGEIVWDKGRDFATVRKVLSMPQVNIVKKTEVQTGGFSKESILPKRNSDKLIARKKDWDPKKYGGFDSPTVAYSVLVVAKVEKGKSKKLKSVKELLGITIMERSSFEKNPIDFLEAKGYKEVKKDLIIKLPKYSLFELENGRKRMLASAGELQKGNELALPSKYVNFLYLASHYEKLKGSPEDNEQKQLFVEQHKHYLDEIIEQISEFSKRVILADANLDKVLSAYNKHRDKPIREQAENIIHLFTLTNLGAPAAFKYFDTTIDRKRYTSTKEVLDATLIHQSITGLYETRIDLSQLGGDGGGGGGGGGGGTLQLEEEYRLFEPESTQKQEMDIWLKNFPQAWAETGGMGTAHCQAPVLIQLKATATPISIRQYPMPHEAYQGIKPHIRRMLDQGILKPCQSPWNTPLLPVKKPGTEDYRPVQDLREVNKRVEDIHPTVPNPYNLLSTLPPSHPWYTVLDLKDAFFCLRLHSESQLLFAFEWRDPEIGLSGQLTWTRLPQGFKNSPTLFNEALHSDLADFRVRYPALVLLQYVDDLLLAAATRTECLEGTKALLETLGNKGYRASAKKAQICLQEVTYLGYSLKDGQRWLTKARKEAILSIPVPKNSRQVREFLGKAGYCRLFIPGFAELAAPLYPLTRPGTLFQWGTEQQLAFEDIKKALLSSPALGLPDITKPFELFIDENSGFAKGVLVQKLGPWKRPVAYLSKKLDTVASGWPPCLRMVAAIAILVKDAGKLTLGQPLTILTSHPVEALVRQPPNKWLSNARMTHYQAMLLDAERVHFGPTVSLNPATLLPLPSGGNHHDCLQILAETHGTRPDLTDQPLPDADLTWYTDGSSFIRNGEREAGAAVTTESEVIWAAPLPPGTSAQRAELIALTQALKMAEGKKLTVYTDSRYAFATTHVHGEIYRRRGWLTSEGKEIKNKNEILALLEALFLPKRLSIIHCPGHQKGDSPQAKGNRLADDTAKKAATETHSSLTVLPAGKRTADGSEFEKRTADGSEFESPKKKAKVE

SEQ ID NO: 6268 - protein, 2123 aa, synthetic construct
MPAAKRVKLDGGDKKYSIGLDIGTNSVGWAVITDEYKVPSKKFKVLGNTDRHSIKKNLIGALLFDSGETAEATRLKRTARRRYTRRKNRICYLQEIFSNEMAKVDDSFFHRLEESFLVEEDKKHERHPIFGNIVDEVAYHEKYPTIYHLRKKLVDSTDKADLRLIYLALAHMIKFRGHFLIEGDLNPDNSDVDKLFIQLVQTYNQLFEENPINASGVDAKAILSARLSKSRRLENLIAQLPGEKKNGLFGNLIALSLGLTPNFKSNFDLAEDAKLQLSKDTYDDDLDNLLAQIGDQYADLFLAAKNLSDAILLSDILRVNTEITKAPLSASMIKRYDEHHQDLTLLKALVRQQLPEKYKEIFFDQSKNGYAGYIDGGASQEEFYKFIKPILEKMDGTEELLVKLNREDLLRKQRTFDNGSIPHQIHLGELHAILRRQEDFYPFLKDNREKIEKILTFRIPYYVGPLARGNSRFAWMTRKSEETITPWNFEEVVDKGASAQSFIERMTNFDKNLPNEKVLPKHSLLYEYFTVYNELTKVKYVTEGMRKPAFLSGEQKKAIVDLLFKTNRKVTVKQLKEDYFKKIECFDSVEISGVEDRFNASLGTYHDLLKIIKDKDFLDNEENEDILEDIVLTLTLFEDREMIEERLKTYAHLFDDKVMKQLKRRRYTGWGRLSRKLINGIRDKQSGKTILDFLKSDGFANRNFMQLIHDDSLTFKEDIQKAQVSGQGDSLHEHIANLAGSPAIKKGILQTVKVVDELVKVMGRHKPENIVIEMARENQTTQKGQKNSRERMKRIEEGIKELGSQILKEHPVENTQLQNEKLYLYYLQNGRDMYVDQELDINRLSDYDVDHIVPQSFLKDDSIDNKVLTRSDKARGKSDNVPSEEVVKKMKNYWRQLLNAKLITQRKFDNLTKAERGGLSELDKAGFIKRQLVETRQITKHVAQILDSRMNTKYDENDKLIREVKVITLKSKLVSDFRKDFQFYKVREINNYHHAHDAYLNAVVGTALIKKYPKLESEFVYGDYKVYDVRKMIAKSEQEIGKATAKYFFYSNIMNFFKTEITLANGEIRKRPLIETNGETGEIVWDKGRDFATVRKVLSMPQVNIVKKTEVQTGGFSKESILPKRNSDKLIARKKDWDPKKYGGFDSPTVAYSVLVVAKVEKGKSKKLKSVKELLGITIMERSSFEKNPIDFLEAKGYKEVKKDLIIKLPKYSLFELENGRKRMLASAGELQKGNELALPSKYVNFLYLASHYEKLKGSPEDNEQKQLFVEQHKHYLDEIIEQISEFSKRVILADANLDKVLSAYNKHRDKPIREQAENIIHLFTLTNLGAPAAFKYFDTTIDRKRYTSTKEVLDATLIHQSITGLYETRIDLSQLGGDGGGGGGGGGGGLLGRDLLTKLKAQIQFSTEGPQVTWEDRPAMCLVLNLEEEYRLHEKPVPPSIDPSWLQLFPMVWAEKAGMGLANQVPPVVVELKSDASPVAVRQYPMSKEAREGIRPHIQRFLDLGILVPCQSPWNTPLLPVKKPGTNDYRPVQDLREVNKRVQDIHPTVPNPYNLLSSLPPSHTWYSVLDLKDAFFCLKLHPNSQPLFAFEWRDPEKGNTGQLTWTRLPQGFKNSPTLFNEALHRDLASFRALNPQVVMLQYVDDLLVAAPTYRDCKEGTRRLLQELSKLGYRVSAKKAQLCREEVTYLGYLLKGGKRWLTPARKATVMKIPTPTTPRQVREFLGTAGFCRLWIPGFASLAAPLYPLTRPKVPFTWTEAHQEAFGRIKEALLSAPALALPDLTKPFALYVDEKEGVARGVLTQTLGPWRRPVAYLSKKLDPVASGWPTCLKAIAAVALLLKDADKLTLGQNVLVIAPHNLESIVRQPPDRWMTNARMTHYQSLLLNERVSFAPPAILNPATLLPVESDDTPIHICSEILAEETGTRPDLRDQPLPGVPAWYTDGSSFIMDGRRQAGAAIVDNKRTVWASNLPEGTSAQKAELIALTQALRLAEGKSINIYTDSRYAFATAHVHGAIYKQRGWLTSAGKDIKNKEEILALLEAIHLPKRVAIIHCPGHQRGTDPVATGNRKADEAAKQAAQSTRILTETTKNAGKRTADGSEFEKRTADGSEFESPKKKAKVE

SEQ ID NO: 6269 - protein, 2123 aa, synthetic construct
MPAAKRVKLDGGDKKYSIGLDIGTNSVGWAVITDEYKVPSKKFKVLGNTDRHSIKKNLIGALLFDSGETAEATRLKRTARRRYTRRKNRICYLQEIFSNEMAKVDDSFFHRLEESFLVEEDKKHERHPIFGNIVDEVAYHEKYPTIYHLRKKLVDSTDKADLRLIYLALAHMIKFRGHFLIEGDLNPDNSDVDKLFIQLVQTYNQLFEENPINASGVDAKAILSARLSKSRRLENLIAQLPGEKKNGLFGNLIALSLGLTPNFKSNFDLAEDAKLQLSKDTYDDDLDNLLAQIGDQYADLFLAAKNLSDAILLSDILRVNTEITKAPLSASMIKRYDEHHQDLTLLKALVRQQLPEKYKEIFFDQSKNGYAGYIDGGASQEEFYKFIKPILEKMDGTEELLVKLNREDLLRKQRTFDNGSIPHQIHLGELHAILRRQEDFYPFLKDNREKIEKILTFRIPYYVGPLARGNSRFAWMTRKSEETITPWNFEEVVDKGASAQSFIERMTNFDKNLPNEKVLPKHSLLYEYFTVYNELTKVKYVTEGMRKPAFLSGEQKKAIVDLLFKTNRKVTVKQLKEDYFKKIECFDSVEISGVEDRFNASLGTYHDLLKIIKDKDFLDNEENEDILEDIVLTLTLFEDREMIEERLKTYAHLFDDKVMKQLKRRRYTGWGRLSRKLINGIRDKQSGKTILDFLKSDGFANRNFMQLIHDDSLTFKEDIQKAQVSGQGDSLHEHIANLAGSPAIKKGILQTVKVVDELVKVMGRHKPENIVIEMARENQTTQKGQKNSRERMKRIEEGIKELGSQILKEHPVENTQLQNEKLYLYYLQNGRDMYVDQELDINRLSDYDVDHIVPQSFLKDDSIDNKVLTRSDKARGKSDNVPSEEVVKKMKNYWRQLLNAKLITQRKFDNLTKAERGGLSELDKAGFIKRQLVETRQITKHVAQILDSRMNTKYDENDKLIREVKVITLKSKLVSDFRKDFQFYKVREINNYHHAHDAYLNAVVGTALIKKYPKLESEFVYGDYKVYDVRKMIAKSEQEIGKATAKYFFYSNIMNFFKTEITLANGEIRKRPLIETNGETGEIVWDKGRDFATVRKVLSMPQVNIVKKTEVQTGGFSKESILPKRNSDKLIARKKDWDPKKYGGFDSPTVAYSVLVVAKVEKGKSKKLKSVKELLGITIMERSSFEKNPIDFLEAKGYKEVKKDLIIKLPKYSLFELENGRKRMLASAGELQKGNELALPSKYVNFLYLASHYEKLKGSPEDNEQKQLFVEQHKHYLDEIIEQISEFSKRVILADANLDKVLSAYNKHRDKPIREQAENIIHLFTLTNLGAPAAFKYFDTTIDRKRYTSTKEVLDATLIHQSITGLYETRIDLSQLGGDGGGGGGGGGGGLLGRDLLTKLKAQIQFSTEGPQVTWEDRPAMCLVLNLEEEYRLHEKPVPPSIDPSWLQLFPMVWAEKAGMGLANQVPPVVVELKSDASPVAVRQYPMSKEAREGIRPHIQRFLDLGILVPCQSPWNTPLLPVKKPGTNDYRPVQDLREVNKRVQDIHPTVPNPYNLLSSLPPSHTWYSVLDLKDAFFCLKLHPNSQPLFAFEWRDPEKGNTGQLTWTRLPQGFKNSPTLFNEALHRDLASFRALNPQVVMLQYVDDLLVAAPTYRDCKEGTRRLLQELSKLGYRVSAKKAQLCREEVTYLGYLLKGGKRWLTPARKATVMKIPTPTTPRQVREFLGKAGFCRLFIPGFASLAAPLYPLTRPKVPFTWTEAHQEAFGRIKEALLSAPALALPDLTKPFALYVDEKEGVARGVLTQTLGPWRRPVAYLSKKLDPVASGWPTCLKAIAAVALLLKDADKLTLGQNVLVIAPHNLESIVRQPPDRWMTNARMTHYQSLLLNERVSFAPPAILNPATLLPVESDDTPIHICSEILAEETGTRPDLRDQPLPGVPAWYTDGSSFIMDGRRQAGAAIVDNKRTVWASNLPEGTSAQKAELIALTQALRLAEGKSINIYTDSRYAFATAHVHGAIYKQRGWLTSAGKDIKNKEEILALLEAIHLPKRVAIIHCPGHQRGTDPVATGNRKADEAAKQAAQSTRILTETTKNAGKRTADGSEFEKRTADGSEFESPKKKAKVE

SEQ ID NO: 6270 - protein, 2092 aa, synthetic construct
MPAAKRVKLDGGDKKYSIGLDIGTNSVGWAVITDEYKVPSKKFKVLGNTDRHSIKKNLIGALLFDSGETAEATRLKRTARRRYTRRKNRICYLQEIFSNEMAKVDDSFFHRLEESFLVEEDKKHERHPIFGNIVDEVAYHEKYPTIYHLRKKLVDSTDKADLRLIYLALAHMIKFRGHFLIEGDLNPDNSDVDKLFIQLVQTYNQLFEENPINASGVDAKAILSARLSKSRRLENLIAQLPGEKKNGLFGNLIALSLGLTPNFKSNFDLAEDAKLQLSKDTYDDDLDNLLAQIGDQYADLFLAAKNLSDAILLSDILRVNTEITKAPLSASMIKRYDEHHQDLTLLKALVRQQLPEKYKEIFFDQSKNGYAGYIDGGASQEEFYKFIKPILEKMDGTEELLVKLNREDLLRKQRTFDNGSIPHQIHLGELHAILRRQEDFYPFLKDNREKIEKILTFRIPYYVGPLARGNSRFAWMTRKSEETITPWNFEEVVDKGASAQSFIERMTNFDKNLPNEKVLPKHSLLYEYFTVYNELTKVKYVTEGMRKPAFLSGEQKKAIVDLLFKTNRKVTVKQLKEDYFKKIECFDSVEISGVEDRFNASLGTYHDLLKIIKDKDFLDNEENEDILEDIVLTLTLFEDREMIEERLKTYAHLFDDKVMKQLKRRRYTGWGRLSRKLINGIRDKQSGKTILDFLKSDGFANRNFMQLIHDDSLTFKEDIQKAQVSGQGDSLHEHIANLAGSPAIKKGILQTVKVVDELVKVMGRHKPENIVIEMARENQTTQKGQKNSRERMKRIEEGIKELGSQILKEHPVENTQLQNEKLYLYYLQNGRDMYVDQELDINRLSDYDVDHIVPQSFLKDDSIDNKVLTRSDKARGKSDNVPSEEVVKKMKNYWRQLLNAKLITQRKFDNLTKAERGGLSELDKAGFIKRQLVETRQITKHVAQILDSRMNTKYDENDKLIREVKVITLKSKLVSDFRKDFQFYKVREINNYHHAHDAYLNAVVGTALIKKYPKLESEFVYGDYKVYDVRKMIAKSEQEIGKATAKYFFYSNIMNFFKTEITLANGEIRKRPLIETNGETGEIVWDKGRDFATVRKVLSMPQVNIVKKTEVQTGGFSKESILPKRNSDKLIARKKDWDPKKYGGFDSPTVAYSVLVVAKVEKGKSKKLKSVKELLGITIMERSSFEKNPIDFLEAKGYKEVKKDLIIKLPKYSLFELENGRKRMLASAGELQKGNELALPSKYVNFLYLASHYEKLKGSPEDNEQKQLFVEQHKHYLDEIIEQISEFSKRVILADANLDKVLSAYNKHRDKPIREQAENIIHLFTLTNLGAPAAFKYFDTTIDRKRYTSTKEVLDATLIHQSITGLYETRIDLSQLGGDGGGGGGGGGGGTLNLEDEYRLYETSAEPEVSPGSTWLSDFPQAWAETGGMGLAVRQAPLIIPLKATSTPVSIKQYPMSQEAKLGIKPHIQRLLDQGILVPCQSPWNTPLLPVKKPGTNDYRPVQDLREVNKRVEDIHPTVPNPYNLLSGLPPSHRWYTVLDLKDAFFCLRLHPTSQPLFAFEWRDPGMGISGQLTWTRLPQGFKNSPTLFNEALHRDLADFRIQHPDLILLQYVDDILLAATSELDCQQGTRALLLTLGNLGYRASAKKAQLCQKQVKYLGYLLKEGQRWLTEARKETVMGQPTPKTPRQLREFLGTAGFCRLWIPGFAEMAAPLYPLTKPGTLFNWGPDQQKAYQEIKQALLTAPALGLPDLTKPFELFVDEKQGYAKGVLTQKLGPWRRPVAYLSKKLDPVAAGWPPCLRMVAAIAVLRKDAGKLTMGQPLVILAPHAVEALVKQPPDRWLSNARMTHYQAMLLDTDRVQFGPVVALNPATLLPLPEEGAPHDCLEILAETHGTRPDLTDQPIPDADHTWYTDGSSFLQEGQRKAGAAVTTETEVIWARALPAGTSAQRAELIALTQALKMAEGKRLNVYTDSRYAFATAHIHGEIYRRRGWLTSEGREIKNKSEILALLKALFLPKRLSIIHCLGHQKGDSAEARGNRLADQAAREAAIKTPPDTSTLLAGKRTADGSEFEKRTADGSEFESPKKKAKVE

SEQ ID NO: 6271 - protein, 2092 aa, synthetic construct
MPAAKRVKLDGGDKKYSIGLDIGTNSVGWAVITDEYKVPSKKFKVLGNTDRHSIKKNLIGALLFDSGETAEATRLKRTARRRYTRRKNRICYLQEIFSNEMAKVDDSFFHRLEESFLVEEDKKHERHPIFGNIVDEVAYHEKYPTIYHLRKKLVDSTDKADLRLIYLALAHMIKFRGHFLIEGDLNPDNSDVDKLFIQLVQTYNQLFEENPINASGVDAKAILSARLSKSRRLENLIAQLPGEKKNGLFGNLIALSLGLTPNFKSNFDLAEDAKLQLSKDTYDDDLDNLLAQIGDQYADLFLAAKNLSDAILLSDILRVNTEITKAPLSASMIKRYDEHHQDLTLLKALVRQQLPEKYKEIFFDQSKNGYAGYIDGGASQEEFYKFIKPILEKMDGTEELLVKLNREDLLRKQRTFDNGSIPHQIHLGELHAILRRQEDFYPFLKDNREKIEKILTFRIPYYVGPLARGNSRFAWMTRKSEETITPWNFEEVVDKGASAQSFIERMTNFDKNLPNEKVLPKHSLLYEYFTVYNELTKVKYVTEGMRKPAFLSGEQKKAIVDLLFKTNRKVTVKQLKEDYFKKIECFDSVEISGVEDRFNASLGTYHDLLKIIKDKDFLDNEENEDILEDIVLTLTLFEDREMIEERLKTYAHLFDDKVMKQLKRRRYTGWGRLSRKLINGIRDKQSGKTILDFLKSDGFANRNFMQLIHDDSLTFKEDIQKAQVSGQGDSLHEHIANLAGSPAIKKGILQTVKVVDELVKVMGRHKPENIVIEMARENQTTQKGQKNSRERMKRIEEGIKELGSQILKEHPVENTQLQNEKLYLYYLQNGRDMYVDQELDINRLSDYDVDHIVPQSFLKDDSIDNKVLTRSDKARGKSDNVPSEEVVKKMKNYWRQLLNAKLITQRKFDNLTKAERGGLSELDKAGFIKRQLVETRQITKHVAQILDSRMNTKYDENDKLIREVKVITLKSKLVSDFRKDFQFYKVREINNYHHAHDAYLNAVVGTALIKKYPKLESEFVYGDYKVYDVRKMIAKSEQEIGKATAKYFFYSNIMNFFKTEITLANGEIRKRPLIETNGETGEIVWDKGRDFATVRKVLSMPQVNIVKKTEVQTGGFSKESILPKRNSDKLIARKKDWDPKKYGGFDSPTVAYSVLVVAKVEKGKSKKLKSVKELLGITIMERSSFEKNPIDFLEAKGYKEVKKDLIIKLPKYSLFELENGRKRMLASAGELQKGNELALPSKYVNFLYLASHYEKLKGSPEDNEQKQLFVEQHKHYLDEIIEQISEFSKRVILADANLDKVLSAYNKHRDKPIREQAENIIHLFTLTNLGAPAAFKYFDTTIDRKRYTSTKEVLDATLIHQSITGLYETRIDLSQLGGDGGGGGGGGGGGTLNLEDEYRLYETSAEPEVSPGSTWLSDFPQAWAETGGMGLAVRQAPLIIPLKATSTPVSIKQYPMSQEAKLGIKPHIQRLLDQGILVPCQSPWNTPLLPVKKPGTNDYRPVQDLREVNKRVEDIHPTVPNPYNLLSGLPPSHRWYTVLDLKDAFFCLRLHPTSQPLFAFEWRDPGMGISGQLTWTRLPQGFKNSPTLFNEALHRDLADFRIQHPDLILLQYVDDILLAATSELDCQQGTRALLLTLGNLGYRASAKKAQLCQKQVKYLGYLLKEGQRWLTEARKETVMGQPTPKTPRQLREFLGKAGFCRLFIPGFAEMAAPLYPLTKPGTLFNWGPDQQKAYQEIKQALLTAPALGLPDLTKPFELFVDEKQGYAKGVLTQKLGPWRRPVAYLSKKLDPVAAGWPPCLRMVAAIAVLRKDAGKLTMGQPLVILAPHAVEALVKQPPDRWLSNARMTHYQAMLLDTDRVQFGPVVALNPATLLPLPEEGAPHDCLEILAETHGTRPDLTDQPIPDADHTWYTDGSSFLQEGQRKAGAAVTTETEVIWARALPAGTSAQRAELIALTQALKMAEGKRLNVYTDSRYAFATAHIHGEIYRRRGWLTSEGREIKNKSEILALLKALFLPKRLSIIHCLGHQKGDSAEARGNRLADQAAREAAIKTPPDTSTLLAGKRTADGSEFEKRTADGSEFESPKKKAKVE

SEQ ID NO: 6272 - protein, 2090 aa, synthetic construct
MPAAKRVKLDGGDKKYSIGLDIGTNSVGWAVITDEYKVPSKKFKVLGNTDRHSIKKNLIGALLFDSGETAEATRLKRTARRRYTRRKNRICYLQEIFSNEMAKVDDSFFHRLEESFLVEEDKKHERHPIFGNIVDEVAYHEKYPTIYHLRKKLVDSTDKADLRLIYLALAHMIKFRGHFLIEGDLNPDNSDVDKLFIQLVQTYNQLFEENPINASGVDAKAILSARLSKSRRLENLIAQLPGEKKNGLFGNLIALSLGLTPNFKSNFDLAEDAKLQLSKDTYDDDLDNLLAQIGDQYADLFLAAKNLSDAILLSDILRVNTEITKAPLSASMIKRYDEHHQDLTLLKALVRQQLPEKYKEIFFDQSKNGYAGYIDGGASQEEFYKFIKPILEKMDGTEELLVKLNREDLLRKQRTFDNGSIPHQIHLGELHAILRRQEDFYPFLKDNREKIEKILTFRIPYYVGPLARGNSRFAWMTRKSEETITPWNFEEVVDKGASAQSFIERMTNFDKNLPNEKVLPKHSLLYEYFTVYNELTKVKYVTEGMRKPAFLSGEQKKAIVDLLFKTNRKVTVKQLKEDYFKKIECFDSVEISGVEDRFNASLGTYHDLLKIIKDKDFLDNEENEDILEDIVLTLTLFEDREMIEERLKTYAHLFDDKVMKQLKRRRYTGWGRLSRKLINGIRDKQSGKTILDFLKSDGFANRNFMQLIHDDSLTFKEDIQKAQVSGQGDSLHEHIANLAGSPAIKKGILQTVKVVDELVKVMGRHKPENIVIEMARENQTTQKGQKNSRERMKRIEEGIKELGSQILKEHPVENTQLQNEKLYLYYLQNGRDMYVDQELDINRLSDYDVDHIVPQSFLKDDSIDNKVLTRSDKARGKSDNVPSEEVVKKMKNYWRQLLNAKLITQRKFDNLTKAERGGLSELDKAGFIKRQLVETRQITKHVAQILDSRMNTKYDENDKLIREVKVITLKSKLVSDFRKDFQFYKVREINNYHHAHDAYLNAVVGTALIKKYPKLESEFVYGDYKVYDVRKMIAKSEQEIGKATAKYFFYSNIMNFFKTEITLANGEIRKRPLIETNGETGEIVWDKGRDFATVRKVLSMPQVNIVKKTEVQTGGFSKESILPKRNSDKLIARKKDWDPKKYGGFDSPTVAYSVLVVAKVEKGKSKKLKSVKELLGITIMERSSFEKNPIDFLEAKGYKEVKKDLIIKLPKYSLFELENGRKRMLASAGELQKGNELALPSKYVNFLYLASHYEKLKGSPEDNEQKQLFVEQHKHYLDEIIEQISEFSKRVILADANLDKVLSAYNKHRDKPIREQAENIIHLFTLTNLGAPAAFKYFDTTIDRKRYTSTKEVLDATLIHQSITGLYETRIDLSQLGGDGGGGGGGGGGGVLNLEEEYRLHEKPVPSSIDPSWLQLFPTVWAERAGMGLANQVPPVVVELRSGASPVAVRQYPMSKEAREGIRPHIQRFLDLGVLVPCQSPWNTPLLPVKKPGTNDYRPVQDLREINKRVQDIHPTVPNPYNLLSSLPPSHTWYSVLDLKDAFFCLKLHPNSQPLFAFEWRDPEKGNTGQLTWTRLPQGFKNSPTLFNEALHRDLAPFRALNPQVVLLQYVDDLLVAAPTYRDCKEGTQKLLQELSKLGYRVSAKKAQLCQKEVTYLGYLLKEGKRWLTPARKATVMKIPPPTTPRQVREFLGKAGFCRLFIPGFASLAAPLYPLTKPSIPFIWTEEHQKAFDRIKEALLSAPALALPDLTKPFTLYVDERAGVARGVLTQTLGPWRRPVAYLSKKLDPVASGWPTCLKAVAAVALLLKDADKLTLGQNVTVIASHSLESIVRQPPDRWMTNARMTHYQSLLLNERVSFAPPAVLNPATLLPVESEATPVHRCSEILAEETGTRRDLKDQPLPGVPAWYTDGSSFIAEGKRRAGAAIVDGKRTVWASSLPEGTSAQKAELVALTQALRLAEGKDINIYTDSRYAFATAHIHGAIYKQRGWLTSAGKDIKNKEEILALLEAIHLPKRVAIIHCPGHQKGNDPVATGNRRADEAAKQAALSTRVLAETTKPAGKRTADGSEFEKRTADGSEFESPKKKAKVE

SEQ ID NO: 6273 - protein, 2092 aa, synthetic construct
MPAAKRVKLDGGDKKYSIGLDIGTNSVGWAVITDEYKVPSKKFKVLGNTDRHSIKKNLIGALLFDSGETAEATRLKRTARRRYTRRKNRICYLQEIFSNEMAKVDDSFFHRLEESFLVEEDKKHERHPIFGNIVDEVAYHEKYPTIYHLRKKLVDSTDKADLRLIYLALAHMIKFRGHFLIEGDLNPDNSDVDKLFIQLVQTYNQLFEENPINASGVDAKAILSARLSKSRRLENLIAQLPGEKKNGLFGNLIALSLGLTPNFKSNFDLAEDAKLQLSKDTYDDDLDNLLAQIGDQYADLFLAAKNLSDAILLSDILRVNTEITKAPLSASMIKRYDEHHQDLTLLKALVRQQLPEKYKEIFFDQSKNGYAGYIDGGASQEEFYKFIKPILEKMDGTEELLVKLNREDLLRKQRTFDNGSIPHQIHLGELHAILRRQEDFYPFLKDNREKIEKILTFRIPYYVGPLARGNSRFAWMTRKSEETITPWNFEEVVDKGASAQSFIERMTNFDKNLPNEKVLPKHSLLYEYFTVYNELTKVKYVTEGMRKPAFLSGEQKKAIVDLLFKTNRKVTVKQLKEDYFKKIECFDSVEISGVEDRFNASLGTYHDLLKIIKDKDFLDNEENEDILEDIVLTLTLFEDREMIEERLKTYAHLFDDKVMKQLKRRRYTGWGRLSRKLINGIRDKQSGKTILDFLKSDGFANRNFMQLIHDDSLTFKEDIQKAQVSGQGDSLHEHIANLAGSPAIKKGILQTVKVVDELVKVMGRHKPENIVIEMARENQTTQKGQKNSRERMKRIEEGIKELGSQILKEHPVENTQLQNEKLYLYYLQNGRDMYVDQELDINRLSDYDVDHIVPQSFLKDDSIDNKVLTRSDKARGKSDNVPSEEVVKKMKNYWRQLLNAKLITQRKFDNLTKAERGGLSELDKAGFIKRQLVETRQITKHVAQILDSRMNTKYDENDKLIREVKVITLKSKLVSDFRKDFQFYKVREINNYHHAHDAYLNAVVGTALIKKYPKLESEFVYGDYKVYDVRKMIAKSEQEIGKATAKYFFYSNIMNFFKTEITLANGEIRKRPLIETNGETGEIVWDKGRDFATVRKVLSMPQVNIVKKTEVQTGGFSKESILPKRNSDKLIARKKDWDPKKYGGFDSPTVAYSVLVVAKVEKGKSKKLKSVKELLGITIMERSSFEKNPIDFLEAKGYKEVKKDLIIKLPKYSLFELENGRKRMLASAGELQKGNELALPSKYVNFLYLASHYEKLKGSPEDNEQKQLFVEQHKHYLDEIIEQISEFSKRVILADANLDKVLSAYNKHRDKPIREQAENIIHLFTLTNLGAPAAFKYFDTTIDRKRYTSTKEVLDATLIHQSITGLYETRIDLSQLGGDGGGGGGGGGGGTLNIEDEYRLHETSKEPDVPLGSTWLSDFPQAWAETGGMGLAVRQAPLIIPLKATSTPVSIKQYPMSQEARLGIKPHIQRLLDQGILVPCQSPWNTPLLPVKKPGTNDYRPVQDLREVNKRVEDIHPTVPNPYNLLSGLPPSHQWYTVLDLKDAFFCLRLHPTSQPLFAFEWRDPEMGISGQLTWTRLPQGFKNSPTLFNEALHRDLADFRIQHPDLILLQYVDDLLLAATSEQDCQRGTRALLQTLGNLGYRASAKKAQICQKQVKYLGYLLKEGQRWLTEARKETVMGQPTPKTPRQLREFLGKAGFCRLFIPGFAEMAAPLYPLTKPGTLFNWGPDQQKAYQEIKQALLTAPALGLPDLTKPFELFVDEKQGYAKGVLTQKLGPWRRPVAYLSKKLDPVAAGWPPCLRMVAAIAVLTKDAGKLTMGQPLVILAPHAVEALVKQPPDRWLSNARMTHYQAMLLDTDRVQFGPVVALNPATLLPLPEKEAPHDCLEILAETHGTRPDLTDQPIPDADYTWYTDGSSFLQEGQRRAGAAVTTETEVIWARALPAGTSAQRAELIALTQALKMAEGKKLNVYTDSRYAFATAHVHGEIYRRRGWLTSEGREIKNKNEILALLKALFLPKRLSIIHCPGHQKGNSAEARGNRMADQAAREAAMKAVLETSTLLAGKRTADGSEFEKRTADGSEFESPKKKAKVE

SEQ ID NO: 6274 - protein, 2095 aa, synthetic construct
MPAAKRVKLDGGDKKYSIGLDIGTNSVGWAVITDEYKVPSKKFKVLGNTDRHSIKKNLIGALLFDSGETAEATRLKRTARRRYTRRKNRICYLQEIFSNEMAKVDDSFFHRLEESFLVEEDKKHERHPIFGNIVDEVAYHEKYPTIYHLRKKLVDSTDKADLRLIYLALAHMIKFRGHFLIEGDLNPDNSDVDKLFIQLVQTYNQLFEENPINASGVDAKAILSARLSKSRRLENLIAQLPGEKKNGLFGNLIALSLGLTPNFKSNFDLAEDAKLQLSKDTYDDDLDNLLAQIGDQYADLFLAAKNLSDAILLSDILRVNTEITKAPLSASMIKRYDEHHQDLTLLKALVRQQLPEKYKEIFFDQSKNGYAGYIDGGASQEEFYKFIKPILEKMDGTEELLVKLNREDLLRKQRTFDNGSIPHQIHLGELHAILRRQEDFYPFLKDNREKIEKILTFRIPYYVGPLARGNSRFAWMTRKSEETITPWNFEEVVDKGASAQSFIERMTNFDKNLPNEKVLPKHSLLYEYFTVYNELTKVKYVTEGMRKPAFLSGEQKKAIVDLLFKTNRKVTVKQLKEDYFKKIECFDSVEISGVEDRFNASLGTYHDLLKIIKDKDFLDNEENEDILEDIVLTLTLFEDREMIEERLKTYAHLFDDKVMKQLKRRRYTGWGRLSRKLINGIRDKQSGKTILDFLKSDGFANRNFMQLIHDDSLTFKEDIQKAQVSGQGDSLHEHIANLAGSPAIKKGILQTVKVVDELVKVMGRHKPENIVIEMARENQTTQKGQKNSRERMKRIEEGIKELGSQILKEHPVENTQLQNEKLYLYYLQNGRDMYVDQELDINRLSDYDVDHIVPQSFLKDDSIDNKVLTRSDKARGKSDNVPSEEVVKKMKNYWRQLLNAKLITQRKFDNLTKAERGGLSELDKAGFIKRQLVETRQITKHVAQILDSRMNTKYDENDKLIREVKVITLKSKLVSDFRKDFQFYKVREINNYHHAHDAYLNAVVGTALIKKYPKLESEFVYGDYKVYDVRKMIAKSEQEIGKATAKYFFYSNIMNFFKTEITLANGEIRKRPLIETNGETGEIVWDKGRDFATVRKVLSMPQVNIVKKTEVQTGGFSKESILPKRNSDKLIARKKDWDPKKYGGFDSPTVAYSVLVVAKVEKGKSKKLKSVKELLGITIMERSSFEKNPIDFLEAKGYKEVKKDLIIKLPKYSLFELENGRKRMLASAGELQKGNELALPSKYVNFLYLASHYEKLKGSPEDNEQKQLFVEQHKHYLDEIIEQISEFSKRVILADANLDKVLSAYNKHRDKPIREQAENIIHLFTLTNLGAPAAFKYFDTTIDRKRYTSTKEVLDATLIHQSITGLYETRIDLSQLGGDGGGGGGGGGGGGTAPLEEEYRLFLEAPIQNVTLLEQWKREIPKVWAEINPPGLASTQAPIHVQLLSTALPVRVRQYPITLEAKRSLRETIRKFRAAGILRPVHSPWNTPLLPVRKSGTSEYRMVQDLREVNKRVETIHPTVPNPYTLLSLLPPDRIWYSVLDLKDAFFCIPLAPESQLIFAFEWADAEEGESGQLTWTRLPQGFKNSPTLFDEALNRDLQGFRLDHPSVSLLQYVDDLLIAADTQAACLSATRDLLMTLAELGYRVSGKKAQLCQEEVTYLGFKIHKGSRSLSNSRTQAILQIPVPKTKRQVREFLGTIGYCRLWIPGFAELAQPLYAATRGGNDPLVWGEKEEEAFQSLKLALTQPPALALPSLDKPFQLFVEETSGAAKGVLTQALGPWKRPVAYLSKRLDPVAAGWPRCLRAIAAAALLTREASKLTFGQDIEITSSHNLESLLRSPPDKWLTNARITQYQVLLLDPPRVRFKQTAALNPATLLPETDDTLPIHHCLDTLDSLTSTRPDLTDQPLAQAEATLFTDGSSYIRDGKRYAGAAVVTLDSVIWAEPLPIGTSAQKAELIALTKALEWSKDKSVNIYTDSRYAFATLHVHGMIYRERGLLTAGGKAIKNAPEILALLTAVWLPKRVAVMHCKGHQKDDAPTSTGNRRADEVAREVAIRPLSTQATISAGKRTADGSEFEKRTADGSEFESPKKKAKVE

SEQ ID NO: 6275 - protein, 2095 aa, synthetic construct
MPAAKRVKLDGGDKKYSIGLDIGTNSVGWAVITDEYKVPSKKFKVLGNTDRHSIKKNLIGALLFDSGETAEATRLKRTARRRYTRRKNRICYLQEIFSNEMAKVDDSFFHRLEESFLVEEDKKHERHPIFGNIVDEVAYHEKYPTIYHLRKKLVDSTDKADLRLIYLALAHMIKFRGHFLIEGDLNPDNSDVDKLFIQLVQTYNQLFEENPINASGVDAKAILSARLSKSRRLENLIAQLPGEKKNGLFGNLIALSLGLTPNFKSNFDLAEDAKLQLSKDTYDDDLDNLLAQIGDQYADLFLAAKNLSDAILLSDILRVNTEITKAPLSASMIKRYDEHHQDLTLLKALVRQQLPEKYKEIFFDQSKNGYAGYIDGGASQEEFYKFIKPILEKMDGTEELLVKLNREDLLRKQRTFDNGSIPHQIHLGELHAILRRQEDFYPFLKDNREKIEKILTFRIPYYVGPLARGNSRFAWMTRKSEETITPWNFEEVVDKGASAQSFIERMTNFDKNLPNEKVLPKHSLLYEYFTVYNELTKVKYVTEGMRKPAFLSGEQKKAIVDLLFKTNRKVTVKQLKEDYFKKIECFDSVEISGVEDRFNASLGTYHDLLKIIKDKDFLDNEENEDILEDIVLTLTLFEDREMIEERLKTYAHLFDDKVMKQLKRRRYTGWGRLSRKLINGIRDKQSGKTILDFLKSDGFANRNFMQLIHDDSLTFKEDIQKAQVSGQGDSLHEHIANLAGSPAIKKGILQTVKVVDELVKVMGRHKPENIVIEMARENQTTQKGQKNSRERMKRIEEGIKELGSQILKEHPVENTQLQNEKLYLYYLQNGRDMYVDQELDINRLSDYDVDHIVPQSFLKDDSIDNKVLTRSDKARGKSDNVPSEEVVKKMKNYWRQLLNAKLITQRKFDNLTKAERGGLSELDKAGFIKRQLVETRQITKHVAQILDSRMNTKYDENDKLIREVKVITLKSKLVSDFRKDFQFYKVREINNYHHAHDAYLNAVVGTALIKKYPKLESEFVYGDYKVYDVRKMIAKSEQEIGKATAKYFFYSNIMNFFKTEITLANGEIRKRPLIETNGETGEIVWDKGRDFATVRKVLSMPQVNIVKKTEVQTGGFSKESILPKRNSDKLIARKKDWDPKKYGGFDSPTVAYSVLVVAKVEKGKSKKLKSVKELLGITIMERSSFEKNPIDFLEAKGYKEVKKDLIIKLPKYSLFELENGRKRMLASAGELQKGNELALPSKYVNFLYLASHYEKLKGSPEDNEQKQLFVEQHKHYLDEIIEQISEFSKRVILADANLDKVLSAYNKHRDKPIREQAENIIHLFTLTNLGAPAAFKYFDTTIDRKRYTSTKEVLDATLIHQSITGLYETRIDLSQLGGDGGGGGGGGGGGGTAPLEEEYRLFLEAPIQNVTLLEQWKREIPKVWAEINPPGLASTQAPIHVQLLSTALPVRVRQYPITLEAKRSLRETIRKFRAAGILRPVHSPWNTPLLPVRKSGTSEYRMVQDLREVNKRVETIHPTVPNPYTLLSLLPPDRIWYSVLDLKDAFFCIPLAPESQLIFAFEWADAEEGESGQLTWTRLPQGFKNSPTLFNEALNRDLQGFRLDHPSVSLLQYVDDLLIAADTQAACLSATRDLLMTLAELGYRVSGKKAQLCQEEVTYLGFKIHKGSRSLSNSRTQAILQIPVPKTKRQVREFLGKIGYCRLFIPGFAELAQPLYAATRPGNDPLVWGEKEEEAFQSLKLALTQPPALALPSLDKPFQLFVEETSGAAKGVLTQALGPWKRPVAYLSKRLDPVAAGWPRCLRAIAAAALLTREASKLTFGQDIEITSSHNLESLLRSPPDKWLTNARITQYQVLLLDPPRVRFKQTAALNPATLLPETDDTLPIHHCLDTLDSLTSTRPDLTDQPLAQAEATLFTDGSSYIRDGKRYAGAAVVTLDSVIWAEPLPIGTSAQKAELIALTKALEWSKDKSVNIYTDSRYAFATLHVHGMIYRERGWLTAGGKAIKNAPEILALLTAVWLPKRVAVMHCKGHQKDDAPTSTGNRRADEVAREVAIRPLSTQATISAGKRTADGSEFEKRTADGSEFESPKKKAKVE

SEQ ID NO: 6276 - protein, 2099 aa, synthetic construct
MPAAKRVKLDGGDKKYSIGLDIGTNSVGWAVITDEYKVPSKKFKVLGNTDRHSIKKNLIGALLFDSGETAEATRLKRTARRRYTRRKNRICYLQEIFSNEMAKVDDSFFHRLEESFLVEEDKKHERHPIFGNIVDEVAYHEKYPTIYHLRKKLVDSTDKADLRLIYLALAHMIKFRGHFLIEGDLNPDNSDVDKLFIQLVQTYNQLFEENPINASGVDAKAILSARLSKSRRLENLIAQLPGEKKNGLFGNLIALSLGLTPNFKSNFDLAEDAKLQLSKDTYDDDLDNLLAQIGDQYADLFLAAKNLSDAILLSDILRVNTEITKAPLSASMIKRYDEHHQDLTLLKALVRQQLPEKYKEIFFDQSKNGYAGYIDGGASQEEFYKFIKPILEKMDGTEELLVKLNREDLLRKQRTFDNGSIPHQIHLGELHAILRRQEDFYPFLKDNREKIEKILTFRIPYYVGPLARGNSRFAWMTRKSEETITPWNFEEVVDKGASAQSFIERMTNFDKNLPNEKVLPKHSLLYEYFTVYNELTKVKYVTEGMRKPAFLSGEQKKAIVDLLFKTNRKVTVKQLKEDYFKKIECFDSVEISGVEDRFNASLGTYHDLLKIIKDKDFLDNEENEDILEDIVLTLTLFEDREMIEERLKTYAHLFDDKVMKQLKRRRYTGWGRLSRKLINGIRDKQSGKTILDFLKSDGFANRNFMQLIHDDSLTFKEDIQKAQVSGQGDSLHEHIANLAGSPAIKKGILQTVKVVDELVKVMGRHKPENIVIEMARENQTTQKGQKNSRERMKRIEEGIKELGSQILKEHPVENTQLQNEKLYLYYLQNGRDMYVDQELDINRLSDYDVDHIVPQSFLKDDSIDNKVLTRSDKARGKSDNVPSEEVVKKMKNYWRQLLNAKLITQRKFDNLTKAERGGLSELDKAGFIKRQLVETRQITKHVAQILDSRMNTKYDENDKLIREVKVITLKSKLVSDFRKDFQFYKVREINNYHHAHDAYLNAVVGTALIKKYPKLESEFVYGDYKVYDVRKMIAKSEQEIGKATAKYFFYSNIMNFFKTEITLANGEIRKRPLIETNGETGEIVWDKGRDFATVRKVLSMPQVNIVKKTEVQTGGFSKESILPKRNSDKLIARKKDWDPKKYGGFDSPTVAYSVLVVAKVEKGKSKKLKSVKELLGITIMERSSFEKNPIDFLEAKGYKEVKKDLIIKLPKYSLFELENGRKRMLASAGELQKGNELALPSKYVNFLYLASHYEKLKGSPEDNEQKQLFVEQHKHYLDEIIEQISEFSKRVILADANLDKVLSAYNKHRDKPIREQAENIIHLFTLTNLGAPAAFKYFDTTIDRKRYTSTKEVLDATLIHQSITGLYETRIDLSQLGGDGGGGGGGGGGGGTVSLQDEHRLFDIPVTTSLPDVWLQDFPQAWAETGGLGRAKCQAPIIIDLKPTAVPVSIKQYPMSLEAHMGIRQHIIKFLELGVLRPCRSPWNTPLLPVKKPGTQDYRPVQDLREINKRTVDIHPTVPNPYNLLSTLKPDYSWYTVLDLKDAFFCLPLAPQSQELFAFEWKDPERGISGQLTWTRLPQGFKNSPTLFDEALHRDLTDFRTQHPEVTLLQYVDDLLLAAPTKKACTQGTRHLLQELGEKGYRASAKKAQICQTKVTYLGYILSEGKRWLTPGRIETVARIPPPRNPREVREFLGTAGFCRLWIPGFAELAAPLYALTKESTPFTWQTEHQLAFEALKKALLSAPALGLPDTSKPFTLFLDERQGIAKGVLTQKLGPWKRPVAYLSKKLDPVAAGWPPCLRIMAATAMLVKDSAKLTLGQPLTVITPHTLEAIVRQPPDRWITNARLTHYQALLLDTDRVQFGPPVTLNPATLLPVPENQPSPHDCRQVLAETHGTREDLKDQELPDADHTWYTDGSSYLDSGTRRAGAAVVDGHNTIWAQSLPPGTSAQKAELIALTKALELSKGKKANIYTDSRYAFATAHTHGSIYERRGLLTSEGKEIKNKAEIIALLKALFLPQEVAIIHCPGHQKGQDPVAVGNRQADRVARQAAMAEVLTLATEPDNTSHITAGKRTADGSEFEKRTADGSEFESPKKKAKVE

SEQ ID NO: 6277 - protein, 2091 aa, synthetic construct
MPAAKRVKLDGGDKKYSIGLDIGTNSVGWAVITDEYKVPSKKFKVLGNTDRHSIKKNLIGALLFDSGETAEATRLKRTARRRYTRRKNRICYLQEIFSNEMAKVDDSFFHRLEESFLVEEDKKHERHPIFGNIVDEVAYHEKYPTIYHLRKKLVDSTDKADLRLIYLALAHMIKFRGHFLIEGDLNPDNSDVDKLFIQLVQTYNQLFEENPINASGVDAKAILSARLSKSRRLENLIAQLPGEKKNGLFGNLIALSLGLTPNFKSNFDLAEDAKLQLSKDTYDDDLDNLLAQIGDQYADLFLAAKNLSDAILLSDILRVNTEITKAPLSASMIKRYDEHHQDLTLLKALVRQQLPEKYKEIFFDQSKNGYAGYIDGGASQEEFYKFIKPILEKMDGTEELLVKLNREDLLRKQRTFDNGSIPHQIHLGELHAILRRQEDFYPFLKDNREKIEKILTFRIPYYVGPLARGNSRFAWMTRKSEETITPWNFEEVVDKGASAQSFIERMTNFDKNLPNEKVLPKHSLLYEYFTVYNELTKVKYVTEGMRKPAFLSGEQKKAIVDLLFKTNRKVTVKQLKEDYFKKIECFDSVEISGVEDRFNASLGTYHDLLKIIKDKDFLDNEENEDILEDIVLTLTLFEDREMIEERLKTYAHLFDDKVMKQLKRRRYTGWGRLSRKLINGIRDKQSGKTILDFLKSDGFANRNFMQLIHDDSLTFKEDIQKAQVSGQGDSLHEHIANLAGSPAIKKGILQTVKVVDELVKVMGRHKPENIVIEMARENQTTQKGQKNSRERMKRIEEGIKELGSQILKEHPVENTQLQNEKLYLYYLQNGRDMYVDQELDINRLSDYDVDHIVPQSFLKDDSIDNKVLTRSDKARGKSDNVPSEEVVKKMKNYWRQLLNAKLITQRKFDNLTKAERGGLSELDKAGFIKRQLVETRQITKHVAQILDSRMNTKYDENDKLIREVKVITLKSKLVSDFRKDFQFYKVREINNYHHAHDAYLNAVVGTALIKKYPKLESEFVYGDYKVYDVRKMIAKSEQEIGKATAKYFFYSNIMNFFKTEITLANGEIRKRPLIETNGETGEIVWDKGRDFATVRKVLSMPQVNIVKKTEVQTGGFSKESILPKRNSDKLIARKKDWDPKKYGGFDSPTVAYSVLVVAKVEKGKSKKLKSVKELLGITIMERSSFEKNPIDFLEAKGYKEVKKDLIIKLPKYSLFELENGRKRMLASAGELQKGNELALPSKYVNFLYLASHYEKLKGSPEDNEQKQLFVEQHKHYLDEIIEQISEFSKRVILADANLDKVLSAYNKHRDKPIREQAENIIHLFTLTNLGAPAAFKYFDTTIDRKRYTSTKEVLDATLIHQSITGLYETRIDLSQLGGDGGGGGGGGGGGGVLNLEEEYRLHEKPVPSSIDPSWLQLFPTVWAERAGMGLANQVPPVVVELRSGASPVAVRQYPMSKEAREGIRPHIQKFLDLGVLVPCRSPWNTPLLPVKKPGTNDYRPVQDLREINKRVQDIHPTVPNPYNLLSSLPPSYTWYSVLDLKDAFFCLRLHPNSQPLFAFEWKDPEKGNTGQLTWTRLPQGFKNSPTLFNEALHRDLAPFRALNPQVVLLQYVDDLLVAAPTYEDCKKGTQKLLQELSKLGYRVSAKKAQLCQREVTYLGYLLKEGKRWLTPARKATVMKIPVPTTPRQVREFLGTAGFCRLWIPGFASLAAPLYPLTKPSIPFIWTEEHQQAFDHIKKALLSAPALALPDLTKPFTLYIDERAGVARGVLTQTLGPWRRPVAYLSKKLDPVASGWPTCLKAVAAVALLLKDADKLTLGQNVTVIASHSLESIVRQPPDRWMTNARMTHYQSLLLNERVSFAPPAVLNPATLLPVESEATPVHRCSEILAEETGTRRDLEDQPLPGVPTWYTDGSSFITEGKRRAGAPIVDGKRTVWASSLPEGTSAQKAELVALTQALRLAEGKNINIYTDSRYAFATAHIHGAIYKQRGWLTSAGKDIKNKEEILALLEAIHLPRRVAIIHCPGHQRGSNPVATGNRRADEAAKQAALSTRVLAGTTKPAGKRTADGSEFEKRTADGSEFESPKKKAKVE

SEQ ID NO: 6278 - protein, 2124 aa, synthetic construct
MPAAKRVKLDGGDKKYSIGLDIGTNSVGWAVITDEYKVPSKKFKVLGNTDRHSIKKNLIGALLFDSGETAEATRLKRTARRRYTRRKNRICYLQEIFSNEMAKVDDSFFHRLEESFLVEEDKKHERHPIFGNIVDEVAYHEKYPTIYHLRKKLVDSTDKADLRLIYLALAHMIKFRGHFLIEGDLNPDNSDVDKLFIQLVQTYNQLFEENPINASGVDAKAILSARLSKSRRLENLIAQLPGEKKNGLFGNLIALSLGLTPNFKSNFDLAEDAKLQLSKDTYDDDLDNLLAQIGDQYADLFLAAKNLSDAILLSDILRVNTEITKAPLSASMIKRYDEHHQDLTLLKALVRQQLPEKYKEIFFDQSKNGYAGYIDGGASQEEFYKFIKPILEKMDGTEELLVKLNREDLLRKQRTFDNGSIPHQIHLGELHAILRRQEDFYPFLKDNREKIEKILTFRIPYYVGPLARGNSRFAWMTRKSEETITPWNFEEVVDKGASAQSFIERMTNFDKNLPNEKVLPKHSLLYEYFTVYNELTKVKYVTEGMRKPAFLSGEQKKAIVDLLFKTNRKVTVKQLKEDYFKKIECFDSVEISGVEDRFNASLGTYHDLLKIIKDKDFLDNEENEDILEDIVLTLTLFEDREMIEERLKTYAHLFDDKVMKQLKRRRYTGWGRLSRKLINGIRDKQSGKTILDFLKSDGFANRNFMQLIHDDSLTFKEDIQKAQVSGQGDSLHEHIANLAGSPAIKKGILQTVKVVDELVKVMGRHKPENIVIEMARENQTTQKGQKNSRERMKRIEEGIKELGSQILKEHPVENTQLQNEKLYLYYLQNGRDMYVDQELDINRLSDYDVDHIVPQSFLKDDSIDNKVLTRSDKARGKSDNVPSEEVVKKMKNYWRQLLNAKLITQRKFDNLTKAERGGLSELDKAGFIKRQLVETRQITKHVAQILDSRMNTKYDENDKLIREVKVITLKSKLVSDFRKDFQFYKVREINNYHHAHDAYLNAVVGTALIKKYPKLESEFVYGDYKVYDVRKMIAKSEQEIGKATAKYFFYSNIMNFFKTEITLANGEIRKRPLIETNGETGEIVWDKGRDFATVRKVLSMPQVNIVKKTEVQTGGFSKESILPKRNSDKLIARKKDWDPKKYGGFDSPTVAYSVLVVAKVEKGKSKKLKSVKELLGITIMERSSFEKNPIDFLEAKGYKEVKKDLIIKLPKYSLFELENGRKRMLASAGELQKGNELALPSKYVNFLYLASHYEKLKGSPEDNEQKQLFVEQHKHYLDEIIEQISEFSKRVILADANLDKVLSAYNKHRDKPIREQAENIIHLFTLTNLGAPAAFKYFDTTIDRKRYTSTKEVLDATLIHQSITGLYETRIDLSQLGGDGGGGGGGGGGGGLLGRDLLTKLKAQIQFSTEGPQVTWEDRPAMCLVLNLEEEYRLHEKPVPPSIDPSWLQLFPMVWAEKAGMGLANQVPPVVVELKSDASPVAVRQYPMSKEAREGIRPHIQRFLDLGILVPCQSPWNTPLLPVKKPGTNDYRPVQDLREVNKRVQDIHPTVPNPYNLLSSLPPSHTWYSVLDLKDAFFCLKLHPNSQPLFAFEWRDPEKGNTGQLTWTRLPQGFKNSPTLFNEALHRDLASFRALNPQVVMLQYVDDLLVAAPTYRDCKEGTRRLLQELSKLGYRVSAKKAQLCREEVTYLGYLLKGGKRWLTPARKATVMKIPTPTTPRQVREFLGTAGFCRLWIPGFASLAAPLYPLTRPKVPFTWTEAHQEAFGRIKEALLSAPALALPDLTKPFALYVDEKEGVARGVLTQTLGPWRRPVAYLSKKLDPVASGWPTCLKAIAAVALLLKDADKLTLGQNVLVIAPHNLESIVRQPPDRWMTNARMTHYQSLLLNERVSFAPPAILNPATLLPVESDDTPIHICSEILAEETGTRPDLRDQPLPGVPAWYTDGSSFIMDGRRQAGAAIVDNKRTVWASNLPEGTSAQKAELIALTQALRLAEGKSINIYTDSRYAFATAHVHGAIYKQRGWLTSAGKDIKNKEEILALLEAIHLPKRVAIIHCPGHQRGTDPVATGNRKADEAAKQAAQSTRILTETTKNAGKRTADGSEFEKRTADGSEFESPKKKAKVE

SEQ ID NO: 6279 - protein, 2124 aa, synthetic construct
MPAAKRVKLDGGDKKYSIGLDIGTNSVGWAVITDEYKVPSKKFKVLGNTDRHSIKKNLIGALLFDSGETAEATRLKRTARRRYTRRKNRICYLQEIFSNEMAKVDDSFFHRLEESFLVEEDKKHERHPIFGNIVDEVAYHEKYPTIYHLRKKLVDSTDKADLRLIYLALAHMIKFRGHFLIEGDLNPDNSDVDKLFIQLVQTYNQLFEENPINASGVDAKAILSARLSKSRRLENLIAQLPGEKKNGLFGNLIALSLGLTPNFKSNFDLAEDAKLQLSKDTYDDDLDNLLAQIGDQYADLFLAAKNLSDAILLSDILRVNTEITKAPLSASMIKRYDEHHQDLTLLKALVRQQLPEKYKEIFFDQSKNGYAGYIDGGASQEEFYKFIKPILEKMDGTEELLVKLNREDLLRKQRTFDNGSIPHQIHLGELHAILRRQEDFYPFLKDNREKIEKILTFRIPYYVGPLARGNSRFAWMTRKSEETITPWNFEEVVDKGASAQSFIERMTNFDKNLPNEKVLPKHSLLYEYFTVYNELTKVKYVTEGMRKPAFLSGEQKKAIVDLLFKTNRKVTVKQLKEDYFKKIECFDSVEISGVEDRFNASLGTYHDLLKIIKDKDFLDNEENEDILEDIVLTLTLFEDREMIEERLKTYAHLFDDKVMKQLKRRRYTGWGRLSRKLINGIRDKQSGKTILDFLKSDGFANRNFMQLIHDDSLTFKEDIQKAQVSGQGDSLHEHIANLAGSPAIKKGILQTVKVVDELVKVMGRHKPENIVIEMARENQTTQKGQKNSRERMKRIEEGIKELGSQILKEHPVENTQLQNEKLYLYYLQNGRDMYVDQELDINRLSDYDVDHIVPQSFLKDDSIDNKVLTRSDKARGKSDNVPSEEVVKKMKNYWRQLLNAKLITQRKFDNLTKAERGGLSELDKAGFIKRQLVETRQITKHVAQILDSRMNTKYDENDKLIREVKVITLKSKLVSDFRKDFQFYKVREINNYHHAHDAYLNAVVGTALIKKYPKLESEFVYGDYKVYDVRKMIAKSEQEIGKATAKYFFYSNIMNFFKTEITLANGEIRKRPLIETNGETGEIVWDKGRDFATVRKVLSMPQVNIVKKTEVQTGGFSKESILPKRNSDKLIARKKDWDPKKYGGFDSPTVAYSVLVVAKVEKGKSKKLKSVKELLGITIMERSSFEKNPIDFLEAKGYKEVKKDLIIKLPKYSLFELENGRKRMLASAGELQKGNELALPSKYVNFLYLASHYEKLKGSPEDNEQKQLFVEQHKHYLDEIIEQISEFSKRVILADANLDKVLSAYNKHRDKPIREQAENIIHLFTLTNLGAPAAFKYFDTTIDRKRYTSTKEVLDATLIHQSITGLYETRIDLSQLGGDGGGGGGGGGGGGLLGRDLLTKLKAQIQFSTEGPQVTWEDRPAMCLVLNLEEEYRLHEKPVPPSIDPSWLQLFPMVWAEKAGMGLANQVPPVVVELKSDASPVAVRQYPMSKEAREGIRPHIQRFLDLGILVPCQSPWNTPLLPVKKPGTNDYRPVQDLREVNKRVQDIHPTVPNPYNLLSSLPPSHTWYSVLDLKDAFFCLKLHPNSQPLFAFEWRDPEKGNTGQLTWTRLPQGFKNSPTLFNEALHRDLASFRALNPQVVMLQYVDDLLVAAPTYRDCKEGTRRLLQELSKLGYRVSAKKAQLCREEVTYLGYLLKGGKRWLTPARKATVMKIPTPTTPRQVREFLGKAGFCRLFIPGFASLAAPLYPLTRPKVPFTWTEAHQEAFGRIKEALLSAPALALPDLTKPFALYVDEKEGVARGVLTQTLGPWRRPVAYLSKKLDPVASGWPTCLKAIAAVALLLKDADKLTLGQNVLVIAPHNLESIVRQPPDRWMTNARMTHYQSLLLNERVSFAPPAILNPATLLPVESDDTPIHICSEILAEETGTRPDLRDQPLPGVPAWYTDGSSFIMDGRRQAGAAIVDNKRTVWASNLPEGTSAQKAELIALTQALRLAEGKSINIYTDSRYAFATAHVHGAIYKQRGWLTSAGKDIKNKEEILALLEAIHLPKRVAIIHCPGHQRGTDPVATGNRKADEAAKQAAQSTRILTETTKNAGKRTADGSEFEKRTADGSEFESPKKKAKVE

SEQ ID NO: 6280 - protein, 2093 aa, synthetic construct
MPAAKRVKLDGGDKKYSIGLDIGTNSVGWAVITDEYKVPSKKFKVLGNTDRHSIKKNLIGALLFDSGETAEATRLKRTARRRYTRRKNRICYLQEIFSNEMAKVDDSFFHRLEESFLVEEDKKHERHPIFGNIVDEVAYHEKYPTIYHLRKKLVDSTDKADLRLIYLALAHMIKFRGHFLIEGDLNPDNSDVDKLFIQLVQTYNQLFEENPINASGVDAKAILSARLSKSRRLENLIAQLPGEKKNGLFGNLIALSLGLTPNFKSNFDLAEDAKLQLSKDTYDDDLDNLLAQIGDQYADLFLAAKNLSDAILLSDILRVNTEITKAPLSASMIKRYDEHHQDLTLLKALVRQQLPEKYKEIFFDQSKNGYAGYIDGGASQEEFYKFIKPILEKMDGTEELLVKLNREDLLRKQRTFDNGSIPHQIHLGELHAILRRQEDFYPFLKDNREKIEKILTFRIPYYVGPLARGNSRFAWMTRKSEETITPWNFEEVVDKGASAQSFIERMTNFDKNLPNEKVLPKHSLLYEYFTVYNELTKVKYVTEGMRKPAFLSGEQKKAIVDLLFKTNRKVTVKQLKEDYFKKIECFDSVEISGVEDRFNASLGTYHDLLKIIKDKDFLDNEENEDILEDIVLTLTLFEDREMIEERLKTYAHLFDDKVMKQLKRRRYTGWGRLSRKLINGIRDKQSGKTILDFLKSDGFANRNFMQLIHDDSLTFKEDIQKAQVSGQGDSLHEHIANLAGSPAIKKGILQTVKVVDELVKVMGRHKPENIVIEMARENQTTQKGQKNSRERMKRIEEGIKELGSQILKEHPVENTQLQNEKLYLYYLQNGRDMYVDQELDINRLSDYDVDHIVPQSFLKDDSIDNKVLTRSDKARGKSDNVPSEEVVKKMKNYWRQLLNAKLITQRKFDNLTKAERGGLSELDKAGFIKRQLVETRQITKHVAQILDSRMNTKYDENDKLIREVKVITLKSKLVSDFRKDFQFYKVREINNYHHAHDAYLNAVVGTALIKKYPKLESEFVYGDYKVYDVRKMIAKSEQEIGKATAKYFFYSNIMNFFKTEITLANGEIRKRPLIETNGETGEIVWDKGRDFATVRKVLSMPQVNIVKKTEVQTGGFSKESILPKRNSDKLIARKKDWDPKKYGGFDSPTVAYSVLVVAKVEKGKSKKLKSVKELLGITIMERSSFEKNPIDFLEAKGYKEVKKDLIIKLPKYSLFELENGRKRMLASAGELQKGNELALPSKYVNFLYLASHYEKLKGSPEDNEQKQLFVEQHKHYLDEIIEQISEFSKRVILADANLDKVLSAYNKHRDKPIREQAENIIHLFTLTNLGAPAAFKYFDTTIDRKRYTSTKEVLDATLIHQSITGLYETRIDLSQLGGDGGGGGGGGGGGGTLNLEDEYRLYETSAEPEVSPGSTWLSDFPQAWAETGGMGLAVRQAPLIIPLKATSTPVSIKQYPMSQEAKLGIKPHIQRLLDQGILVPCQSPWNTPLLPVKKPGTNDYRPVQDLREVNKRVEDIHPTVPNPYNLLSGLPPSHRWYTVLDLKDAFFCLRLHPTSQPLFAFEWRDPGMGISGQLTWTRLPQGFKNSPTLFNEALHRDLADFRIQHPDLILLQYVDDILLAATSELDCQQGTRALLLTLGNLGYRASAKKAQLCQKQVKYLGYLLKEGQRWLTEARKETVMGQPTPKTPRQLREFLGKAGFCRLFIPGFAEMAAPLYPLTKPGTLFNWGPDQQKAYQEIKQALLTAPALGLPDLTKPFELFVDEKQGYAKGVLTQKLGPWRRPVAYLSKKLDPVAAGWPPCLRMVAAIAVLRKDAGKLTMGQPLVILAPHAVEALVKQPPDRWLSNARMTHYQAMLLDTDRVQFGPVVALNPATLLPLPEEGAPHDCLEILAETHGTRPDLTDQPIPDADHTWYTDGSSFLQEGQRKAGAAVTTETEVIWARALPAGTSAQRAELIALTQALKMAEGKRLNVYTDSRYAFATAHIHGEIYRRRGWLTSEGREIKNKSEILALLKALFLPKRLSIIHCLGHQKGDSAEARGNRLADQAAREAAIKTPPDTSTLLAGKRTADGSEFEKRTADGSEFESPKKKAKVE

SEQ ID NO: 6281 - protein, 2093 aa, synthetic construct
MPAAKRVKLDGGDKKYSIGLDIGTNSVGWAVITDEYKVPSKKFKVLGNTDRHSIKKNLIGALLFDSGETAEATRLKRTARRRYTRRKNRICYLQEIFSNEMAKVDDSFFHRLEESFLVEEDKKHERHPIFGNIVDEVAYHEKYPTIYHLRKKLVDSTDKADLRLIYLALAHMIKFRGHFLIEGDLNPDNSDVDKLFIQLVQTYNQLFEENPINASGVDAKAILSARLSKSRRLENLIAQLPGEKKNGLFGNLIALSLGLTPNFKSNFDLAEDAKLQLSKDTYDDDLDNLLAQIGDQYADLFLAAKNLSDAILLSDILRVNTEITKAPLSASMIKRYDEHHQDLTLLKALVRQQLPEKYKEIFFDQSKNGYAGYIDGGASQEEFYKFIKPILEKMDGTEELLVKLNREDLLRKQRTFDNGSIPHQIHLGELHAILRRQEDFYPFLKDNREKIEKILTFRIPYYVGPLARGNSRFAWMTRKSEETITPWNFEEVVDKGASAQSFIERMTNFDKNLPNEKVLPKHSLLYEYFTVYNELTKVKYVTEGMRKPAFLSGEQKKAIVDLLFKTNRKVTVKQLKEDYFKKIECFDSVEISGVEDRFNASLGTYHDLLKIIKDKDFLDNEENEDILEDIVLTLTLFEDREMIEERLKTYAHLFDDKVMKQLKRRRYTGWGRLSRKLINGIRDKQSGKTILDFLKSDGFANRNFMQLIHDDSLTFKEDIQKAQVSGQGDSLHEHIANLAGSPAIKKGILQTVKVVDELVKVMGRHKPENIVIEMARENQTTQKGQKNSRERMKRIEEGIKELGSQILKEHPVENTQLQNEKLYLYYLQNGRDMYVDQELDINRLSDYDVDHIVPQSFLKDDSIDNKVLTRSDKARGKSDNVPSEEVVKKMKNYWRQLLNAKLITQRKFDNLTKAERGGLSELDKAGFIKRQLVETRQITKHVAQILDSRMNTKYDENDKLIREVKVITLKSKLVSDFRKDFQFYKVREINNYHHAHDAYLNAVVGTALIKKYPKLESEFVYGDYKVYDVRKMIAKSEQEIGKATAKYFFYSNIMNFFKTEITLANGEIRKRPLIETNGETGEIVWDKGRDFATVRKVLSMPQVNIVKKTEVQTGGFSKESILPKRNSDKLIARKKDWDPKKYGGFDSPTVAYSVLVVAKVEKGKSKKLKSVKELLGITIMERSSFEKNPIDFLEAKGYKEVKKDLIIKLPKYSLFELENGRKRMLASAGELQKGNELALPSKYVNFLYLASHYEKLKGSPEDNEQKQLFVEQHKHYLDEIIEQISEFSKRVILADANLDKVLSAYNKHRDKPIREQAENIIHLFTLTNLGAPAAFKYFDTTIDRKRYTSTKEVLDATLIHQSITGLYETRIDLSQLGGDGGGGGGGGGGGGLGIEDEYRLHETSTEPDVSLGSTWLSDFPQAWAETGGMGLAVRQAPLIIPLKATSTPVSIQQYPMSHEARLGIKPHIQRLLDQGILVPCQSPWNTPLLPVKKPGTNDYRPVQDLREVNKRVEDIHPTVPNPYNLLSGLPPSHQWYTVLDLKDAFFCLRLHPTSQPLFAFEWRDPGMGISGQLTWTRLPQGFKNSPTLFNEALHRDLADFRIQHPDLILLQYVDDILLAATSELDCQQGTRALLQTLGDLGYRASAKKAQICQKQVKYLGYLLREGQRWLTEARKETVMGQPVPKTPRQLREFLGKAGFCRLFIPGFAEMAAPLYPLTKPGTLFSWGPDQQKAYQEIKQALLTAPALGLPDLTKPFELFVDEKQGYAKGVLTQKLGPWRRPVAYLSKKLDPVAAGWPPCLRMVAAIAVLTKDAGKLTMGQPLVILAPHAVEALVKQPPDRWLSNARMTHYQAMLLDTDRVQFGPVVALNPATLLPLPEEGAPHDCLEILAETHGTRPDLTDQPIPDADHTWYTDGSSFLQEGQRKAGAAVTTETEVIWAGALPAGTSAQRAELIALTQALKMAEGKRLNVYTDSRYAFATAHIHGEIYRRRGWLTSEGREIKNKSEILALLKALFLPKRLSIIHCLGHQKGDSAEARGNRLADQAAREAAIKTPPDTSTLLIAGKRTADGSEFEKRTADGSEFESPKKKAKVE

SEQ ID NO: 6282 - protein, 2093 aa, synthetic construct; identical to SEQ ID NO: 6281

SEQ ID NO: 6283 - protein, 2093 aa, synthetic construct
MPAAKRVKLDGGDKKYSIGLDIGTNSVGWAVITDEYKVPSKKFKVLGNTDRHSIKKNLIGALLFDSGETAEATRLKRTARRRYTRRKNRICYLQEIFSNEMAKVDDSFFHRLEESFLVEEDKKHERHPIFGNIVDEVAYHEKYPTIYHLRKKLVDSTDKADLRLIYLALAHMIKFRGHFLIEGDLNPDNSDVDKLFIQLVQTYNQLFEENPINASGVDAKAILSARLSKSRRLENLIAQLPGEKKNGLFGNLIALSLGLTPNFKSNFDLAEDAKLQLSKDTYDDDLDNLLAQIGDQYADLFLAAKNLSDAILLSDILRVNTEITKAPLSASMIKRYDEHHQDLTLLKALVRQQLPEKYKEIFFDQSKNGYAGYIDGGASQEEFYKFIKPILEKMDGTEELLVKLNREDLLRKQRTFDNGSIPHQIHLGELHAILRRQEDFYPFLKDNREKIEKILTFRIPYYVGPLARGNSRFAWMTRKSEETITPWNFEEVVDKGASAQSFIERMTNFDKNLPNEKVLPKHSLLYEYFTVYNELTKVKYVTEGMRKPAFLSGEQKKAIVDLLFKTNRKVTVKQLKEDYFKKIECFDSVEISGVEDRFNASLGTYHDLLKIIKDKDFLDNEENEDILEDIVLTLTLFEDREMIEERLKTYAHLFDDKVMKQLKRRRYTGWGRLSRKLINGIRDKQSGKTILDFLKSDGFANRNFMQLIHDDSLTFKEDIQKAQVSGQGDSLHEHIANLAGSPAIKKGILQTVKVVDELVKVMGRHKPENIVIEMARENQTTQKGQKNSRERMKRIEEGIKELGSQILKEHPVENTQLQNEKLYLYYLQNGRDMYVDQELDINRLSDYDVDHIVPQSFLKDDSIDNKVLTRSDKARGKSDNVPSEEVVKKMKNYWRQLLNAKLITQRKFDNLTKAERGGLSELDKAGFIKRQLVETRQITKHVAQILDSRMNTKYDENDKLIREVKVITLKSKLVSDFRKDFQFYKVREINNYHHAHDAYLNAVVGTALIKKYPKLESEFVYGDYKVYDVRKMIAKSEQEIGKATAKYFFYSNIMNFFKTEITLANGEIRKRPLIETNGETGEIVWDKGRDFATVRKVLSMPQVNIVKKTEVQTGGFSKESILPKRNSDKLIARKKDWDPKKYGGFDSPTVAYSVLVVAKVEKGKSKKLKSVKELLGITIMERSSFEKNPIDFLEAKGYKEVKKDLIIKLPKYSLFELENGRKRMLASAGELQKGNELALPSKYVNFLYLASHYEKLKGSPEDNEQKQLFVEQHKHYLDEIIEQISEFSKRVILADANLDKVLSAYNKHRDKPIREQAENIIHLFTLTNLGAPAAFKYFDTTIDRKRYTSTKEVLDATLIHQSITGLYETRIDLSQLGGDGGGGGGGGGGGGTLNIEDEYRLHETSKEPDVSLGSTWLSDFPQAWAETGGMGLAVRQAPLIIPLKATSTPVSIKQYPMSQEARLGIKPHIQRLLDQGILVPCQSPWNTPLLPVKKPGTNDYRPVQDLREVNKRVEDIHPTVPNPYNLLSGLPPSHQWYTVLDLKDAFFCLRLHPTSQPLFAFEWRDPEMGISGQLTWTRLPQGFKNSPTLFNEALHRDLAGFRIQHPDLILLQYVDDLLLAATSELDCQQGTRALLQTLGDLGYRASAKKAQICQKQVKYLGYLLKEGQRWLTEARKETVMGQPIPKTPRQLREFLGTAGFCRLWIPGFAEMAAPLYPLTKPGTLFNWGPDQQKAFQEIKQALLTAPALGLPDLTKPFELFVDEKQGYAKGVLTQKLGPWRRPVAYLSKKLDPVAAGWPPCLRMVAAIAVLTKDAGKLTMGQPLVILAPHAVEALVKQPPDRWLSNARMTHYQALLLDTDRVQFGPVVALNPATLLPLPEEGLQHDCLDILAEAHGTRSDLMDQPLPDADHTWYTDGSSFLQEGQRKAGAAVTTETEVIWARALPAGTSAQRAELIALTQALKMAEGKKLNVYTDSRYAFATAHIHGEIYRRRGWLTSEGKEIKNKDEILALLKALFLPKRLSIIHCPGHQKGNSAEARGNRMADQAAREVATRETPETSTLLAGKRTADGSEFEKRTADGSEFESPKKKAKVE

SEQ ID NO: 6284 - protein, 2093 aa, synthetic construct
MPAAKRVKLDGGDKKYSIGLDIGTNSVGWAVITDEYKVPSKKFKVLGNTDRHSIKKNLIGALLFDSGETAEATRLKRTARRRYTRRKNRICYLQEIFSNEMAKVDDSFFHRLEESFLVEEDKKHERHPIFGNIVDEVAYHEKYPTIYHLRKKLVDSTDKADLRLIYLALAHMIKFRGHFLIEGDLNPDNSDVDKLFIQLVQTYNQLFEENPINASGVDAKAILSARLSKSRRLENLIAQLPGEKKNGLFGNLIALSLGLTPNFKSNFDLAEDAKLQLSKDTYDDDLDNLLAQIGDQYADLFLAAKNLSDAILLSDILRVNTEITKAPLSASMIKRYDEHHQDLTLLKALVRQQLPEKYKEIFFDQSKNGYAGYIDGGASQEEFYKFIKPILEKMDGTEELLVKLNREDLLRKQRTFDNGSIPHQIHLGELHAILRRQEDFYPFLKDNREKIEKILTFRIPYYVGPLARGNSRFAWMTRKSEETITPWNFEEVVDKGASAQSFIERMTNFDKNLPNEKVLPKHSLLYEYFTVYNELTKVKYVTEGMRKPAFLSGEQKKAIVDLLFKTNRKVTVKQLKEDYFKKIECFDSVEISGVEDRFNASLGTYHDLLKIIKDKDFLDNEENEDILEDIVLTLTLFEDREMIEERLKTYAHLFDDKVMKQLKRRRYTGWGRLSRKLINGIRDKQSGKTILDFLKSDGFANRNFMQLIHDDSLTFKEDIQKAQVSGQGDSLHEHIANLAGSPAIKKGILQTVKVVDELVKVMGRHKPENIVIEMARENQTTQKGQKNSRERMKRIEEGIKELGSQILKEHPVENTQLQNEKLYLYYLQNGRDMYVDQELDINRLSDYDVDHIVPQSFLKDDSIDNKVLTRSDKARGKSDNVPSEEVVKKMKNYWRQLLNAKLITQRKFDNLTKAERGGLSELDKAGFIKRQLVETRQITKHVAQILDSRMNTKYDENDKLIREVKVITLKSKLVSDFRKDFQFYKVREINNYHHAHDAYLNAVVGTALIKKYPKLESEFVYGDYKVYDVRKMIAKSEQEIGKATAKYFFYSNIMNFFKTEITLANGEIRKRPLIETNGETGEIVWDKGRDFATVRKVLSMPQVNIVKKTEVQTGGFSKESILPKRNSDKLIARKKDWDPKKYGGFDSPTVAYSVLVVAKVEKGKSKKLKSVKELLGITIMERSSFEKNPIDFLEAKGYKEVKKDLIIKLPKYSLFELENGRKRMLASAGELQKGNELALPSKYVNFLYLASHYEKLKGSPEDNEQKQLFVEQHKHYLDEIIEQISEFSKRVILADANLDKVLSAYNKHRDKPIREQAENIIHLFTLTNLGAPAAFKYFDTTIDRKRYTSTKEVLDATLIHQSITGLYETRIDLSQLGGDGGGGGGGGGGGGTLNIEDEHRLHETSKEPDVSLGSTWLSDFPQAWAETGGMGLAVRQAPLIIPLKATSTPVSIKQYPMSQEARLGIKPHIQRLLDQGILVPCQSPWNTPLLPVKKPGTNDYRPVQDLREVNKRVEDIHPTVPNPYNLLSGLPPSHQWYTVLDLKDAFFCLRLHPTSQPLFAFEWRDPEMGISGQLTWTRLPQGFKNSPTLFNEALHRDLADFRIQHPDLILLQYVDDLLLAATSELDCQQGTRALLQTLGNLGYRASAKKAQICQKQVKYLGYLLKEGQRWLTEARKETVMGQPTPKTPRQLREFLGKAGFCRLFIPGFAEMAAPLYPLTKPGTLFNWGPDQQKAYQEIKQALLTAPALGLPDLTKPFELFVDEKQGYAKGVLTQKLGPWRRPVAYLSKKLDPVAAGWPPCLRMVAAIAVLTKDAGKLTMGQPLVILAPHAVEALVKQPPDRWLSNARMTHYQALLLDTDRVQFGPVVALNPATLLPLPEEGLQHNCLDILAEAHGTRPDLTDQPLPDADHTWYTDGSSLLQEGQRKAGAAVTTETEVIWAKALPAGTSAQRAELIALTQALKMAEGKKLNVYTDSRYAFATAHIHGEIYRRRGWLTSEGKEIKNKDEILALLKALFLPKRLSIIHCPGHQKGHSAEARGNRMADQAARKAAITETPDTSTLLAGKRTADGSEFEKRTADGSEFESPKKKAKVE

SEQ ID NO: 6285 - protein, 2093 aa, synthetic construct; identical to SEQ ID NO: 6284

SEQ ID NO: 6286 - protein, 2091 aa, synthetic construct
MPAAKRVKLDGGDKKYSIGLDIGTNSVGWAVITDEYKVPSKKFKVLGNTDRHSIKKNLIGALLFDSGETAEATRLKRTARRRYTRRKNRICYLQEIFSNEMAKVDDSFFHRLEESFLVEEDKKHERHPIFGNIVDEVAYHEKYPTIYHLRKKLVDSTDKADLRLIYLALAHMIKFRGHFLIEGDLNPDNSDVDKLFIQLVQTYNQLFEENPINASGVDAKAILSARLSKSRRLENLIAQLPGEKKNGLFGNLIALSLGLTPNFKSNFDLAEDAKLQLSKDTYDDDLDNLLAQIGDQYADLFLAAKNLSDAILLSDILRVNTEITKAPLSASMIKRYDEHHQDLTLLKALVRQQLPEKYKEIFFDQSKNGYAGYIDGGASQEEFYKFIKPILEKMDGTEELLVKLNREDLLRKQRTFDNGSIPHQIHLGELHAILRRQEDFYPFLKDNREKIEKILTFRIPYYVGPLARGNSRFAWMTRKSEETITPWNFEEVVDKGASAQSFIERMTNFDKNLPNEKVLPKHSLLYEYFTVYNELTKVKYVTEGMRKPAFLSGEQKKAIVDLLFKTNRKVTVKQLKEDYFKKIECFDSVEISGVEDRFNASLGTYHDLLKIIKDKDFLDNEENEDILEDIVLTLTLFEDREMIEERLKTYAHLFDDKVMKQLKRRRYTGWGRLSRKLINGIRDKQSGKTILDFLKSDGFANRNFMQLIHDDSLTFKEDIQKAQVSGQGDSLHEHIANLAGSPAIKKGILQTVKVVDELVKVMGRHKPENIVIEMARENQTTQKGQKNSRERMKRIEEGIKELGSQILKEHPVENTQLQNEKLYLYYLQNGRDMYVDQELDINRLSDYDVDHIVPQSFLKDDSIDNKVLTRSDKARGKSDNVPSEEVVKKMKNYWRQLLNAKLITQRKFDNLTKAERGGLSELDKAGFIKRQLVETRQITKHVAQILDSRMNTKYDENDKLIREVKVITLKSKLVSDFRKDFQFYKVREINNYHHAHDAYLNAVVGTALIKKYPKLESEFVYGDYKVYDVRKMIAKSEQEIGKATAKYFFYSNIMNFFKTEITLANGEIRKRPLIETNGETGEIVWDKGRDFATVRKVLSMPQVNIVKKTEVQTGGFSKESILPKRNSDKLIARKKDWDPKKYGGFDSPTVAYSVLVVAKVEKGKSKKLKSVKELLGITIMERSSFEKNPIDFLEAKGYKEVKKDLIIKLPKYSLFELENGRKRMLASAGELQKGNELALPSKYVNFLYLASHYEKLKGSPEDNEQKQLFVEQHKHYLDEIIEQISEFSKRVILADANLDKVLSAYNKHRDKPIREQAENIIHLFTLTNLGAPAAFKYFDTTIDRKRYTSTKEVLDATLIHQSITGLYETRIDLSQLGGDGGGGGGGGGGGGVLNLEEEYRLHEKPVPSSIDPSWLQLFPTVWAERAGMGLANQVPPVVVELRSGASPVAVRQYPMSKEAREGIRPHIQRFLDLGVLVPCQSPWNTPLLPVKKPGTNDYRPVQDLREINKRVQDIHPTVPNPYNLLSSLPPSHTWYSVLDLKDAFFCLKLHPNSQPLFAFEWRDPEKGNTGQLTWTRLPQGFKNSPTLFNEALHRDLAPFRALNPQVVLLQYVDDLLVAAPTYRDCKEGTQKLLQELSKLGYRVSAKKAQLCQKEVTYLGYLLKEGKRWLTPARKATVMKIPPPTTPRQVREFLGKAGFCRLFIPGFASLAAPLYPLTKPSIPFIWTEEHQKAFDRIKEALLSAPALALPDLTKPFTLYVDERAGVARGVLTQTLGPWRRPVAYLSKKLDPVASGWPTCLKAVAAVALLLKDADKLTLGQNVTVIASHSLESIVRQPPDRWMTNARMTHYQSLLLNERVSFAPPAVLNPATLLPVESEATPVHRCSEILAEETGTRRDLKDQPLPGVPAWYTDGSSFIAEGKRRAGAAIVDGKRTVWASSLPEGTSAQKAELVALTQALRLAEGKDINIYTDSRYAFATAHIHGAIYKQRGWLTSAGKDIKNKEEILALLEAIHLPKRVAIIHCPGHQKGNDPVATGNRRADEAAKQAALSTRVLAETTKPAGKRTADGSEFEKRTADGSEFESPKKKAKVE

SEQ ID NO: 6287 - protein, 2093 aa, synthetic construct
MPAAKRVKLDGGDKKYSIGLDIGTNSVGWAVITDEYKVPSKKFKVLGNTDRHSIKKNLIGALLFDSGETAEATRLKRTARRRYTRRKNRICYLQEIFSNEMAKVDDSFFHRLEESFLVEEDKKHERHPIFGNIVDEVAYHEKYPTIYHLRKKLVDSTDKADLRLIYLALAHMIKFRGHFLIEGDLNPDNSDVDKLFIQLVQTYNQLFEENPINASGVDAKAILSARLSKSRRLENLIAQLPGEKKNGLFGNLIALSLGLTPNFKSNFDLAEDAKLQLSKDTYDDDLDNLLAQIGDQYADLFLAAKNLSDAILLSDILRVNTEITKAPLSASMIKRYDEHHQDLTLLKALVRQQLPEKYKEIFFDQSKNGYAGYIDGGASQEEFYKFIKPILEKMDGTEELLVKLNREDLLRKQRTFDNGSIPHQIHLGELHAILRRQEDFYPFLKDNREKIEKILTFRIPYYVGPLARGNSRFAWMTRKSEETITPWNFEEVVDKGASAQSFIERMTNFDKNLPNEKVLPKHSLLYEYFTVYNELTKVKYVTEGMRKPAFLSGEQKKAIVDLLFKTNRKVTVKQLKEDYFKKIECFDSVEISGVEDRFNASLGTYHDLLKIIKDKDFLDNEENEDILEDIVLTLTLFEDREMIEERLKTYAHLFDDKVMKQLKRRRYTGWGRLSRKLINGIRDKQSGKTILDFLKSDGFANRNFMQLIHDDSLTFKEDIQKAQVSGQGDSLHEHIANLAGSPAIKKGILQTVKVVDELVKVMGRHKPENIVIEMARENQTTQKGQKNSRERMKRIEEGIKELGSQILKEHPVENTQLQNEKLYLYYLQNGRDMYVDQELDINRLSDYDVDHIVPQSFLKDDSIDNKVLTRSDKARGKSDNVPSEEVVKKMKNYWRQLLNAKLITQRKFDNLTKAERGGLSELDKAGFIKRQLVETRQITKHVAQILDSRMNTKYDENDKLIREVKVITLKSKLVSDFRKDFQFYKVREINNYHHAHDAYLNAVVGTALIKKYPKLESEFVYGDYKVYDVRKMIAKSEQEIGKATAKYFFYSNIMNFFKTEITLANGEIRKRPLIETNGETGEIVWDKGRDFATVRKVLSMPQVNIVKKTEVQTGGFSKESILPKRNSDKLIARKKDWDPKKYGGFDSPTVAYSVLVVAKVEKGKSKKLKSVKELLGITIMERSSFEKNPIDFLEAKGYKEVKKDLIIKLPKYSLFELENGRKRMLASAGELQKGNELALPSKYVNFLYLASHYEKLKGSPEDNEQKQLFVEQHKHYLDEIIEQISEFSKRVILADANLDKVLSAYNKHRDKPIREQAENIIHLFTLTNLGAPAAFKYFDTTIDRKRYTSTKEVLDATLIHQSITGLYETRIDLSQLGGDGGGGGGGGGGGGTLNIEDEYRLHETSKEPDVPLGSTWLSDFPQAWAETGGMGLAVRQAPLIIPLKATSTPVSIKQYPMSQEARLGIKPHIQRLLDQGILVPCQSPWNTPLLPVKKPGTNDYRPVQDLREVNKRVEDIHPTVPNPYNLLSGLPPSHQWYTVLDLKDAFFCLRLHPTSQPLFAFEWRDPEMGISGQLTWTRLPQGFKNSPTLFNEALHRDLADFRIQHPDLILLQYVDDLLLAATSEQDCQRGTRALLQTLGNLGYRASAKKAQICQKQVKYLGYLLKEGQRWLTEARKETVMGQPTPKTPRQLREFLGTAGFCRLWIPGFAEMAAPLYPLTKPGTLFNWGPDQQKAYQEIKQALLTAPALGLPDLTKPFELFVDEKQGYAKGVLTQKLGPWRRPVAYLSKKLDPVAAGWPPCLRMVAAIAVLTKDAGKLTMGQPLVILAPHAVEALVKQPPDRWLSNARMTHYQAMLLDTDRVQFGPVVALNPATLLPLPEKEAPHDCLEILAETHGTRPDLTDQPIPDADYTWYTDGSSFLQEGQRRAGAAVTTETEVIWARALPAGTSAQRAELIALTQALKMAEGKKLNVYTDSRYAFATAHVHGEIYRRRGWLTSEGREIKNKNEILALLKALFLPKRLSIIHCPGHQKGNSAEARGNRMADQAAREAAMKAVLETSTLLAGKRTADGSEFEKRTADGSEFESPKKKAKVE

SEQ ID NO: 6288 - protein, 2093 aa, synthetic construct
MPAAKRVKLDGGDKKYSIGLDIGTNSVGWAVITDEYKVPSKKFKVLGNTDRHSIKKNLIGALLFDSGETAEATRLKRTARRRYTRRKNRICYLQEIFSNEMAKVDDSFFHRLEESFLVEEDKKHERHPIFGNIVDEVAYHEKYPTIYHLRKKLVDSTDKADLRLIYLALAHMIKFRGHFLIEGDLNPDNSDVDKLFIQLVQTYNQLFEENPINASGVDAKAILSARLSKSRRLENLIAQLPGEKKNGLFGNLIALSLGLTPNFKSNFDLAEDAKLQLSKDTYDDDLDNLLAQIGDQYADLFLAAKNLSDAILLSDILRVNTEITKAPLSASMIKRYDEHHQDLTLLKALVRQQLPEKYKEIFFDQSKNGYAGYIDGGASQEEFYKFIKPILEKMDGTEELLVKLNREDLLRKQRTFDNGSIPHQIHLGELHAILRRQEDFYPFLKDNREKIEKILTFRIPYYVGPLARGNSRFAWMTRKSEETITPWNFEEVVDKGASAQSFIERMTNFDKNLPNEKVLPKHSLLYEYFTVYNELTKVKYVTEGMRKPAFLSGEQKKAIVDLLFKTNRKVTVKQLKEDYFKKIECFDSVEISGVEDRFNASLGTYHDLLKIIKDKDFLDNEENEDILEDIVLTLTLFEDREMIEERLKTYAHLFDDKVMKQLKRRRYTGWGRLSRKLINGIRDKQSGKTILDFLKSDGFANRNFMQLIHDDSLTFKEDIQKAQVSGQGDSLHEHIANLAGSPAIKKGILQTVKVVDELVKVMGRHKPENIVIEMARENQTTQKGQKNSRERMKRIEEGIKELGSQILKEHPVENTQLQNEKLYLYYLQNGRDMYVDQELDINRLSDYDVDHIVPQSFLKDDSIDNKVLTRSDKARGKSDNVPSEEVVKKMKNYWRQLLNAKLITQRKFDNLTKAERGGLSELDKAGFIKRQLVETRQITKHVAQILDSRMNTKYDENDKLIREVKVITLKSKLVSDFRKDFQFYKVREINNYHHAHDAYLNAVVGTALIKKYPKLESEFVYGDYKVYDVRKMIAKSEQEIGKATAKYFFYSNIMNFFKTEITLANGEIRKRPLIETNGETGEIVWDKGRDFATVRKVLSMPQVNIVKKTEVQTGGFSKESILPKRNSDKLIARKKDWDPKKYGGFDSPTVAYSVLVVAKVEKGKSKKLKSVKELLGITIMERSSFEKNPIDFLEAKGYKEVKKDLIIKLPKYSLFELENGRKRMLASAGELQKGNELALPSKYVNFLYLASHYEKLKGSPEDNEQKQLFVEQHKHYLDEIIEQISEFSKRVILADANLDKVLSAYNKHRDKPIREQAENIIHLFTLTNLGAPAAFKYFDTTIDRKRYTSTKEVLDATLIHQSITGLYETRIDLSQLGGDGGGGGGGGGGGGTLNIEDEYRLHETSKEPDVPLGSTWLSDFPQAWAETGGMGLAVRQAPLIIPLKATSTPVSIKQYPMSQEARLGIKPHIQRLLDQGILVPCQSPWNTPLLPVKKPGTNDYRPVQDLREVNKRVEDIHPTVPNPYNLLSGLPPSHQWYTVLDLKDAFFCLRLHPTSQPLFAFEWRDPEMGISGQLTWTRLPQGFKNSPTLFNEALHRDLADFRIQHPDLILLQYVDDLLLAATSEQDCQRGTRALLQTLGNLGYRASAKKAQICQKQVKYLGYLLKEGQRWLTEARKETVMGQPTPKTPRQLREFLGKAGFCRLFIPGFAEMAAPLYPLTKPGTLFNWGPDQQKAYQEIKQALLTAPALGLPDLTKPFELFVDEKQGYAKGVLTQKLGPWRRPVAYLSKKLDPVAAGWPPCLRMVAAIAVLTKDAGKLTMGQPLVILAPHAVEALVKQPPDRWLSNARMTHYQAMLLDTDRVQFGPVVALNPATLLPLPEKEAPHDCLEILAETHGTRPDLTDQPIPDADYTWYTDGSSFLQEGQRRAGAAVTTETEVIWARALPAGTSAQRAELIALTQALKMAEGKKLNVYTDSRYAFATAHVHGEIYRRRGWLTSEGREIKNKNEILALLKALFLPKRLSIIHCPGHQKGNSAEARGNRMADQAAREAAMKAVLETSTLLAGKRTADGSEFEKRTADGSEFESPKKKAKVE

SEQ ID NO: 6289 - protein, 2090 aa, synthetic construct
MPAAKRVKLDGGDKKYSIGLDIGTNSVGWAVITDEYKVPSKKFKVLGNTDRHSIKKNLIGALLFDSGETAEATRLKRTARRRYTRRKNRICYLQEIFSNEMAKVDDSFFHRLEESFLVEEDKKHERHPIFGNIVDEVAYHEKYPTIYHLRKKLVDSTDKADLRLIYLALAHMIKFRGHFLIEGDLNPDNSDVDKLFIQLVQTYNQLFEENPINASGVDAKAILSARLSKSRRLENLIAQLPGEKKNGLFGNLIALSLGLTPNFKSNFDLAEDAKLQLSKDTYDDDLDNLLAQIGDQYADLFLAAKNLSDAILLSDILRVNTEITKAPLSASMIKRYDEHHQDLTLLKALVRQQLPEKYKEIFFDQSKNGYAGYIDGGASQEEFYKFIKPILEKMDGTEELLVKLNREDLLRKQRTFDNGSIPHQIHLGELHAILRRQEDFYPFLKDNREKIEKILTFRIPYYVGPLARGNSRFAWMTRKSEETITPWNFEEVVDKGASAQSFIERMTNFDKNLPNEKVLPKHSLLYEYFTVYNELTKVKYVTEGMRKPAFLSGEQKKAIVDLLFKTNRKVTVKQLKEDYFKKIECFDSVEISGVEDRFNASLGTYHDLLKIIKDKDFLDNEENEDILEDIVLTLTLFEDREMIEERLKTYAHLFDDKVMKQLKRRRYTGWGRLSRKLINGIRDKQSGKTILDFLKSDGFANRNFMQLIHDDSLTFKEDIQKAQVSGQGDSLHEHIANLAGSPAIKKGILQTVKVVDELVKVMGRHKPENIVIEMARENQTTQKGQKNSRERMKRIEEGIKELGSQILKEHPVENTQLQNEKLYLYYLQNGRDMYVDQELDINRLSDYDVDHIVPQSFLKDDSIDNKVLTRSDKARGKSDNVPSEEVVKKMKNYWRQLLNAKLITQRKFDNLTKAERGGLSELDKAGFIKRQLVETRQITKHVAQILDSRMNTKYDENDKLIREVKVITLKSKLVSDFRKDFQFYKVREINNYHHAHDAYLNAVVGTALIKKYPKLESEFVYGDYKVYDVRKMIAKSEQEIGKATAKYFFYSNIMNFFKTEITLANGEIRKRPLIETNGETGEIVWDKGRDFATVRKVLSMPQVNIVKKTEVQTGGFSKESILPKRNSDKLIARKKDWDPKKYGGFDSPTVAYSVLVVAKVEKGKSKKLKSVKELLGITIMERSSFEKNPIDFLEAKGYKEVKKDLIIKLPKYSLFELENGRKRMLASAGELQKGNELALPSKYVNFLYLASHYEKLKGSPEDNEQKQLFVEQHKHYLDEIIEQISEFSKRVILADANLDKVLSAYNKHRDKPIREQAENIIHLFTLTNLGAPAAFKYFDTTIDRKRYTSTKEVLDATLIHQSITGLYETRIDLSQLGGDGGGSSGGTAPLEEEYRLFLEAPIQNVTLLEQWKREIPKVWAEINPPGLASTQAPIHVQLLSTALPVRVRQYPITLEAKRSLRETIRKFRAAGILRPVHSPWNTPLLPVRKSGTSEYRMVQDLREVNKRVETIHPTVPNPYTLLSLLPPDRIWYSVLDLKDAFFCIPLAPESQLIFAFEWADAEEGESGQLTWTRLPQGFKNSPTLFNEALNRDLQGFRLDHPSVSLLQYVDDLLIAADTQAACLSATRDLLMTLAELGYRVSGKKAQLCQEEVTYLGFKIHKGSRSLSNSRTQAILQIPVPKTKRQVREFLGTIGYCRLWIPGFAELAQPLYAATRPGNDPLVWGEKEEEAFQSLKLALTQPPALALPSLDKPFQLFVEETSGAAKGVLTQALGPWKRPVAYLSKRLDPVAAGWPRCLRAIAAAALLTREASKLTFGQDIEITSSHNLESLLRSPPDKWLTNARITQYQVLLLDPPRVRFKQTAALNPATLLPETDDTLPIHHCLDTLDSLTSTRPDLTDQPLAQAEATLFTDGSSYIRDGKRYAGAAVVTLDSVIWAEPLPIGTSAQKAELIALTKALEWSKDKSVNIYTDSRYAFATLHVHGMIYRERGWLTAGGKAIKNAPEILALLTAVWLPKRVAVMHCKGHQKDDAPTSTGNRRADEVAREVAIRPLSTQATISAGKRTADGSEFEKRTADGSEFESPKKKAKVE

SEQ ID NO: 6290 - protein, 2210 aa, synthetic construct
MPAAKRVKLDGGDKKYSIGLDIGTNSVGWAVITDEYKVPSKKFKVLGNTDRHSIKKNLIGALLFDSGETAEATRLKRTARRRYTRRKNRICYLQEIFSNEMAKVDDSFFHRLEESFLVEEDKKHERHPIFGNIVDEVAYHEKYPTIYHLRKKLVDSTDKADLRLIYLALAHMIKFRGHFLIEGDLNPDNSDVDKLFIQLVQTYNQLFEENPINASGVDAKAILSARLSKSRRLENLIAQLPGEKKNGLFGNLIALSLGLTPNFKSNFDLAEDAKLQLSKDTYDDDLDNLLAQIGDQYADLFLAAKNLSDAILLSDILRVNTEITKAPLSASMIKRYDEHHQDLTLLKALVRQQLPEKYKEIFFDQSKNGYAGYIDGGASQEEFYKFIKPILEKMDGTEELLVKLNREDLLRKQRTFDNGSIPHQIHLGELHAILRRQEDFYPFLKDNREKIEKILTFRIPYYVGPLARGNSRFAWMTRKSEETITPWNFEEVVDKGASAQSFIERMTNFDKNLPNEKVLPKHSLLYEYFTVYNELTKVKYVTEGMRKPAFLSGEQKKAIVDLLFKTNRKVTVKQLKEDYFKKIECFDSVEISGVEDRFNASLGTYHDLLKIIKDKDFLDNEENEDILEDIVLTLTLFEDREMIEERLKTYAHLFDDKVMKQLKRRRYTGWGRLSRKLINGIRDKQSGKTILDFLKSDGFANRNFMQLIHDDSLTFKEDIQKAQVSGQGDSLHEHIANLAGSPAIKKGILQTVKVVDELVKVMGRHKPENIVIEMARENQTTQKGQKNSRERMKRIEEGIKELGSQILKEHPVENTQLQNEKLYLYYLQNGRDMYVDQELDINRLSDYDVDHIVPQSFLKDDSIDNKVLTRSDKARGKSDNVPSEEVVKKMKNYWRQLLNAKLITQRKFDNLTKAERGGLSELDKAGFIKRQLVETRQITKHVAQILDSRMNTKYDENDKLIREVKVITLKSKLVSDFRKDFQFYKVREINNYHHAHDAYLNAVVGTALIKKYPKLESEFVYGDYKVYDVRKMIAKSEQEIGKATAKYFFYSNIMNFFKTEITLANGEIRKRPLIETNGETGEIVWDKGRDFATVRKVLSMPQVNIVKKTEVQTGGFSKESILPKRNSDKLIARKKDWDPKKYGGFDSPTVAYSVLVVAKVEKGKSKKLKSVKELLGITIMERSSFEKNPIDFLEAKGYKEVKKDLIIKLPKYSLFELENGRKRMLASAGELQKGNELALPSKYVNFLYLASHYEKLKGSPEDNEQKQLFVEQHKHYLDEIIEQISEFSKRVILADANLDKVLSAYNKHRDKPIREQAENIIHLFTLTNLGAPAAFKYFDTTIDRKRYTSTKEVLDATLIHQSITGLYETRIDLSQLGGDGGGSSGGTLGDQGSRGSDPLPEPRVTLTVEGIPTEFLVNTGAEHSVLTKPMGKMGSKRTVVAGATGSKVYPWTTKRLLKIGQKQVTHSFLVIPECPAPLLGRDLLTKLKAQIQFSTEGPQVTWEDRPAMCLVLNLEEEYRLHEKPVPPSIDPSWLQLFPMVWAEKAGMGLANQVPPVVVELKSDASPVAVRQYPMSKEAREGIRPHIQRFLDLGILVPCQSPWNTPLLPVKKPGTNDYRPVQDLREVNKRVQDIHPTVPNPYNLLSSLPPSHTWYSVLDLKDAFFCLKLHPNSQPLFAFEWRDPEKGNTGQLTWTRLPQGFKNSPTLFNEALHRDLASFRALNPQVVMLQYVDDLLVAAPTYRDCKEGTRRLLQELSKLGYRVSAKKAQLCREEVTYLGYLLKGGKRWLTPARKATVMKIPTPTTPRQVREFLGTAGFCRLWIPGFASLAAPLYPLTRPKVPFTWTEAHQEAFGRIKEALLSAPALALPDLTKPFALYVDEKEGVARGVLTQTLGPWRRPVAYLSKKLDPVASGWPTCLKAIAAVALLLKDADKLTLGQNVLVIAPHNLESIVRQPPDRWMTNARMTHYQSLLLNERVSFAPPAILNPATLLPVESDDTPIHICSEILAEETGTRPDLRDQPLPGVPAWYTDGSSFIMDGRRQAGAAIVDNKRTVWASNLPEGTSAQKAELIALTQALRLAEGKSINIYTDSRYAFATAHVHGAIYKQRGWLTSAGKDIKNKEEILALLEAIHLPKRVAIIHCPGHQRGTDPVATGNRKADEAAKQAAQSTRILTETTKNAGKRTADGSEFEKRTADGSEFESPKKKAKVE

SEQ ID NO: 6291 - protein, 2088 aa, synthetic construct
MPAAKRVKLDGGDKKYSIGLDIGTNSVGWAVITDEYKVPSKKFKVLGNTDRHSIKKNLIGALLFDSGETAEATRLKRTARRRYTRRKNRICYLQEIFSNEMAKVDDSFFHRLEESFLVEEDKKHERHPIFGNIVDEVAYHEKYPTIYHLRKKLVDSTDKADLRLIYLALAHMIKFRGHFLIEGDLNPDNSDVDKLFIQLVQTYNQLFEENPINASGVDAKAILSARLSKSRRLENLIAQLPGEKKNGLFGNLIALSLGLTPNFKSNFDLAEDAKLQLSKDTYDDDLDNLLAQIGDQYADLFLAAKNLSDAILLSDILRVNTEITKAPLSASMIKRYDEHHQDLTLLKALVRQQLPEKYKEIFFDQSKNGYAGYIDGGASQEEFYKFIKPILEKMDGTEELLVKLNREDLLRKQRTFDNGSIPHQIHLGELHAILRRQEDFYPFLKDNREKIEKILTFRIPYYVGPLARGNSRFAWMTRKSEETITPWNFEEVVDKGASAQSFIERMTNFDKNLPNEKVLPKHSLLYEYFTVYNELTKVKYVTEGMRKPAFLSGEQKKAIVDLLFKTNRKVTVKQLKEDYFKKIECFDSVEISGVEDRFNASLGTYHDLLKIIKDKDFLDNEENEDILEDIVLTLTLFEDREMIEERLKTYAHLFDDKVMKQLKRRRYTGWGRLSRKLINGIRDKQSGKTILDFLKSDGFANRNFMQLIHDDSLTFKEDIQKAQVSGQGDSLHEHIANLAGSPAIKKGILQTVKVVDELVKVMGRHKPENIVIEMARENQTTQKGQKNSRERMKRIEEGIKELGSQILKEHPVENTQLQNEKLYLYYLQNGRDMYVDQELDINRLSDYDVDHIVPQSFLKDDSIDNKVLTRSDKARGKSDNVPSEEVVKKMKNYWRQLLNAKLITQRKFDNLTKAERGGLSELDKAGFIKRQLVETRQITKHVAQILDSRMNTKYDENDKLIREVKVITLKSKLVSDFRKDFQFYKVREINNYHHAHDAYLNAVVGTALIKKYPKLESEFVYGDYKVYDVRKMIAKSEQEIGKATAKYFFYSNIMNFFKTEITLANGEIRKRPLIETNGETGEIVWDKGRDFATVRKVLSMPQVNIVKKTEVQTGGFSKESILPKRNSDKLIARKKDWDPKKYGGFDSPTVAYSVLVVAKVEKGKSKKLKSVKELLGITIMERSSFEKNPIDFLEAKGYKEVKKDLIIKLPKYSLFELENGRKRMLASAGELQKGNELALPSKYVNFLYLASHYEKLKGSPEDNEQKQLFVEQHKHYLDEIIEQISEFSKRVILADANLDKVLSAYNKHRDKPIREQAENIIHLFTLTNLGAPAAFKYFDTTIDRKRYTSTKEVLDATLIHQSITGLYETRIDLSQLGGDGGGSSGGTLNLEDEYRLYETSAEPEVSPGSTWLSDFPQAWAETGGMGLAVRQAPLIIPLKATSTPVSIKQYPMSQEAKLGIKPHIQRLLDQGILVPCQSPWNTPLLPVKKPGTNDYRPVQDLREVNKRVEDIHPTVPNPYNLLSGLPPSHRWYTVLDLKDAFFCLRLHPTSQPLFAFEWRDPGMGISGQLTWTRLPQGFKNSPTLFNEALHRDLADFRIQHPDLILLQYVDDILLAATSELDCQQGTRALLLTLGNLGYRASAKKAQLCQKQVKYLGYLLKEGQRWLTEARKETVMGQPTPKTPRQLREFLGKAGFCRLFIPGFAEMAAPLYPLTKPGTLFNWGPDQQKAYQEIKQALLTAPALGLPDLTKPFELFVDEKQGYAKGVLTQKLGPWRRPVAYLSKKLDPVAAGWPPCLRMVAAIAVLRKDAGKLTMGQPLVILAPHAVEALVKQPPDRWLSNARMTHYQAMLLDTDRVQFGPVVALNPATLLPLPEEGAPHDCLEILAETHGTRPDLTDQPIPDADHTWYTDGSSFLQEGQRKAGAAVTTETEVIWARALPAGTSAQRAELIALTQALKMAEGKRLNVYTDSRYAFATAHIHGEIYRRRGWLTSEGREIKNKSEILALLKALFLPKRLSIIHCLGHQKGDSAEARGNRLADQAAREAAIKTPPDTSTLLAGKRTADGSEFEKRTADGSEFESPKKKAKVE

SEQ ID NO: 6292 - protein, 2088 aa, synthetic construct
MPAAKRVKLDGGDKKYSIGLDIGTNSVGWAVITDEYKVPSKKFKVLGNTDRHSIKKNLIGALLFDSGETAEATRLKRTARRRYTRRKNRICYLQEIFSNEMAKVDDSFFHRLEESFLVEEDKKHERHPIFGNIVDEVAYHEKYPTIYHLRKKLVDSTDKADLRLIYLALAHMIKFRGHFLIEGDLNPDNSDVDKLFIQLVQTYNQLFEENPINASGVDAKAILSARLSKSRRLENLIAQLPGEKKNGLFGNLIALSLGLTPNFKSNFDLAEDAKLQLSKDTYDDDLDNLLAQIGDQYADLFLAAKNLSDAILLSDILRVNTEITKAPLSASMIKRYDEHHQDLTLLKALVRQQLPEKYKEIFFDQSKNGYAGYIDGGASQEEFYKFIKPILEKMDGTEELLVKLNREDLLRKQRTFDNGSIPHQIHLGELHAILRRQEDFYPFLKDNREKIEKILTFRIPYYVGPLARGNSRFAWMTRKSEETITPWNFEEVVDKGASAQSFIERMTNFDKNLPNEKVLPKHSLLYEYFTVYNELTKVKYVTEGMRKPAFLSGEQKKAIVDLLFKTNRKVTVKQLKEDYFKKIECFDSVEISGVEDRFNASLGTYHDLLKIIKDKDFLDNEENEDILEDIVLTLTLFEDREMIEERLKTYAHLFDDKVMKQLKRRRYTGWGRLSRKLINGIRDKQSGKTILDFLKSDGFANRNFMQLIHDDSLTFKEDIQKAQVSGQGDSLHEHIANLAGSPAIKKGILQTVKVVDELVKVMGRHKPENIVIEMARENQTTQKGQKNSRERMKRIEEGIKELGSQILKEHPVENTQLQNEKLYLYYLQNGRDMYVDQELDINRLSDYDVDHIVPQSFLKDDSIDNKVLTRSDKARGKSDNVPSEEVVKKMKNYWRQLLNAKLITQRKFDNLTKAERGGLSELDKAGFIKRQLVETRQITKHVAQILDSRMNTKYDENDKLIREVKVITLKSKLVSDFRKDFQFYKVREINNYHHAHDAYLNAVVGTALIKKYPKLESEFVYGDYKVYDVRKMIAKSEQEIGKATAKYFFYSNIMNFFKTEITLANGEIRKRPLIETNGETGEIVWDKGRDFATVRKVLSMPQVNIVKKTEVQTGGFSKESILPKRNSDKLIARKKDWDPKKYGGFDSPTVAYSVLVVAKVEKGKSKKLKSVKELLGITIMERSSFEKNPIDFLEAKGYKEVKKDLIIKLPKYSLFELENGRKRMLASAGELQKGNELALPSKYVNFLYLASHYEKLKGSPEDNEQKQLFVEQHKHYLDEIIEQISEFSKRVILADANLDKVLSAYNKHRDKPIREQAENIIHLFTLTNLGAPAAFKYFDTTIDRKRYTSTKEVLDATLIHQSITGLYETRIDLSQLGGDGGGSSGGTLGIEDEYRLHETSTEPDVSLGSTWLSDFPQAWAETGGMGLAVRQAPLIIPLKATSTPVSIQQYPMSHEARLGIKPHIQRLLDQGILVPCQSPWNTPLLPVKKPGTNDYRPVQDLREVNKRVEDIHPTVPNPYNLLSGLPPSHQWYTVLDLKDAFFCLRLHPTSQPLFAFEWRDPGMGISGQLTWTRLPQGFKNSPTLFNEALHRDLADFRIQHPDLILLQYVDDILLAATSELDCQQGTRALLQTLGDLGYRASAKKAQICQKQVKYLGYLLREGQRWLTEARKETVMGQPVPKTPRQLREFLGTAGFCRLWIPGFAEMAAPLYPLTKPGTLFSWGPDQQKAYQEIKQALLTAPALGLPDLTKPFELFVDEKQGYAKGVLTQKLGPWRRPVAYLSKKLDPVAAGWPPCLRMVAAIAVLTKDAGKLTMGQPLVILAPHAVEALVKQPPDRWLSNARMTHYQAMLLDTDRVQFGPVVALNPATLLPLPEEGAPHDCLEILAETHGTRPDLTDQPIPDADHTWYTDGSSFLQEGQRKAGAAVTTETEVIWAGALPAGTSAQRAELIALTQALKMAEGKRLNVYTDSRYAFATAHIHGEIYRRRGWLTSEGREIKNKSEILALLKALFLPKRLSIIHCLGHQKGDSAEARGNRLADQAAREAAIKTPPDTSTLLAGKRTADGSEFEKRTADGSEFESPKKKAKVE

SEQ ID NO: 6293 - protein, 2080 aa, synthetic construct
MPAAKRVKLDGGDKKYSIGLDIGTNSVGWAVITDEYKVPSKKFKVLGNTDRHSIKKNLIGALLFDSGETAEATRLKRTARRRYTRRKNRICYLQEIFSNEMAKVDDSFFHRLEESFLVEEDKKHERHPIFGNIVDEVAYHEKYPTIYHLRKKLVDSTDKADLRLIYLALAHMIKFRGHFLIEGDLNPDNSDVDKLFIQLVQTYNQLFEENPINASGVDAKAILSARLSKSRRLENLIAQLPGEKKNGLFGNLIALSLGLTPNFKSNFDLAEDAKLQLSKDTYDDDLDNLLAQIGDQYADLFLAAKNLSDAILLSDILRVNTEITKAPLSASMIKRYDEHHQDLTLLKALVRQQLPEKYKEIFFDQSKNGYAGYIDGGASQEEFYKFIKPILEKMDGTEELLVKLNREDLLRKQRTFDNGSIPHQIHLGELHAILRRQEDFYPFLKDNREKIEKILTFRIPYYVGPLARGNSRFAWMTRKSEETITPWNFEEVVDKGASAQSFIERMTNFDKNLPNEKVLPKHSLLYEYFTVYNELTKVKYVTEGMRKPAFLSGEQKKAIVDLLFKTNRKVTVKQLKEDYFKKIECFDSVEISGVEDRFNASLGTYHDLLKIIKDKDFLDNEENEDILEDIVLTLTLFEDREMIEERLKTYAHLFDDKVMKQLKRRRYTGWGRLSRKLINGIRDKQSGKTILDFLKSDGFANRNFMQLIHDDSLTFKEDIQKAQVSGQGDSLHEHIANLAGSPAIKKGILQTVKVVDELVKVMGRHKPENIVIEMARENQTTQKGQKNSRERMKRIEEGIKELGSQILKEHPVENTQLQNEKLYLYYLQNGRDMYVDQELDINRLSDYDVDHIVPQSFLKDDSIDNKVLTRSDKARGKSDNVPSEEVVKKMKNYWRQLLNAKLITQRKFDNLTKAERGGLSELDKAGFIKRQLVETRQITKHVAQILDSRMNTKYDENDKLIREVKVITLKSKLVSDFRKDFQFYKVREINNYHHAHDAYLNAVVGTALIKKYPKLESEFVYGDYKVYDVRKMIAKSEQEIGKATAKYFFYSNIMNFFKTEITLANGEIRKRPLIETNGETGEIVWDKGRDFATVRKVLSMPQVNIVKKTEVQTGGFSKESILPKRNSDKLIARKKDWDPKKYGGFDSPTVAYSVLVVAKVEKGKSKKLKSVKELLGITIMERSSFEKNPIDFLEAKGYKEVKKDLIIKLPKYSLFELENGRKRMLASAGELQKGNELALPSKYVNFLYLASHYEKLKGSPEDNEQKQLFVEQHKHYLDEIIEQISEFSKRVILADANLDKVLSAYNKHRDKPIREQAENIIHLFTLTNLGAPAAFKYFDTTIDRKRYTSTKEVLDATLIHQSITGLYETRIDLSQLGGDGGGSSGGLDDEYRLYSPLVKPDQNIQFWLEQFPQAWAETAGMGLAKQVPPQVIQLKASATPVSVRQYPLSKEAQEGIRPHVQRLIQQGILVPVQSPWNTPLLPVRKPGTNDYRPVQDLREVNKRVQDIHPTVPNPYNLLCALPPQRSWYTVLDLKDAFFCLRLHPTSQPLFAFEWRDPGTGRTGQLTWTRLPQGFKNSPTIFNEALHRDLANFRIQHPQVTLLQYVDDLLLAGATKQDCLEGTKALLLELSDLGYRASAKKAQICRREVTYLGYSLRDGQRWLTEARKKTVVQIPAPTTAKQVREFLGKAGFCRLFIPGFATLAAPLYPLTKPKGEFSWAPEHQKAFDAIKKALLSAPALALPDVTKPFTLYVDERKGVARGVLTQTLGPWRRPVAYLSKKLDPVASGWPVCLKAIAAVAILVKDADKLTLGQNITVIAPHALENIVRQPPDRWMTNARMTHYQSLLLTERVTFAPPAALNPATLLPEETDEPVTHDCHQLLIEETGVRKDLTDIPLTGEVLTWFTDGSSYVVEGKRMAGAAVVDGTRTIWASSLPEGTSAQKAELMALTQALRLAEGKSINIYTDSRYAFATAHVHGAIYKQRGWLTSAGREIKNKEEILSLLEALHLPKRLAIIHCPGHQKAKDPISRGNQMADRVAKQAAQGVNLLPAGKRTADGSEFEKRTADGSEFESPKKKAKVE

SEQ ID NO: 6294 - protein, 2080 aa, synthetic construct; identical to SEQ ID NO: 6293

SEQ ID NO: 6295 - protein, 2168 aa, synthetic construct
MPAAKRVKLDGGDKKYSIGLDIGTNSVGWAVITDEYKVPSKKFKVLGNTDRHSIKKNLIGALLFDSGETAEATRLKRTARRRYTRRKNRICYLQEIFSNEMAKVDDSFFHRLEESFLVEEDKKHERHPIFGNIVDEVAYHEKYPTIYHLRKKLVDSTDKADLRLIYLALAHMIKFRGHFLIEGDLNPDNSDVDKLFIQLVQTYNQLFEENPINASGVDAKAILSARLSKSRRLENLIAQLPGEKKNGLFGNLIALSLGLTPNFKSNFDLAEDAKLQLSKDTYDDDLDNLLAQIGDQYADLFLAAKNLSDAILLSDILRVNTEITKAPLSASMIKRYDEHHQDLTLLKALVRQQLPEKYKEIFFDQSKNGYAGYIDGGASQEEFYKFIKPILEKMDGTEELLVKLNREDLLRKQRTFDNGSIPHQIHLGELHAILRRQEDFYPFLKDNREKIEKILTFRIPYYVGPLARGNSRFAWMTRKSEETITPWNFEEVVDKGASAQSFIERMTNFDKNLPNEKVLPKHSLLYEYFTVYNELTKVKYVTEGMRKPAFLSGEQKKAIVDLLFKTNRKVTVKQLKEDYFKKIECFDSVEISGVEDRFNASLGTYHDLLKIIKDKDFLDNEENEDILEDIVLTLTLFEDREMIEERLKTYAHLFDDKVMKQLKRRRYTGWGRLSRKLINGIRDKQSGKTILDFLKSDGFANRNFMQLIHDDSLTFKEDIQKAQVSGQGDSLHEHIANLAGSPAIKKGILQTVKVVDELVKVMGRHKPENIVIEMARENQTTQKGQKNSRERMKRIEEGIKELGSQILKEHPVENTQLQNEKLYLYYLQNGRDMYVDQELDINRLSDYDVDHIVPQSFLKDDSIDNKVLTRSDKARGKSDNVPSEEVVKKMKNYWRQLLNAKLITQRKFDNLTKAERGGLSELDKAGFIKRQLVETRQITKHVAQILDSRMNTKYDENDKLIREVKVITLKSKLVSDFRKDFQFYKVREINNYHHAHDAYLNAVVGTALIKKYPKLESEFVYGDYKVYDVRKMIAKSEQEIGKATAKYFFYSNIMNFFKTEITLANGEIRKRPLIETNGETGEIVWDKGRDFATVRKVLSMPQVNIVKKTEVQTGGFSKESILPKRNSDKLIARKKDWDPKKYGGFDSPTVAYSVLVVAKVEKGKSKKLKSVKELLGITIMERSSFEKNPIDFLEAKGYKEVKKDLIIKLPKYSLFELENGRKRMLASAGELQKGNELALPSKYVNFLYLASHYEKLKGSPEDNEQKQLFVEQHKHYLDEIIEQISEFSKRVILADANLDKVLSAYNKHRDKPIREQAENIIHLFTLTNLGAPAAFKYFDTTIDRKRYTSTKEVLDATLIHQSITGLYETRIDLSQLGGDGGGSSGGMDPLQLLQPLEAEIKGTKLKAHWNSGATITCVPQAFLEEEVPIKNIWIKTIHGEKEQPVYYLTFKIQGRKVEAEVISSPYDYILVSPSDIPWLMKKPLQLTTLVPLQEYEERLLKQTMLTGSYKEKLQSLFLKYDALWQHWENQVGHRRIKPHHIATGTVNPRPQKQYPINPKAKASIQTVINDLLKQGVLIQQNSIMNTPVYPVPKPDGKWRMVLDYREVNKTIPLIAAQNQHSAGILSSIFRGKYKTTLDLSNGFWAHSITPESYWLTAFTWLGQQYCWTRLPQGFLNSPALFNADVVDLLKEVPNVQVYVDDIYISHDDPREHLEQLEKVFSLLLNAGYVVSLKKSEIAQHEVEFLGFNITKEGRGLTETFKQKLLNITPPRDLKQLQSILGLLNFARNFIPNFSELVKPLYNIIATAPGKYITWTTDNSQQLQNIISMLNSAENLEERNPEVRLIMKVNTSPSAGYIRFYNEFAKRPIMYLNYVYTKAEVKFTNTEKLLTTIHKGLIKALDLGMGQEILVYSPIVSMTKIQKTPLPERKALPIRWITWMSYLEDPRIQFHYDKTLPELQQVPTVTDDIIAKIKHPSEFSMVFYTDGSAIKHPNVNKSHNAGMGIAQVQFKPEFTVINTWSIPLGDHTAQLAEVAAVEFACKKALKIDGPVLIVTDSFYVAESVNKELPYWQSNGFFNNKKKPLKHVSKWKSIADCIQLKPDIIIIHEKGHQPTASTFHTEGNNLADKLATQGSYVVNAGKRTADGSEFEKRTADGSEFESPKKKAKVE

SEQ ID NO: 6296 - protein, 2079 aa, synthetic construct
MPAAKRVKLDGGDKKYSIGLDIGTNSVGWAVITDEYKVPSKKFKVLGNTDRHSIKKNLIGALLFDSGETAEATRLKRTARRRYTRRKNRICYLQEIFSNEMAKVDDSFFHRLEESFLVEEDKKHERHPIFGNIVDEVAYHEKYPTIYHLRKKLVDSTDKADLRLIYLALAHMIKFRGHFLIEGDLNPDNSDVDKLFIQLVQTYNQLFEENPINASGVDAKAILSARLSKSRRLENLIAQLPGEKKNGLFGNLIALSLGLTPNFKSNFDLAEDAKLQLSKDTYDDDLDNLLAQIGDQYADLFLAAKNLSDAILLSDILRVNTEITKAPLSASMIKRYDEHHQDLTLLKALVRQQLPEKYKEIFFDQSKNGYAGYIDGGASQEEFYKFIKPILEKMDGTEELLVKLNREDLLRKQRTFDNGSIPHQIHLGELHAILRRQEDFYPFLKDNREKIEKILTFRIPYYVGPLARGNSRFAWMTRKSEETITPWNFEEVVDKGASAQSFIERMTNFDKNLPNEKVLPKHSLLYEYFTVYNELTKVKYVTEGMRKPAFLSGEQKKAIVDLLFKTNRKVTVKQLKEDYFKKIECFDSVEISGVEDRFNASLGTYHDLLKIIKDKDFLDNEENEDILEDIVLTLTLFEDREMIEERLKTYAHLFDDKVMKQLKRRRYTGWGRLSRKLINGIRDKQSGKTILDFLKSDGFANRNFMQLIHDDSLTFKEDIQKAQVSGQGDSLHEHIANLAGSPAIKKGILQTVKVVDELVKVMGRHKPENIVIEMARENQTTQKGQKNSRERMKRIEEGIKELGSQILKEHPVENTQLQNEKLYLYYLQNGRDMYVDQELDINRLSDYDVDHIVPQSFLKDDSIDNKVLTRSDKARGKSDNVPSEEVVKKMKNYWRQLLNAKLITQRKFDNLTKAERGGLSELDKAGFIKRQLVETRQITKHVAQILDSRMNTKYDENDKLIREVKVITLKSKLVSDFRKDFQFYKVREINNYHHAHDAYLNAVVGTALIKKYPKLESEFVYGDYKVYDVRKMIAKSEQEIGKATAKYFFYSNIMNFFKTEITLANGEIRKRPLIETNGETGEIVWDKGRDFATVRKVLSMPQVNIVKKTEVQTGGFSKESILPKRNSDKLIARKKDWDPKKYGGFDSPTVAYSVLVVAKVEKGKSKKLKSVKELLGITIMERSSFEKNPIDFLEAKGYKEVKKDLIIKLPKYSLFELENGRKRMLASAGELQKGNELALPSKYVNFLYLASHYEKLKGSPEDNEQKQLFVEQHKHYLDEIIEQISEFSKRVILADANLDKVLSAYNKHRDKPIREQAENIIHLFTLTNLGAPAAFKYFDTTIDRKRYTSTKEVLDATLIHQSITGLYETRIDLSQLGGDGGGSSGGVPWLTQQPLQLTILVPLQEYQDRILNKTALPEEQKQQLKALFTKYDNLWQHWENQVGHRKIRPHNIATGDYPPRPQKQYPINPKAKPSIQIVIDDLLKQGVLTPQNSTMNTPVYPVPKPDGRWRMVLDYREVNKTIPLTAAQNQHSAGILATIVRQKYKTTLDLANGFWAHPITPDSYWLTAFTWQGKQYCWTRLPQGFLNSPALFTADAVDLLKEVPNVQVYVDDIYLSHDNPHEHIQQLEKVFQILLQAGYVVSLKKSEIGQRTVEFLGFNITKEGRGLTDTFKTKLLNVTPPKDLKQLQSILGLLNFARNFIPNFAELVQTLYNLIASSKGKYIEWTEDNTKQLNKVIEALNTASNLEERLPDQRLVIKVNTSPSAGYVRYYNESGKKPIMYLNYVFSKAELKFSMLEKLLTTMHKALIKAMDLAMGQEILVYSPIVSMTKIQKTPLPERKALPIRWITWMTYLEDPRIQFHYDKTLPELKHIPDVYTSSIPPLKHPSQYEGVFCTDGSAIKSPDPTKSNNAGMGIVHAIYNPEYKILNQWSIPLGHHTAQMAEIAAVEFACKKALKVPGPVLVITDSFYVAESANKELPYWKSNGFVNNKKEPLKHISKWKSIAECLSIKPDITIQHEKGHQPINTSIHTEGNALADKLATQGSYVVNAGKRTADGSEFEKRTADGSEFESPKKKAKVE

SEQ ID NO: 6297 - protein, 2088 aa, synthetic construct
MPAAKRVKLDGGDKKYSIGLDIGTNSVGWAVITDEYKVPSKKFKVLGNTDRHSIKKNLIGALLFDSGETAEATRLKRTARRRYTRRKNRICYLQEIFSNEMAKVDDSFFHRLEESFLVEEDKKHERHPIFGNIVDEVAYHEKYPTIYHLRKKLVDSTDKADLRLIYLALAHMIKFRGHFLIEGDLNPDNSDVDKLFIQLVQTYNQLFEENPINASGVDAKAILSARLSKSRRLENLIAQLPGEKKNGLFGNLIALSLGLTPNFKSNFDLAEDAKLQLSKDTYDDDLDNLLAQIGDQYADLFLAAKNLSDAILLSDILRVNTEITKAPLSASMIKRYDEHHQDLTLLKALVRQQLPEKYKEIFFDQSKNGYAGYIDGGASQEEFYKFIKPILEKMDGTEELLVKLNREDLLRKQRTFDNGSIPHQIHLGELHAILRRQEDFYPFLKDNREKIEKILTFRIPYYVGPLARGNSRFAWMTRKSEETITPWNFEEVVDKGASAQSFIERMTNFDKNLPNEKVLPKHSLLYEYFTVYNELTKVKYVTEGMRKPAFLSGEQKKAIVDLLFKTNRKVTVKQLKEDYFKKIECFDSVEISGVEDRFNASLGTYHDLLKIIKDKDFLDNEENEDILEDIVLTLTLFEDREMIEERLKTYAHLFDDKVMKQLKRRRYTGWGRLSRKLINGIRDKQSGKTILDFLKSDGFANRNFMQLIHDDSLTFKEDIQKAQVSGQGDSLHEHIANLAGSPAIKKGILQTVKVVDELVKVMGRHKPENIVIEMARENQTTQKGQKNSRERMKRIEEGIKELGSQILKEHPVENTQLQNEKLYLYYLQNGRDMYVDQELDINRLSDYDVDHIVPQSFLKDDSIDNKVLTRSDKARGKSDNVPSEEVVKKMKNYWRQLLNAKLITQRKFDNLTKAERGGLSELDKAGFIKRQLVETRQITKHVAQILDSRMNTKYDENDKLIREVKVITLKSKLVSDFRKDFQFYKVREINNYHHAHDAYLNAVVGTALIKKYPKLESEFVYGDYKVYDVRKMIAKSEQEIGKATAKYFFYSNIMNFFKTEITLANGEIRKRPLIETNGETGEIVWDKGRDFATVRKVLSMPQVNIVKKTEVQTGGFSKESILPKRNSDKLIARKKDWDPKKYGGFDSPTVAYSVLVVAKVEKGKSKKLKSVKELLGITIMERSSFEKNPIDFLEAKGYKEVKKDLIIKLPKYSLFELENGRKRMLASAGELQKGNELALPSKYVNFLYLASHYEKLKGSPEDNEQKQLFVEQHKHYLDEIIEQISEFSKRVILADANLDKVLSAYNKHRDKPIREQAENIIHLFTLTNLGAPAAFKYFDTTIDRKRYTSTKEVLDATLIHQSITGLYETRIDLSQLGGDGGGSSGGTLNIEDEYRLHETSKEPDVPLGSTWLSDFPQAWAETGGMGLAVRQAPLIIPLKATSTPVSIKQYPMSQEARLGIKPHIQRLLDQGILVPCQSPWNTPLLPVKKPGTNDYRPVQDLREVNKRVEDIHPTVPNPYNLLSGLPPSHQWYTVLDLKDAFFCLRLHPTSQPLFAFEWRDPEMGISGQLTWTRLPQGFKNSPTLFNEALHRDLADFRIQHPDLILLQYVDDLLLAATSEQDCQRGTRALLQTLGNLGYRASAKKAQICQKQVKYLGYLLKEGQRWLTEARKETVMGQPTPKTPRQLREFLGTAGFCRLWIPGFAEMAAPLYPLTKPGTLFNWGPDQQKAYQEIKQALLTAPALGLPDLTKPFELFVDEKQGYAKGVLTQKLGPWRRPVAYLSKKLDPVAAGWPPCLRMVAAIAVLTKDAGKLTMGQPLVILAPHAVEALVKQPPDRWLSNARMTHYQAMLLDTDRVQFGPVVALNPATLLPLPEKEAPHDCLEILAETHGTRPDLTDQPIPDADYTWYTDGSSFLQEGQRRAGAAVTTETEVIWARALPAGTSAQRAELIALTQALKMAEGKKLNVYTDSRYAFATAHVHGEIYRRRGWLTSEGREIKNKNEILALLKALFLPKRLSIIHCPGHQKGNSAEARGNRMADQAAREAAMKAVLETSTLLAGKRTADGSEFEKRTADGSEFESPKKKAKVE

SEQ ID NO: 6298 - protein, 2089 aa, synthetic construct
MPAAKRVKLDGGDKKYSIGLDIGTNSVGWAVITDEYKVPSKKFKVLGNTDRHSIKKNLIGALLFDSGETAEATRLKRTARRRYTRRKNRICYLQEIFSNEMAKVDDSFFHRLEESFLVEEDKKHERHPIFGNIVDEVAYHEKYPTIYHLRKKLVDSTDKADLRLIYLALAHMIKFRGHFLIEGDLNPDNSDVDKLFIQLVQTYNQLFEENPINASGVDAKAILSARLSKSRRLENLIAQLPGEKKNGLFGNLIALSLGLTPNFKSNFDLAEDAKLQLSKDTYDDDLDNLLAQIGDQYADLFLAAKNLSDAILLSDILRVNTEITKAPLSASMIKRYDEHHQDLTLLKALVRQQLPEKYKEIFFDQSKNGYAGYIDGGASQEEFYKFIKPILEKMDGTEELLVKLNREDLLRKQRTFDNGSIPHQIHLGELHAILRRQEDFYPFLKDNREKIEKILTFRIPYYVGPLARGNSRFAWMTRKSEETITPWNFEEVVDKGASAQSFIERMTNFDKNLPNEKVLPKHSLLYEYFTVYNELTKVKYVTEGMRKPAFLSGEQKKAIVDLLFKTNRKVTVKQLKEDYFKKIECFDSVEISGVEDRFNASLGTYHDLLKIIKDKDFLDNEENEDILEDIVLTLTLFEDREMIEERLKTYAHLFDDKVMKQLKRRRYTGWGRLSRKLINGIRDKQSGKTILDFLKSDGFANRNFMQLIHDDSLTFKEDIQKAQVSGQGDSLHEHIANLAGSPAIKKGILQTVKVVDELVKVMGRHKPENIVIEMARENQTTQKGQKNSRERMKRIEEGIKELGSQILKEHPVENTQLQNEKLYLYYLQNGRDMYVDQELDINRLSDYDVDHIVPQSFLKDDSIDNKVLTRSDKARGKSDNVPSEEVVKKMKNYWRQLLNAKLITQRKFDNLTKAERGGLSELDKAGFIKRQLVETRQITKHVAQILDSRMNTKYDENDKLIREVKVITLKSKLVSDFRKDFQFYKVREINNYHHAHDAYLNAVVGTALIKKYPKLESEFVYGDYKVYDVRKMIAKSEQEIGKATAKYFFYSNIMNFFKTEITLANGEIRKRPLIETNGETGEIVWDKGRDFATVRKVLSMPQVNIVKKTEVQTGGFSKESILPKRNSDKLIARKKDWDPKKYGGFDSPTVAYSVLVVAKVEKGKSKKLKSVKELLGITIMERSSFEKNPIDFLEAKGYKEVKKDLIIKLPKYSLFELENGRKRMLASAGELQKGNELALPSKYVNFLYLASHYEKLKGSPEDNEQKQLFVEQHKHYLDEIIEQISEFSKRVILADANLDKVLSAYNKHRDKPIREQAENIIHLFTLTNLGAPAAFKYFDTTIDRKRYTSTKEVLDATLIHQSITGLYETRIDLSQLGGDGGGSSGSSGGVLNLEEEYRLHEKPVPSSIDPSWLQLFPTVWAERAGMGLANQVPPVVVELRSGASPVAVRQYPMSKEAREGIRPHIQKFLDLGVLVPCRSPWNTPLLPVKKPGTNDYRPVQDLREINKRVQDIHPTVPNPYNLLSSLPPSYTWYSVLDLKDAFFCLRLHPNSQPLFAFEWKDPEKGNTGQLTWTRLPQGFKNSPTLFDEALHRDLAPFRALNPQVVLLQYVDDLLVAAPTYEDCKKGTQKLLQELSKLGYRVSAKKAQLCQREVTYLGYLLKEGKRWLTPARKATVMKIPVPTTPRQVREFLGTAGFCRLWIPGFASLAAPLYPLTKESIPFIWTEEHQQAFDHIKKALLSAPALALPDLTKPFTLYIDERAGVARGVLTQTLGPWRRPVAYLSKKLDPVASGWPTCLKAVAAVALLLKDADKLTLGQNVTVIASHSLESIVRQPPDRWMTNARMTHYQSLLLNERVSFAPPAVLNPATLLPVESEATPVHRCSEILAEETGTRRDLEDQPLPGVPTWYTDGSSFITEGKRRAGAPIVDGKRTVWASSLPEGTSAQKAELVALTQALRLAEGKNINIYTDSRYAFATAHIHGAIYKQRGLLTSAGKDIKNKEEILALLEAIHLPRRVAIIHCPGHQRGSNPVATGNRRADEAAKQAALSTRVLAGTTKPAGKRTADGSEFEKRTADGSEFESPKKKAKVE

SEQ ID NO: 6299 - protein, 2213 aa, synthetic construct
MPAAKRVKLDGGDKKYSIGLDIGTNSVGWAVITDEYKVPSKKFKVLGNTDRHSIKKNLIGALLFDSGETAEATRLKRTARRRYTRRKNRICYLQEIFSNEMAKVDDSFFHRLEESFLVEEDKKHERHPIFGNIVDEVAYHEKYPTIYHLRKKLVDSTDKADLRLIYLALAHMIKFRGHFLIEGDLNPDNSDVDKLFIQLVQTYNQLFEENPINASGVDAKAILSARLSKSRRLENLIAQLPGEKKNGLFGNLIALSLGLTPNFKSNFDLAEDAKLQLSKDTYDDDLDNLLAQIGDQYADLFLAAKNLSDAILLSDILRVNTEITKAPLSASMIKRYDEHHQDLTLLKALVRQQLPEKYKEIFFDQSKNGYAGYIDGGASQEEFYKFIKPILEKMDGTEELLVKLNREDLLRKQRTFDNGSIPHQIHLGELHAILRRQEDFYPFLKDNREKIEKILTFRIPYYVGPLARGNSRFAWMTRKSEETITPWNFEEVVDKGASAQSFIERMTNFDKNLPNEKVLPKHSLLYEYFTVYNELTKVKYVTEGMRKPAFLSGEQKKAIVDLLFKTNRKVTVKQLKEDYFKKIECFDSVEISGVEDRFNASLGTYHDLLKIIKDKDFLDNEENEDILEDIVLTLTLFEDREMIEERLKTYAHLFDDKVMKQLKRRRYTGWGRLSRKLINGIRDKQSGKTILDFLKSDGFANRNFMQLIHDDSLTFKEDIQKAQVSGQGDSLHEHIANLAGSPAIKKGILQTVKVVDELVKVMGRHKPENIVIEMARENQTTQKGQKNSRERMKRIEEGIKELGSQILKEHPVENTQLQNEKLYLYYLQNGRDMYVDQELDINRLSDYDVDHIVPQSFLKDDSIDNKVLTRSDKARGKSDNVPSEEVVKKMKNYWRQLLNAKLITQRKFDNLTKAERGGLSELDKAGFIKRQLVETRQITKHVAQILDSRMNTKYDENDKLIREVKVITLKSKLVSDFRKDFQFYKVREINNYHHAHDAYLNAVVGTALIKKYPKLESEFVYGDYKVYDVRKMIAKSEQEIGKATAKYFFYSNIMNFFKTEITLANGEIRKRPLIETNGETGEIVWDKGRDFATVRKVLSMPQVNIVKKTEVQTGGFSKESILPKRNSDKLIARKKDWDPKKYGGFDSPTVAYSVLVVAKVEKGKSKKLKSVKELLGITIMERSSFEKNPIDFLEAKGYKEVKKDLIIKLPKYSLFELENGRKRMLASAGELQKGNELALPSKYVNFLYLASHYEKLKGSPEDNEQKQLFVEQHKHYLDEIIEQISEFSKRVILADANLDKVLSAYNKHRDKPIREQAENIIHLFTLTNLGAPAAFKYFDTTIDRKRYTSTKEVLDATLIHQSITGLYETRIDLSQLGGDGGGSSGSSGGTLGDQGSRGSDPLPEPRVTLTVEGIPTEFLVNTGAEHSVLTKPMGKMGSKRTVVAGATGSKVYPWTTKRLLKIGQKQVTHSFLVIPECPAPLLGRDLLTKLKAQIQFSTEGPQVTWEDRPAMCLVLNLEEEYRLHEKPVPPSIDPSWLQLFPMVWAEKAGMGLANQVPPVVVELKSDASPVAVRQYPMSKEAREGIRPHIQRFLDLGILVPCQSPWNTPLLPVKKPGTNDYRPVQDLREVNKRVQDIHPTVPNPYNLLSSLPPSHTWYSVLDLKDAFFCLKLHPNSQPLFAFEWRDPEKGNTGQLTWTRLPQGFKNSPTLFNEALHRDLASFRALNPQVVMLQYVDDLLVAAPTYRDCKEGTRRLLQELSKLGYRVSAKKAQLCREEVTYLGYLLKGGKRWLTPARKATVMKIPTPTTPRQVREFLGTAGFCRLWIPGFASLAAPLYPLTRPKVPFTWTEAHQEAFGRIKEALLSAPALALPDLTKPFALYVDEKEGVARGVLTQTLGPWRRPVAYLSKKLDPVASGWPTCLKAIAAVALLLKDADKLTLGQNVLVIAPHNLESIVRQPPDRWMTNARMTHYQSLLLNERVSFAPPAILNPATLLPVESDDTPIHICSEILAEETGTRPDLRDQPLPGVPAWYTDGSSFIMDGRRQAGAAIVDNKRTVWASNLPEGTSAQKAELIALTQALRLAEGKSINIYTDSRYAFATAHVHGAIYKQRGWLTSAGKDIKNKEEILALLEAIHLPKRVAIIHCPGHQRGTDPVATGNRKADEAAKQAAQSTRILTETTKNAGKRTADGSEFEKRTADGSEFESPKKKAKVE

SEQ ID NO: 6300 - protein, 2091 aa, synthetic construct
MPAAKRVKLDGGDKKYSIGLDIGTNSVGWAVITDEYKVPSKKFKVLGNTDRHSIKKNLIGALLFDSGETAEATRLKRTARRRYTRRKNRICYLQEIFSNEMAKVDDSFFHRLEESFLVEEDKKHERHPIFGNIVDEVAYHEKYPTIYHLRKKLVDSTDKADLRLIYLALAHMIKFRGHFLIEGDLNPDNSDVDKLFIQLVQTYNQLFEENPINASGVDAKAILSARLSKSRRLENLIAQLPGEKKNGLFGNLIALSLGLTPNFKSNFDLAEDAKLQLSKDTYDDDLDNLLAQIGDQYADLFLAAKNLSDAILLSDILRVNTEITKAPLSASMIKRYDEHHQDLTLLKALVRQQLPEKYKEIFFDQSKNGYAGYIDGGASQEEFYKFIKPILEKMDGTEELLVKLNREDLLRKQRTFDNGSIPHQIHLGELHAILRRQEDFYPFLKDNREKIEKILTFRIPYYVGPLARGNSRFAWMTRKSEETITPWNFEEVVDKGASAQSFIERMTNFDKNLPNEKVLPKHSLLYEYFTVYNELTKVKYVTEGMRKPAFLSGEQKKAIVDLLFKTNRKVTVKQLKEDYFKKIECFDSVEISGVEDRFNASLGTYHDLLKIIKDKDFLDNEENEDILEDIVLTLTLFEDREMIEERLKTYAHLFDDKVMKQLKRRRYTGWGRLSRKLINGIRDKQSGKTILDFLKSDGFANRNFMQLIHDDSLTFKEDIQKAQVSGQGDSLHEHIANLAGSPAIKKGILQTVKVVDELVKVMGRHKPENIVIEMARENQTTQKGQKNSRERMKRIEEGIKELGSQILKEHPVENTQLQNEKLYLYYLQNGRDMYVDQELDINRLSDYDVDHIVPQSFLKDDSIDNKVLTRSDKARGKSDNVPSEEVVKKMKNYWRQLLNAKLITQRKFDNLTKAERGGLSELDKAGFIKRQLVETRQITKHVAQILDSRMNTKYDENDKLIREVKVITLKSKLVSDFRKDFQFYKVREINNYHHAHDAYLNAVVGTALIKKYPKLESEFVYGDYKVYDVRKMIAKSEQEIGKATAKYFFYSNIMNFFKTEITLANGEIRKRPLIETNGETGEIVWDKGRDFATVRKVLSMPQVNIVKKTEVQTGGFSKESILPKRNSDKLIARKKDWDPKKYGGFDSPTVAYSVLVVAKVEKGKSKKLKSVKELLGITIMERSSFEKNPIDFLEAKGYKEVKKDLIIKLPKYSLFELENGRKRMLASAGELQKGNELALPSKYVNFLYLASHYEKLKGSPEDNEQKQLFVEQHKHYLDEIIEQISEFSKRVILADANLDKVLSAYNKHRDKPIREQAENIIHLFTLTNLGAPAAFKYFDTTIDRKRYTSTKEVLDATLIHQSITGLYETRIDLSQLGGDGGGSSGSSGGTLGIEDEYRLHETSTEPDVSLGSTWLSDFPQAWAETGGMGLAVRQAPLIIPLKATSTPVSIQQYPMSHEARLGIKPHIQRLLDQGILVPCQSPWNTPLLPVKKPGTNDYRPVQDLREVNKRVEDIHPTVPNPYNLLSGLPPSHQWYTVLDLKDAFFCLRLHPTSQPLFAFEWRDPGMGISGQLTWTRLPQGFKNSPTLFNEALHRDLADFRIQHPDLILLQYVDDILLAATSELDCQQGTRALLQTLGDLGYRASAKKAQICQKQVKYLGYLLREGQRWLTEARKETVMGQPVPKTPRQLREFLGTAGFCRLWIPGFAEMAAPLYPLTKPGTLFSWGPDQQKAYQEIKQALLTAPALGLPDLTKPFELFVDEKQGYAKGVLTQKLGPWRRPVAYLSKKLDPVAAGWPPCLRMVAAIAVLTKDAGKLTMGQPLVILAPHAVEALVKQPPDRWLSNARMTHYQAMLLDTDRVQFGPVVALNPATLLPLPEEGAPHDCLEILAETHGTRPDLTDQPIPDADHTWYTDGSSFLQEGQRKAGAAVTTETEVIWAGALPAGTSAQRAELIALTQALKMAEGKRLNVYTDSRYAFATAHIHGEIYRRRGWLTSEGREIKNKSEILALLKALFLPKRLSIIHCLGHQKGDSAEARGNRLADQAAREAAIKTPPDTSTLLAGKRTADGSEFEKRTADGSEFESPKKKAKVE

SEQ ID NO: 6301 - protein, 2091 aa, synthetic construct
MPAAKRVKLDGGDKKYSIGLDIGTNSVGWAVITDEYKVPSKKFKVLGNTDRHSIKKNLIGALLFDSGETAEATRLKRTARRRYTRRKNRICYLQEIFSNEMAKVDDSFFHRLEESFLVEEDKKHERHPIFGNIVDEVAYHEKYPTIYHLRKKLVDSTDKADLRLIYLALAHMIKFRGHFLIEGDLNPDNSDVDKLFIQLVQTYNQLFEENPINASGVDAKAILSARLSKSRRLENLIAQLPGEKKNGLFGNLIALSLGLTPNFKSNFDLAEDAKLQLSKDTYDDDLDNLLAQIGDQYADLFLAAKNLSDAILLSDILRVNTEITKAPLSASMIKRYDEHHQDLTLLKALVRQQLPEKYKEIFFDQSKNGYAGYIDGGASQEEFYKFIKPILEKMDGTEELLVKLNREDLLRKQRTFDNGSIPHQIHLGELHAILRRQEDFYPFLKDNREKIEKILTFRIPYYVGPLARGNSRFAWMTRKSEETITPWNFEEVVDKGASAQSFIERMTNFDKNLPNEKVLPKHSLLYEYFTVYNELTKVKYVTEGMRKPAFLSGEQKKAIVDLLFKTNRKVTVKQLKEDYFKKIECFDSVEISGVEDRFNASLGTYHDLLKIIKDKDFLDNEENEDILEDIVLTLTLFEDREMIEERLKTYAHLFDDKVMKQLKRRRYTGWGRLSRKLINGIRDKQSGKTILDFLKSDGFANRNFMQLIHDDSLTFKEDIQKAQVSGQGDSLHEHIANLAGSPAIKKGILQTVKVVDELVKVMGRHKPENIVIEMARENQTTQKGQKNSRERMKRIEEGIKELGSQILKEHPVENTQLQNEKLYLYYLQNGRDMYVDQELDINRLSDYDVDHIVPQSFLKDDSIDNKVLTRSDKARGKSDNVPSEEVVKKMKNYWRQLLNAKLITQRKFDNLTKAERGGLSELDKAGFIKRQLVETRQITKHVAQILDSRMNTKYDENDKLIREVKVITLKSKLVSDFRKDFQFYKVREINNYHHAHDAYLNAVVGTALIKKYPKLESEFVYGDYKVYDVRKMIAKSEQEIGKATAKYFFYSNIMNFFKTEITLANGEIRKRPLIETNGETGEIVWDKGRDFATVRKVLSMPQVNIVKKTEVQTGGFSKESILPKRNSDKLIARKKDWDPKKYGGFDSPTVAYSVLVVAKVEKGKSKKLKSVKELLGITIMERSSFEKNPIDFLEAKGYKEVKKDLIIKLPKYSLFELENGRKRMLASAGELQKGNELALPSKYVNFLYLASHYEKLKGSPEDNEQKQLFVEQHKHYLDEIIEQISEFSKRVILADANLDKVLSAYNKHRDKPIREQAENIIHLFTLTNLGAPAAFKYFDTTIDRKRYTSTKEVLDATLIHQSITGLYETRIDLSQLGGDGGGSSGSSGGTLNIEDEHRLHETSKEPDVSLGSTWLSDFPQAWAETGGMGLAVRQAPLIIPLKATSTPVSIKQYPMSQEARLGIKPHIQRLLDQGILVPCQSPWNTPLLPVKKPGTNDYRPVQDLREVNKRVEDIHPTVPNPYNLLSGLPPSHQWYTVLDLKDAFFCLRLHPTSQPLFAFEWRDPEMGISGQLTWTRLPQGFKNSPTLFDEALHRDLADFRIQHPDLILLQYVDDLLLAATSELDCQQGTRALLQTLGNLGYRASAKKAQICQKQVKYLGYLLKEGQRWLTEARKETVMGQPTPKTPRQLREFLGTAGFCRLWIPGFAEMAAPLYPLTKTGTLFNWGPDQQKAYQEIKQALLTAPALGLPDLTKPFELFVDEKQGYAKGVLTQKLGPWRRPVAYLSKKLDPVAAGWPPCLRMVAAIAVLTKDAGKLTMGQPLVILAPHAVEALVKQPPDRWLSNARMTHYQALLLDTDRVQFGPVVALNPATLLPLPEEGLQHNCLDILAEAHGTRPDLTDQPLPDADHTWYTDGSSLLQEGQRKAGAAVTTETEVIWAKALPAGTSAQRAELIALTQALKMAEGKKLNVYTDSRYAFATAHIHGEIYRRRGLLTSEGKEIKNKDEILALLKALFLPKRLSIIHCPGHQKGHSAEARGNRMADQAARKAAITETPDTSTLLAGKRTADGSEFEKRTADGSEFESPKKKAKVE

SEQ ID NO: 6302 - protein, 2089 aa, synthetic construct
MPAAKRVKLDGGDKKYSIGLDIGTNSVGWAVITDEYKVPSKKFKVLGNTDRHSIKKNLIGALLFDSGETAEATRLKRTARRRYTRRKNRICYLQEIFSNEMAKVDDSFFHRLEESFLVEEDKKHERHPIFGNIVDEVAYHEKYPTIYHLRKKLVDSTDKADLRLIYLALAHMIKFRGHFLIEGDLNPDNSDVDKLFIQLVQTYNQLFEENPINASGVDAKAILSARLSKSRRLENLIAQLPGEKKNGLFGNLIALSLGLTPNFKSNFDLAEDAKLQLSKDTYDDDLDNLLAQIGDQYADLFLAAKNLSDAILLSDILRVNTEITKAPLSASMIKRYDEHHQDLTLLKALVRQQLPEKYKEIFFDQSKNGYAGYIDGGASQEEFYKFIKPILEKMDGTEELLVKLNREDLLRKQRTFDNGSIPHQIHLGELHAILRRQEDFYPFLKDNREKIEKILTFRIPYYVGPLARGNSRFAWMTRKSEETITPWNFEEVVDKGASAQSFIERMTNFDKNLPNEKVLPKHSLLYEYFTVYNELTKVKYVTEGMRKPAFLSGEQKKAIVDLLFKTNRKVTVKQLKEDYFKKIECFDSVEISGVEDRFNASLGTYHDLLKIIKDKDFLDNEENEDILEDIVLTLTLFEDREMIEERLKTYAHLFDDKVMKQLKRRRYTGWGRLSRKLINGIRDKQSGKTILDFLKSDGFANRNFMQLIHDDSLTFKEDIQKAQVSGQGDSLHEHIANLAGSPAIKKGILQTVKVVDELVKVMGRHKPENIVIEMARENQTTQKGQKNSRERMKRIEEGIKELGSQILKEHPVENTQLQNEKLYLYYLQNGRDMYVDQELDINRLSDYDVDHIVPQSFLKDDSIDNKVLTRSDKARGKSDNVPSEEVVKKMKNYWRQLLNAKLITQRKFDNLTKAERGGLSELDKAGFIKRQLVETRQITKHVAQILDSRMNTKYDENDKLIREVKVITLKSKLVSDFRKDFQFYKVREINNYHHAHDAYLNAVVGTALIKKYPKLESEFVYGDYKVYDVRKMIAKSEQEIGKATAKYFFYSNIMNFFKTEITLANGEIRKRPLIETNGETGEIVWDKGRDFATVRKVLSMPQVNIVKKTEVQTGGFSKESILPKRNSDKLIARKKDWDPKKYGGFDSPTVAYSVLVVAKVEKGKSKKLKSVKELLGITIMERSSFEKNPIDFLEAKGYKEVKKDLIIKLPKYSLFELENGRKRMLASAGELQKGNELALPSKYVNFLYLASHYEKLKGSPEDNEQKQLFVEQHKHYLDEIIEQISEFSKRVILADANLDKVLSAYNKHRDKPIREQAENIIHLFTLTNLGAPAAFKYFDTTIDRKRYTSTKEVLDATLIHQSITGLYETRIDLSQLGGDGGGSSGSSGGVLNLEEEYRLHEKPVPSSIDPSWLQLFPTVWAERAGMGLANQVPPVVVELRSGASPVAVRQYPMSKEAREGIRPHIQRFLDLGVLVPCQSPWNTPLLPVKKPGTNDYRPVQDLREINKRVQDIHPTVPNPYNLLSSLPPSHTWYSVLDLKDAFFCLKLHPNSQPLFAFEWRDPEKGNTGQLTWTRLPQGFKNSPTLFNEALHRDLAPFRALNPQVVLLQYVDDLLVAAPTYRDCKEGTQKLLQELSKLGYRVSAKKAQLCQKEVTYLGYLLKEGKRWLTPARKATVMKIPPPTTPRQVREFLGTAGFCRLWIPGFASLAAPLYPLTKPSIPFIWTEEHQKAFDRIKEALLSAPALALPDLTKPFTLYVDERAGVARGVLTQTLGPWRRPVAYLSKKLDPVASGWPTCLKAVAAVALLLKDADKLTLGQNVTVIASHSLESIVRQPPDRWMTNARMTHYQSLLLNERVSFAPPAVLNPATLLPVESEATPVHRCSEILAEETGTRRDLKDQPLPGVPAWYTDGSSFIAEGKRRAGAAIVDGKRTVWASSLPEGTSAQKAELVALTQALRLAEGKDINIYTDSRYAFATAHIHGAIYKQRGWLTSAGKDIKNKEEILALLEAIHLPKRVAIIHCPGHQKGNDPVATGNRRADEAAKQAALSTRVLAETTKPAGKRTADGSEFEKRTADGSEFESPKKKAKVE

SEQ ID NO: 6303 - protein, 2091 aa, synthetic construct
MPAAKRVKLDGGDKKYSIGLDIGTNSVGWAVITDEYKVPSKKFKVLGNTDRHSIKKNLIGALLFDSGETAEATRLKRTARRRYTRRKNRICYLQEIFSNEMAKVDDSFFHRLEESFLVEEDKKHERHPIFGNIVDEVAYHEKYPTIYHLRKKLVDSTDKADLRLIYLALAHMIKFRGHFLIEGDLNPDNSDVDKLFIQLVQTYNQLFEENPINASGVDAKAILSARLSKSRRLENLIAQLPGEKKNGLFGNLIALSLGLTPNFKSNFDLAEDAKLQLSKDTYDDDLDNLLAQIGDQYADLFLAAKNLSDAILLSDILRVNTEITKAPLSASMIKRYDEHHQDLTLLKALVRQQLPEKYKEIFFDQSKNGYAGYIDGGASQEEFYKFIKPILEKMDGTEELLVKLNREDLLRKQRTFDNGSIPHQIHLGELHAILRRQEDFYPFLKDNREKIEKILTFRIPYYVGPLARGNSRFAWMTRKSEETITPWNFEEVVDKGASAQSFIERMTNFDKNLPNEKVLPKHSLLYEYFTVYNELTKVKYVTEGMRKPAFLSGEQKKAIVDLLFKTNRKVTVKQLKEDYFKKIECFDSVEISGVEDRFNASLGTYHDLLKIIKDKDFLDNEENEDILEDIVLTLTLFEDREMIEERLKTYAHLFDDKVMKQLKRRRYTGWGRLSRKLINGIRDKQSGKTILDFLKSDGFANRNFMQLIHDDSLTFKEDIQKAQVSGQGDSLHEHIANLAGSPAIKKGILQTVKVVDELVKVMGRHKPENIVIEMARENQTTQKGQKNSRERMKRIEEGIKELGSQILKEHPVENTQLQNEKLYLYYLQNGRDMYVDQELDINRLSDYDVDHIVPQSFLKDDSIDNKVLTRSDKARGKSDNVPSEEVVKKMKNYWRQLLNAKLITQRKFDNLTKAERGGLSELDKAGFIKRQLVETRQITKHVAQILDSRMNTKYDENDKLIREVKVITLKSKLVSDFRKDFQFYKVREINNYHHAHDAYLNAVVGTALIKKYPKLESEFVYGDYKVYDVRKMIAKSEQEIGKATAKYFFYSNIMNFFKTEITLANGEIRKRPLIETNGETGEIVWDKGRDFATVRKVLSMPQVNIVKKTEVQTGGFSKESILPKRNSDKLIARKKDWDPKKYGGFDSPTVAYSVLVVAKVEKGKSKKLKSVKELLGITIMERSSFEKNPIDFLEAKGYKEVKKDLIIKLPKYSLFELENGRKRMLASAGELQKGNELALPSKYVNFLYLASHYEKLKGSPEDNEQKQLFVEQHKHYLDEIIEQISEFSKRVILADANLDKVLSAYNKHRDKPIREQAENIIHLFTLTNLGAPAAFKYFDTTIDRKRYTSTKEVLDATLIHQSITGLYETRIDLSQLGGDGGGSSGSSGGTLNIEDEYRLHETSKEPDVPLGSTWLSDFPQAWAETGGMGLAVRQAPLIIPLKATSTPVSIKQYPMSQEARLGIKPHIQRLLDQGILVPCQSPWNTPLLPVKKPGTNDYRPVQDLREVNKRVEDIHPTVPNPYNLLSGLPPSHQWYTVLDLKDAFFCLRLHPTSQPLFAFEWRDPEMGISGQLTWTRLPQGFKNSPTLFNEALHRDLADFRIQHPDLILLQYVDDLLLAATSEQDCQRGTRALLQTLGNLGYRASAKKAQICQKQVKYLGYLLKEGQRWLTEARKETVMGQPTPKTPRQLREFLGTAGFCRLWIPGFAEMAAPLYPLTKPGTLFNWGPDQQKAYQEIKQALLTAPALGLPDLTKPFELFVDEKQGYAKGVLTQKLGPWRRPVAYLSKKLDPVAAGWPPCLRMVAAIAVLTKDAGKLTMGQPLVILAPHAVEALVKQPPDRWLSNARMTHYQAMLLDTDRVQFGPVVALNPATLLPLPEKEAPHDCLEILAETHGTRPDLTDQPIPDADYTWYTDGSSFLQEGQRRAGAAVTTETEVIWARALPAGTSAQRAELIALTQALKMAEGKKLNVYTDSRYAFATAHVHGEIYRRRGWLTSEGREIKNKNEILALLKALFLPKRLSIIHCPGHQKGNSAEARGNRMADQAAREAAMKAVLETSTLLAGKRTADGSEFEKRTADGSEFESPKKKAKVE

SEQ ID NO: 6304 - protein, 2096 aa, synthetic construct
MPAAKRVKLDGGDKKYSIGLDIGTNSVGWAVITDEYKVPSKKFKVLGNTDRHSIKKNLIGALLFDSGETAEATRLKRTARRRYTRRKNRICYLQEIFSNEMAKVDDSFFHRLEESFLVEEDKKHERHPIFGNIVDEVAYHEKYPTIYHLRKKLVDSTDKADLRLIYLALAHMIKFRGHFLIEGDLNPDNSDVDKLFIQLVQTYNQLFEENPINASGVDAKAILSARLSKSRRLENLIAQLPGEKKNGLFGNLIALSLGLTPNFKSNFDLAEDAKLQLSKDTYDDDLDNLLAQIGDQYADLFLAAKNLSDAILLSDILRVNTEITKAPLSASMIKRYDEHHQDLTLLKALVRQQLPEKYKEIFFDQSKNGYAGYIDGGASQEEFYKFIKPILEKMDGTEELLVKLNREDLLRKQRTFDNGSIPHQIHLGELHAILRRQEDFYPFLKDNREKIEKILTFRIPYYVGPLARGNSRFAWMTRKSEETITPWNFEEVVDKGASAQSFIERMTNFDKNLPNEKVLPKHSLLYEYFTVYNELTKVKYVTEGMRKPAFLSGEQKKAIVDLLFKTNRKVTVKQLKEDYFKKIECFDSVEISGVEDRFNASLGTYHDLLKIIKDKDFLDNEENEDILEDIVLTLTLFEDREMIEERLKTYAHLFDDKVMKQLKRRRYTGWGRLSRKLINGIRDKQSGKTILDFLKSDGFANRNFMQLIHDDSLTFKEDIQKAQVSGQGDSLHEHIANLAGSPAIKKGILQTVKVVDELVKVMGRHKPENIVIEMARENQTTQKGQKNSRERMKRIEEGIKELGSQILKEHPVENTQLQNEKLYLYYLQNGRDMYVDQELDINRLSDYDVDHIVPQSFLKDDSIDNKVLTRSDKARGKSDNVPSEEVVKKMKNYWRQLLNAKLITQRKFDNLTKAERGGLSELDKAGFIKRQLVETRQITKHVAQILDSRMNTKYDENDKLIREVKVITLKSKLVSDFRKDFQFYKVREINNYHHAHDAYLNAVVGTALIKKYPKLESEFVYGDYKVYDVRKMIAKSEQEIGKATAKYFFYSNIMNFFKTEITLANGEIRKRPLIETNGETGEIVWDKGRDFATVRKVLSMPQVNIVKKTEVQTGGFSKESILPKRNSDKLIARKKDWDPKKYGGFDSPTVAYSVLVVAKVEKGKSKKLKSVKELLGITIMERSSFEKNPIDFLEAKGYKEVKKDLIIKLPKYSLFELENGRKRMLASAGELQKGNELALPSKYVNFLYLASHYEKLKGSPEDNEQKQLFVEQHKHYLDEIIEQISEFSKRVILADANLDKVLSAYNKHRDKPIREQAENIIHLFTLTNLGAPAAFKYFDTTIDRKRYTSTKEVLDATLIHQSITGLYETRIDLSQLGGDGGGSSGSSGSSGGTAPLEEEYRLFLEAPIQNVTLLEQWKREIPKVWAEINPPGLASTQAPIHVQLLSTALPVRVRQYPITLEAKRSLRETIRKFRAAGILRPVHSPWNTPLLPVRKSGTSEYRMVQDLREVNKRVETIHPTVPNPYTLLSLLPPDRIWYSVLDLKDAFFCIPLAPESQLIFAFEWADAEEGESGQLTWTRLPQGFKNSPTLFNEALNRDLQGFRLDHPSVSLLQYVDDLLIAADTQAACLSATRDLLMTLAELGYRVSGKKAQLCQEEVTYLGFKIHKGSRSLSNSRTQAILQIPVPKTKRQVREFLGTIGYCRLWIPGFAELAQPLYAATRPGNDPLVWGEKEEEAFQSLKLALTQPPALALPSLDKPFQLFVEETSGAAKGVLTQALGPWKRPVAYLSKRLDPVAAGWPRCLRAIAAAALLTREASKLTFGQDIEITSSHNLESLLRSPPDKWLTNARITQYQVLLLDPPRVRFKQTAALNPATLLPETDDTLPIHHCLDTLDSLTSTRPDLTDQPLAQAEATLFTDGSSYIRDGKRYAGAAVVTLDSVIWAEPLPIGTSAQKAELIALTKALEWSKDKSVNIYTDSRYAFATLHVHGMIYRERGWLTAGGKAIKNAPEILALLTAVWLPKRVAVMHCKGHQKDDAPTSTGNRRADEVAREVAIRPLSTQATISAGKRTADGSEFEKRTADGSEFESPKKKAKVE

SEQ ID NO: 6305 - protein, 2096 aa, synthetic construct
MPAAKRVKLDGGDKKYSIGLDIGTNSVGWAVITDEYKVPSKKFKVLGNTDRHSIKKNLIGALLFDSGETAEATRLKRTARRRYTRRKNRICYLQEIFSNEMAKVDDSFFHRLEESFLVEEDKKHERHPIFGNIVDEVAYHEKYPTIYHLRKKLVDSTDKADLRLIYLALAHMIKFRGHFLIEGDLNPDNSDVDKLFIQLVQTYNQLFEENPINASGVDAKAILSARLSKSRRLENLIAQLPGEKKNGLFGNLIALSLGLTPNFKSNFDLAEDAKLQLSKDTYDDDLDNLLAQIGDQYADLFLAAKNLSDAILLSDILRVNTEITKAPLSASMIKRYDEHHQDLTLLKALVRQQLPEKYKEIFFDQSKNGYAGYIDGGASQEEFYKFIKPILEKMDGTEELLVKLNREDLLRKQRTFDNGSIPHQIHLGELHAILRRQEDFYPFLKDNREKIEKILTFRIPYYVGPLARGNSRFAWMTRKSEETITPWNFEEVVDKGASAQSFIERMTNFDKNLPNEKVLPKHSLLYEYFTVYNELTKVKYVTEGMRKPAFLSGEQKKAIVDLLFKTNRKVTVKQLKEDYFKKIECFDSVEISGVEDRFNASLGTYHDLLKIIKDKDFLDNEENEDILEDIVLTLTLFEDREMIEERLKTYAHLFDDKVMKQLKRRRYTGWGRLSRKLINGIRDKQSGKTILDFLKSDGFANRNFMQLIHDDSLTFKEDIQKAQVSGQGDSLHEHIANLAGSPAIKKGILQTVKVVDELVKVMGRHKPENIVIEMARENQTTQKGQKNSRERMKRIEEGIKELGSQILKEHPVENTQLQNEKLYLYYLQNGRDMYVDQELDINRLSDYDVDHIVPQSFLKDDSIDNKVLTRSDKARGKSDNVPSEEVVKKMKNYWRQLLNAKLITQRKFDNLTKAERGGLSELDKAGFIKRQLVETRQITKHVAQILDSRMNTKYDENDKLIREVKVITLKSKLVSDFRKDFQFYKVREINNYHHAHDAYLNAVVGTALIKKYPKLESEFVYGDYKVYDVRKMIAKSEQEIGKATAKYFFYSNIMNFFKTEITLANGEIRKRPLIETNGETGEIVWDKGRDFATVRKVLSMPQVNIVKKTEVQTGGFSKESILPKRNSDKLIARKKDWDPKKYGGFDSPTVAYSVLVVAKVEKGKSKKLKSVKELLGITIMERSSFEKNPIDFLEAKGYKEVKKDLIIKLPKYSLFELENGRKRMLASAGELQKGNELALPSKYVNFLYLASHYEKLKGSPEDNEQKQLFVEQHKHYLDEIIEQISEFSKRVILADANLDKVLSAYNKHRDKPIREQAENIIHLFTLTNLGAPAAFKYFDTTIDRKRYTSTKEVLDATLIHQSITGLYETRIDLSQLGGDGGGSSGSSGSSGGTAPLEEEYRLFLEAPIQNVTLLEQWKREIPKVWAEINPPGLASTQAPIHVQLLSTALPVRVRQYPITLEAKRSLRETIRKFRAAGILRPVHSPWNTPLLPVRKSGTSEYRMVQDLREVNKRVETIHPTVPNPYTLLSLLPPDRIWYSVLDLKDAFFCIPLAPESQLIFAFEWADAEEGESGQLTWTRLPQGFKNSPTLFNEALNRDLQGFRLDHPSVSLLQYVDDLLIAADTQAACLSATRDLLMTLAELGYRVSGKKAQLCQEEVTYLGFKIHKGSRSLSNSRTQAILQIPVPKTKRQVREFLGKIGYCRLFIPGFAELAQPLYAATRPGNDPLVWGEKEEEAFQSLKLALTQPPALALPSLDKPFQLFVEETSGAAKGVLTQALGPWKRPVAYLSKRLDPVAAGWPRCLRAIAAAALLTREASKLTFGQDIEITSSHNLESLLRSPPDKWLTNARITQYQVLLLDPPRVRFKQTAALNPATLLPETDDTLPIHHCLDTLDSLTSTRPDLTDQPLAQAEATLFTDGSSYIRDGKRYAGAAVVTLDSVIWAEPLPIGTSAQKAELIALTKALEWSKDKSVNIYTDSRYAFATLHVHGMIYRERGWLTAGGKAIKNAPEILALLTAVWLPKRVAVMHCKGHQKDDAPTSTGNRRADEVAREVAIRPLSTQATISAGKRTADGSEFEKRTADGSEFESPKKKAKVE

SEQ ID NO: 6306 - protein, 2085 aa, synthetic construct
MPAAKRVKLDGGDKKYSIGLDIGTNSVGWAVITDEYKVPSKKFKVLGNTDRHSIKKNLIGALLFDSGETAEATRLKRTARRRYTRRKNRICYLQEIFSNEMAKVDDSFFHRLEESFLVEEDKKHERHPIFGNIVDEVAYHEKYPTIYHLRKKLVDSTDKADLRLIYLALAHMIKFRGHFLIEGDLNPDNSDVDKLFIQLVQTYNQLFEENPINASGVDAKAILSARLSKSRRLENLIAQLPGEKKNGLFGNLIALSLGLTPNFKSNFDLAEDAKLQLSKDTYDDDLDNLLAQIGDQYADLFLAAKNLSDAILLSDILRVNTEITKAPLSASMIKRYDEHHQDLTLLKALVRQQLPEKYKEIFFDQSKNGYAGYIDGGASQEEFYKFIKPILEKMDGTEELLVKLNREDLLRKQRTFDNGSIPHQIHLGELHAILRRQEDFYPFLKDNREKIEKILTFRIPYYVGPLARGNSRFAWMTRKSEETITPWNFEEVVDKGASAQSFIERMTNFDKNLPNEKVLPKHSLLYEYFTVYNELTKVKYVTEGMRKPAFLSGEQKKAIVDLLFKTNRKVTVKQLKEDYFKKIECFDSVEISGVEDRFNASLGTYHDLLKIIKDKDFLDNEENEDILEDIVLTLTLFEDREMIEERLKTYAHLFDDKVMKQLKRRRYTGWGRLSRKLINGIRDKQSGKTILDFLKSDGFANRNFMQLIHDDSLTFKEDIQKAQVSGQGDSLHEHIANLAGSPAIKKGILQTVKVVDELVKVMGRHKPENIVIEMARENQTTQKGQKNSRERMKRIEEGIKELGSQILKEHPVENTQLQNEKLYLYYLQNGRDMYVDQELDINRLSDYDVDHIVPQSFLKDDSIDNKVLTRSDKARGKSDNVPSEEVVKKMKNYWRQLLNAKLITQRKFDNLTKAERGGLSELDKAGFIKRQLVETRQITKHVAQILDSRMNTKYDENDKLIREVKVITLKSKLVSDFRKDFQFYKVREINNYHHAHDAYLNAVVGTALIKKYPKLESEFVYGDYKVYDVRKMIAKSEQEIGKATAKYFFYSNIMNFFKTEITLANGEIRKRPLIETNGETGEIVWDKGRDFATVRKVLSMPQVNIVKKTEVQTGGFSKESILPKRNSDKLIARKKDWDPKKYGGFDSPTVAYSVLVVAKVEKGKSKKLKSVKELLGITIMERSSFEKNPIDFLEAKGYKEVKKDLIIKLPKYSLFELENGRKRMLASAGELQKGNELALPSKYVNFLYLASHYEKLKGSPEDNEQKQLFVEQHKHYLDEIIEQISEFSKRVILADANLDKVLSAYNKHRDKPIREQAENIIHLFTLTNLGAPAAFKYFDTTIDRKRYTSTKEVLDATLIHQSITGLYETRIDLSQLGGDGGGSSGSSGSSGGVPWILKKPLELTIKLDLEEQQGTLLNNSILSKKGKEELKQLFEKYSALWQSWENQVGHRRIRPHKIATGTVKPTPQKQYHINPKAKPDIQIVINDLLKQGVLIQKESTMNTPVYPVPKPNGRWRMVLDYRAVNKVTPLIAVQNQHSYGILGSLFKGRYKTTIDLSNGFWAHPIVPEDYWITAFTWQGKQYCWTVLPQGFLNSPGLFTGDVVDLLQGIPNVEVYVDDVYISHDSEKEHLEYLDILFNRLKEAGYIISLKKSNIANSIVDFLGFQITNEGRGLTDTFKEKLENITAPTTLKQLQSILGLLNFARNFIPDFTELIAPLYALIPKSTKNYVPWQIEHSTTLETLITKLNGAEYLQGRKGDKTLIMKVNASYTTGYIRYYNEGEKKPISYVSIVFSKTELKFTELEKLLTTVHKGLLKALDLSMGQNIHVYSPIVSMQNIQKTPQTAKKALASRWLSWLSYLEDPRIRFFYDPQMPALKDLPAVDTGKDNKKHPSNFQHIFYTDGSAITSPTKEGHLNAGMGIVYFINKDGNLQKQQEWSISLGNHTAQFAEIAAFEFALKKCLPLGGNILVVTDSNYVAKAYNEELDVWASNGFVNNRKKPLKHISKWKSVADLKRLRPDVVVTHEPGHQKLDSSPHAYGNNLADQLATQASFKVHAGKRTADGSEFEKRTADGSEFESPKKKAKVE

SEQ ID NO: 6307 - protein, 2125 aa, synthetic construct
MPAAKRVKLDGGDKKYSIGLDIGTNSVGWAVITDEYKVPSKKFKVLGNTDRHSIKKNLIGALLFDSGETAEATRLKRTARRRYTRRKNRICYLQEIFSNEMAKVDDSFFHRLEESFLVEEDKKHERHPIFGNIVDEVAYHEKYPTIYHLRKKLVDSTDKADLRLIYLALAHMIKFRGHFLIEGDLNPDNSDVDKLFIQLVQTYNQLFEENPINASGVDAKAILSARLSKSRRLENLIAQLPGEKKNGLFGNLIALSLGLTPNFKSNFDLAEDAKLQLSKDTYDDDLDNLLAQIGDQYADLFLAAKNLSDAILLSDILRVNTEITKAPLSASMIKRYDEHHQDLTLLKALVRQQLPEKYKEIFFDQSKNGYAGYIDGGASQEEFYKFIKPILEKMDGTEELLVKLNREDLLRKQRTFDNGSIPHQIHLGELHAILRRQEDFYPFLKDNREKIEKILTFRIPYYVGPLARGNSRFAWMTRKSEETITPWNFEEVVDKGASAQSFIERMTNFDKNLPNEKVLPKHSLLYEYFTVYNELTKVKYVTEGMRKPAFLSGEQKKAIVDLLFKTNRKVTVKQLKEDYFKKIECFDSVEISGVEDRFNASLGTYHDLLKIIKDKDFLDNEENEDILEDIVLTLTLFEDREMIEERLKTYAHLFDDKVMKQLKRRRYTGWGRLSRKLINGIRDKQSGKTILDFLKSDGFANRNFMQLIHDDSLTFKEDIQKAQVSGQGDSLHEHIANLAGSPAIKKGILQTVKVVDELVKVMGRHKPENIVIEMARENQTTQKGQKNSRERMKRIEEGIKELGSQILKEHPVENTQLQNEKLYLYYLQNGRDMYVDQELDINRLSDYDVDHIVPQSFLKDDSIDNKVLTRSDKARGKSDNVPSEEVVKKMKNYWRQLLNAKLITQRKFDNLTKAERGGLSELDKAGFIKRQLVETRQITKHVAQILDSRMNTKYDENDKLIREVKVITLKSKLVSDFRKDFQFYKVREINNYHHAHDAYLNAVVGTALIKKYPKLESEFVYGDYKVYDVRKMIAKSEQEIGKATAKYFFYSNIMNFFKTEITLANGEIRKRPLIETNGETGEIVWDKGRDFATVRKVLSMPQVNIVKKTEVQTGGFSKESILPKRNSDKLIARKKDWDPKKYGGFDSPTVAYSVLVVAKVEKGKSKKLKSVKELLGITIMERSSFEKNPIDFLEAKGYKEVKKDLIIKLPKYSLFELENGRKRMLASAGELQKGNELALPSKYVNFLYLASHYEKLKGSPEDNEQKQLFVEQHKHYLDEIIEQISEFSKRVILADANLDKVLSAYNKHRDKPIREQAENIIHLFTLTNLGAPAAFKYFDTTIDRKRYTSTKEVLDATLIHQSITGLYETRIDLSQLGGDGGGSSGSSGSSGGLLGRDLLTKLKAQIQFSTEGPQVTWEDRPAMCLVLNLEEEYRLHEKPVPPSIDPSWLQLFPMVWAEKAGMGLANQVPPVVVELKSDASPVAVRQYPMSKEAREGIRPHIQRFLDLGILVPCQSPWNTPLLPVKKPGTNDYRPVQDLREVNKRVQDIHPTVPNPYNLLSSLPPSHTWYSVLDLKDAFFCLKLHPNSQPLFAFEWRDPEKGNTGQLTWTRLPQGFKNSPTLFNEALHRDLASFRALNPQVVMLQYVDDLLVAAPTYRDCKEGTRRLLQELSKLGYRVSAKKAQLCREEVTYLGYLLKGGKRWLTPARKATVMKIPTPTTPRQVREFLGTAGFCRLWIPGFASLAAPLYPLTRPKVPFTWTEAHQEAFGRIKEALLSAPALALPDLTKPFALYVDEKEGVARGVLTQTLGPWRRPVAYLSKKLDPVASGWPTCLKAIAAVALLLKDADKLTLGQNVLVIAPHNLESIVRQPPDRWMTNARMTHYQSLLLNERVSFAPPAILNPATLLPVESDDTPIHICSEILAEETGTRPDLRDQPLPGVPAWYTDGSSFIMDGRRQAGAAIVDNKRTVWASNLPEGTSAQKAELIALTQALRLAEGKSINIYTDSRYAFATAHVHGAIYKQRGWLTSAGKDIKNKEEILALLEAIHLPKRVAIIHCPGHQRGTDPVATGNRKADEAAKQAAQSTRILTETTKNAGKRTADGSEFEKRTADGSEFESPKKKAKVE

SEQ ID NO: 6308 - protein, 2094 aa, synthetic construct
MPAAKRVKLDGGDKKYSIGLDIGTNSVGWAVITDEYKVPSKKFKVLGNTDRHSIKKNLIGALLFDSGETAEATRLKRTARRRYTRRKNRICYLQEIFSNEMAKVDDSFFHRLEESFLVEEDKKHERHPIFGNIVDEVAYHEKYPTIYHLRKKLVDSTDKADLRLIYLALAHMIKFRGHFLIEGDLNPDNSDVDKLFIQLVQTYNQLFEENPINASGVDAKAILSARLSKSRRLENLIAQLPGEKKNGLFGNLIALSLGLTPNFKSNFDLAEDAKLQLSKDTYDDDLDNLLAQIGDQYADLFLAAKNLSDAILLSDILRVNTEITKAPLSASMIKRYDEHHQDLTLLKALVRQQLPEKYKEIFFDQSKNGYAGYIDGGASQEEFYKFIKPILEKMDGTEELLVKLNREDLLRKQRTFDNGSIPHQIHLGELHAILRRQEDFYPFLKDNREKIEKILTFRIPYYVGPLARGNSRFAWMTRKSEETITPWNFEEVVDKGASAQSFIERMTNFDKNLPNEKVLPKHSLLYEYFTVYNELTKVKYVTEGMRKPAFLSGEQKKAIVDLLFKTNRKVTVKQLKEDYFKKIECFDSVEISGVEDRFNASLGTYHDLLKIIKDKDFLDNEENEDILEDIVLTLTLFEDREMIEERLKTYAHLFDDKVMKQLKRRRYTGWGRLSRKLINGIRDKQSGKTILDFLKSDGFANRNFMQLIHDDSLTFKEDIQKAQVSGQGDSLHEHIANLAGSPAIKKGILQTVKVVDELVKVMGRHKPENIVIEMARENQTTQKGQKNSRERMKRIEEGIKELGSQILKEHPVENTQLQNEKLYLYYLQNGRDMYVDQELDINRLSDYDVDHIVPQSFLKDDSIDNKVLTRSDKARGKSDNVPSEEVVKKMKNYWRQLLNAKLITQRKFDNLTKAERGGLSELDKAGFIKRQLVETRQITKHVAQILDSRMNTKYDENDKLIREVKVITLKSKLVSDFRKDFQFYKVREINNYHHAHDAYLNAVVGTALIKKYPKLESEFVYGDYKVYDVRKMIAKSEQEIGKATAKYFFYSNIMNFFKTEITLANGEIRKRPLIETNGETGEIVWDKGRDFATVRKVLSMPQVNIVKKTEVQTGGFSKESILPKRNSDKLIARKKDWDPKKYGGFDSPTVAYSVLVVAKVEKGKSKKLKSVKELLGITIMERSSFEKNPIDFLEAKGYKEVKKDLIIKLPKYSLFELENGRKRMLASAGELQKGNELALPSKYVNFLYLASHYEKLKGSPEDNEQKQLFVEQHKHYLDEIIEQISEFSKRVILADANLDKVLSAYNKHRDKPIREQAENIIHLFTLTNLGAPAAFKYFDTTIDRKRYTSTKEVLDATLIHQSITGLYETRIDLSQLGGDGGGSSGSSGSSGGTLNLEDEYRLYETSAEPEVSPGSTWLSDFPQAWAETGGMGLAVRQAPLIIPLKATSTPVSIKQYPMSQEAKLGIKPHIQRLLDQGILVPCQSPWNTPLLPVKKPGTNDYRPVQDLREVNKRVEDIHPTVPNPYNLLSGLPPSHRWYTVLDLKDAFFCLRLHPTSQPLFAFEWRDPGMGISGQLTWTRLPQGFKNSPTLFNEALHRDLADFRIQHPDLILLQYVDDILLAATSELDCQQGTRALLLTLGNLGYRASAKKAQLCQKQVKYLGYLLKEGQRWLTEARKETVMGQPTPKTPRQLREFLGTAGFCRLWIPGFAEMAAPLYPLTKPGTLFNWGPDQQKAYQEIKQALLTAPALGLPDLTKPFELFVDEKQGYAKGVLTQKLGPWRRPVAYLSKKLDPVAAGWPPCLRMVAAIAVLRKDAGKLTMGQPLVILAPHAVEALVKQPPDRWLSNARMTHYQAMLLDTDRVQFGPVVALNPATLLPLPEEGAPHDCLEILAETHGTRPDLTDQPIPDADHTWYTDGSSFLQEGQRKAGAAVTTETEVIWARALPAGTSAQRAELIALTQALKMAEGKRLNVYTDSRYAFATAHIHGEIYRRRGWLTSEGREIKNKSEILALLKALFLPKRLSIIHCLGHQKGDSAEARGNRLADQAAREAAIKTPPDTSTLLAGKRTADGSEFEKRTADGSEFESPKKKAKVE

SEQ ID NO: 6309 - protein, 2094 aa, synthetic construct
MPAAKRVKLDGGDKKYSIGLDIGTNSVGWAVITDEYKVPSKKFKVLGNTDRHSIKKNLIGALLFDSGETAEATRLKRTARRRYTRRKNRICYLQEIFSNEMAKVDDSFFHRLEESFLVEEDKKHERHPIFGNIVDEVAYHEKYPTIYHLRKKLVDSTDKADLRLIYLALAHMIKFRGHFLIEGDLNPDNSDVDKLFIQLVQTYNQLFEENPINASGVDAKAILSARLSKSRRLENLIAQLPGEKKNGLFGNLIALSLGLTPNFKSNFDLAEDAKLQLSKDTYDDDLDNLLAQIGDQYADLFLAAKNLSDAILLSDILRVNTEITKAPLSASMIKRYDEHHQDLTLLKALVRQQLPEKYKEIFFDQSKNGYAGYIDGGASQEEFYKFIKPILEKMDGTEELLVKLNREDLLRKQRTFDNGSIPHQIHLGELHAILRRQEDFYPFLKDNREKIEKILTFRIPYYVGPLARGNSRFAWMTRKSEETITPWNFEEVVDKGASAQSFIERMTNFDKNLPNEKVLPKHSLLYEYFTVYNELTKVKYVTEGMRKPAFLSGEQKKAIVDLLFKTNRKVTVKQLKEDYFKKIECFDSVEISGVEDRFNASLGTYHDLLKIIKDKDFLDNEENEDILEDIVLTLTLFEDREMIEERLKTYAHLFDDKVMKQLKRRRYTGWGRLSRKLINGIRDKQSGKTILDFLKSDGFANRNFMQLIHDDSLTFKEDIQKAQVSGQGDSLHEHIANLAGSPAIKKGILQTVKVVDELVKVMGRHKPENIVIEMARENQTTQKGQKNSRERMKRIEEGIKELGSQILKEHPVENTQLQNEKLYLYYLQNGRDMYVDQELDINRLSDYDVDHIVPQSFLKDDSIDNKVLTRSDKARGKSDNVPSEEVVKKMKNYWRQLLNAKLITQRKFDNLTKAERGGLSELDKAGFIKRQLVETRQITKHVAQILDSRMNTKYDENDKLIREVKVITLKSKLVSDFRKDFQFYKVREINNYHHAHDAYLNAVVGTALIKKYPKLESEFVYGDYKVYDVRKMIAKSEQEIGKATAKYFFYSNIMNFFKTEITLANGEIRKRPLIETNGETGEIVWDKGRDFATVRKVLSMPQVNIVKKTEVQTGGFSKESILPKRNSDKLIARKKDWDPKKYGGFDSPTVAYSVLVVAKVEKGKSKKLKSVKELLGITIMERSSFEKNPIDFLEAKGYKEVKKDLIIKLPKYSLFELENGRKRMLASAGELQKGNELALPSKYVNFLYLASHYEKLKGSPEDNEQKQLFVEQHKHYLDEIIEQISEFSKRVILADANLDKVLSAYNKHRDKPIREQAENIIHLFTLTNLGAPAAFKYFDTTIDRKRYTSTKEVLDATLIHQSITGLYETRIDLSQLGGDGGGSSGSSGSSGGTLGIEDEYRLHETSTEPDVSLGSTWLSDFPQAWAETGGMGLAVRQAPLIIPLKATSTPVSIQQYPMSHEARLGIKPHIQRLLDQGILVPCQSPWNTPLLPVKKPGTNDYRPVQDLREVNKRVEDIHPTVPNPYNLLSGLPPSHQWYTVLDLKDAFFCLRLHPTSQPLFAFEWRDPGMGISGQLTWTRLPQGFKNSPTLFDEALHRDLADFRIQHPDLILLQYVDDILLAATSELDCQQGTRALLQTLGDLGYRASAKKAQICQKQVKYLGYLLREGQRWLTEARKETVMGQPVPKTPRQLREFLGTAGFCRLWIPGFAEMAAPLYPLTKTGTLFSWGPDQQKAYQEIKQALLTAPALGLPDLTKPFELFVDEKQGYAKGVLTQKLGPWRRPVAYLSKKLDPVAAGWPPCLRMVAAIAVLTKDAGKLTMGQPLVILAPHAVEALVKQPPDRWLSNARMTHYQAMLLDTDRVQFGPVVALNPATLLPLPEEGAPHDCLEILAETHGTRPDLTDQPIPDADHTWYTDGSSFLQEGQRKAGAAVTTETEVIWAGALPAGTSAQRAELIALTQALKMAEGKRLNVYTDSRYAFATAHIHGEIYRRRGLLTSEGREIKNKSEILALLKALFLPKRLSIIHCLGHQKGDSAEARGNRLADQAAREAAIKTPPDTSTLLAGKRTADGSEFEKRTADGSEFESPKKKAKVE

SEQ ID NO: 6310 - protein, 2094 aa, synthetic construct
MPAAKRVKLDGGDKKYSIGLDIGTNSVGWAVITDEYKVPSKKFKVLGNTDRHSIKKNLIGALLFDSGETAEATRLKRTARRRYTRRKNRICYLQEIFSNEMAKVDDSFFHRLEESFLVEEDKKHERHPIFGNIVDEVAYHEKYPTIYHLRKKLVDSTDKADLRLIYLALAHMIKFRGHFLIEGDLNPDNSDVDKLFIQLVQTYNQLFEENPINASGVDAKAILSARLSKSRRLENLIAQLPGEKKNGLFGNLIALSLGLTPNFKSNFDLAEDAKLQLSKDTYDDDLDNLLAQIGDQYADLFLAAKNLSDAILLSDILRVNTEITKAPLSASMIKRYDEHHQDLTLLKALVRQQLPEKYKEIFFDQSKNGYAGYIDGGASQEEFYKFIKPILEKMDGTEELLVKLNREDLLRKQRTFDNGSIPHQIHLGELHAILRRQEDFYPFLKDNREKIEKILTFRIPYYVGPLARGNSRFAWMTRKSEETITPWNFEEVVDKGASAQSFIERMTNFDKNLPNEKVLPKHSLLYEYFTVYNELTKVKYVTEGMRKPAFLSGEQKKAIVDLLFKTNRKVTVKQLKEDYFKKIECFDSVEISGVEDRFNASLGTYHDLLKIIKDKDFLDNEENEDILEDIVLTLTLFEDREMIEERLKTYAHLFDDKVMKQLKRRRYTGWGRLSRKLINGIRDKQSGKTILDFLKSDGFANRNFMQLIHDDSLTFKEDIQKAQVSGQGDSLHEHIANLAGSPAIKKGILQTVKVVDELVKVMGRHKPENIVIEMARENQTTQKGQKNSRERMKRIEEGIKELGSQILKEHPVENTQLQNEKLYLYYLQNGRDMYVDQELDINRLSDYDVDHIVPQSFLKDDSIDNKVLTRSDKARGKSDNVPSEEVVKKMKNYWRQLLNAKLITQRKFDNLTKAERGGLSELDKAGFIKRQLVETRQITKHVAQILDSRMNTKYDENDKLIREVKVITLKSKLVSDFRKDFQFYKVREINNYHHAHDAYLNAVVGTALIKKYPKLESEFVYGDYKVYDVRKMIAKSEQEIGKATAKYFFYSNIMNFFKTEITLANGEIRKRPLIETNGETGEIVWDKGRDFATVRKVLSMPQVNIVKKTEVQTGGFSKESILPKRNSDKLIARKKDWDPKKYGGFDSPTVAYSVLVVAKVEKGKSKKLKSVKELLGITIMERSSFEKNPIDFLEAKGYKEVKKDLIIKLPKYSLFELENGRKRMLASAGELQKGNELALPSKYVNFLYLASHYEKLKGSPEDNEQKQLFVEQHKHYLDEIIEQISEFSKRVILADANLDKVLSAYNKHRDKPIREQAENIIHLFTLTNLGAPAAFKYFDTTIDRKRYTSTKEVLDATLIHQSITGLYETRIDLSQLGGDGGGSSGSSGSSGGTLNIEDEYRLHETSKEPDVSLGSTWLSDFPQAWAETGGMGLAVRQAPLIIPLKATSTPVSIKQYPMSQEARLGIKPHIQRLLDQGILVPCQSPWNTPLLPVKKPGTNDYRPVQDLREVNKRVEDIHPTVPNPYNLLSGLPPSHQWYTVLDLKDAFFCLRLHPTSQPLFAFEWRDPEMGISGQLTWTRLPQGFKNSPTLFNEALHRDLAGFRIQHPDLILLQYVDDLLLAATSELDCQQGTRALLQTLGDLGYRASAKKAQICQKQVKYLGYLLKEGQRWLTEARKETVMGQPIPKTPRQLREFLGTAGFCRLWIPGFAEMAAPLYPLTKPGTLFNWGPDQQKAFQEIKQALLTAPALGLPDLTKPFELFVDEKQGYAKGVLTQKLGPWRRPVAYLSKKLDPVAAGWPPCLRMVAAIAVLTKDAGKLTMGQPLVILAPHAVEALVKQPPDRWLSNARMTHYQALLLDTDRVQFGPVVALNPATLLPLPEEGLQHDCLDILAEAHGTRSDLMDQPLPDADHTWYTDGSSFLQEGQRKAGAAVTTETEVIWARALPAGTSAQRAELIALTQALKMAEGKKLNVYTDSRYAFATAHIHGEIYRRRGWLTSEGKEIKNKDEILALLKALFLPKRLSIIHCPGHQKGNSAEARGNRMADQAAREVATRETPETSTLLAGKRTADGSEFEKRTADGSEFESPKKKAKVE

SEQ ID NO: 6311 - protein, 2094 aa, synthetic construct; identical to SEQ ID NO: 4505

SEQ ID NO: 6312 - protein, 2094 aa, synthetic construct; identical to SEQ ID NO: 4505

SEQ ID NO: 6313 - protein, 2088 aa, synthetic construct
MPAAKRVKLDGGDKKYSIGLDIGTNSVGWAVITDEYKVPSKKFKVLGNTDRHSIKKNLIGALLFDSGETAEATRLKRTARRRYTRRKNRICYLQEIFSNEMAKVDDSFFHRLEESFLVEEDKKHERHPIFGNIVDEVAYHEKYPTIYHLRKKLVDSTDKADLRLIYLALAHMIKFRGHFLIEGDLNPDNSDVDKLFIQLVQTYNQLFEENPINASGVDAKAILSARLSKSRRLENLIAQLPGEKKNGLFGNLIALSLGLTPNFKSNFDLAEDAKLQLSKDTYDDDLDNLLAQIGDQYADLFLAAKNLSDAILLSDILRVNTEITKAPLSASMIKRYDEHHQDLTLLKALVRQQLPEKYKEIFFDQSKNGYAGYIDGGASQEEFYKFIKPILEKMDGTEELLVKLNREDLLRKQRTFDNGSIPHQIHLGELHAILRRQEDFYPFLKDNREKIEKILTFRIPYYVGPLARGNSRFAWMTRKSEETITPWNFEEVVDKGASAQSFIERMTNFDKNLPNEKVLPKHSLLYEYFTVYNELTKVKYVTEGMRKPAFLSGEQKKAIVDLLFKTNRKVTVKQLKEDYFKKIECFDSVEISGVEDRFNASLGTYHDLLKIIKDKDFLDNEENEDILEDIVLTLTLFEDREMIEERLKTYAHLFDDKVMKQLKRRRYTGWGRLSRKLINGIRDKQSGKTILDFLKSDGFANRNFMQLIHDDSLTFKEDIQKAQVSGQGDSLHEHIANLAGSPAIKKGILQTVKVVDELVKVMGRHKPENIVIEMARENQTTQKGQKNSRERMKRIEEGIKELGSQILKEHPVENTQLQNEKLYLYYLQNGRDMYVDQELDINRLSDYDVDHIVPQSFLKDDSIDNKVLTRSDKARGKSDNVPSEEVVKKMKNYWRQLLNAKLITQRKFDNLTKAERGGLSELDKAGFIKRQLVETRQITKHVAQILDSRMNTKYDENDKLIREVKVITLKSKLVSDFRKDFQFYKVREINNYHHAHDAYLNAVVGTALIKKYPKLESEFVYGDYKVYDVRKMIAKSEQEIGKATAKYFFYSNIMNFFKTEITLANGEIRKRPLIETNGETGEIVWDKGRDFATVRKVLSMPQVNIVKKTEVQTGGFSKESILPKRNSDKLIARKKDWDPKKYGGFDSPTVAYSVLVVAKVEKGKSKKLKSVKELLGITIMERSSFEKNPIDFLEAKGYKEVKKDLIIKLPKYSLFELENGRKRMLASAGELQKGNELALPSKYVNFLYLASHYEKLKGSPEDNEQKQLFVEQHKHYLDEIIEQISEFSKRVILADANLDKVLSAYNKHRDKPIREQAENIIHLFTLTNLGAPAAFKYFDTTIDRKRYTSTKEVLDATLIHQSITGLYETRIDLSQLGGDGGGSSGSSGSSGGTLQLDDEYRLYSPLVKPDQNIQFWLEQFPQAWAETAGMGLAKQVPPQVIQLKASATPVSVRQYPLSKEAQEGIRPHVQRLIQQGILVPVQSPWNTPLLPVRKPGTNDYRPVQDLREVNKRVQDIHPTVPNPYNLLCALPPQRSWYTVLDLKDAFFCLRLHPTSQPLFAFEWRDPGTGRTGQLTWTRLPQGFKNSPTIFDEALHRDLANFRIQHPQVTLLQYVDDLLLAGATKQDCLEGTKALLLELSDLGYRASAKKAQICRREVTYLGYSLRDGQRWLTEARKKTVVQIPAPTTAKQVREFLGTAGFCRLWIPGFATLAAPLYPLTKEKGEFSWAPEHQKAFDAIKKALLSAPALALPDVTKPFTLYVDERKGVARGVLTQTLGPWRRPVAYLSKKLDPVASGWPVCLKAIAAVAILVKDADKLTLGQNITVIAPHALENIVRQPPDRWMTNARMTHYQSLLLTERVTFAPPAALNPATLLPEETDEPVTHDCHQLLIEETGVRKDLTDIPLTGEVLTWFTDGSSYVVEGKRMAGAAVVDGTRTIWASSLPEGTSAQKAELMALTQALRLAEGKSINIYTDSRYAFATAHVHGAIYKQRGLLTSAGREIKNKEEILSLLEALHLPKRLAIIHCPGHQKAKDPISRGNQMADRVAKQAAQGVNLLAGKRTADGSEFEKRTADGSEFESPKKKAKVE

SEQ ID NO: 6314 - protein, 2088 aa, synthetic construct; identical to SEQ ID NO: 6313

SEQ ID NO: 6315 - protein, 2099 aa, synthetic construct
MPAAKRVKLDGGDKKYSIGLDIGTNSVGWAVITDEYKVPSKKFKVLGNTDRHSIKKNLIGALLFDSGETAEATRLKRTARRRYTRRKNRICYLQEIFSNEMAKVDDSFFHRLEESFLVEEDKKHERHPIFGNIVDEVAYHEKYPTIYHLRKKLVDSTDKADLRLIYLALAHMIKFRGHFLIEGDLNPDNSDVDKLFIQLVQTYNQLFEENPINASGVDAKAILSARLSKSRRLENLIAQLPGEKKNGLFGNLIALSLGLTPNFKSNFDLAEDAKLQLSKDTYDDDLDNLLAQIGDQYADLFLAAKNLSDAILLSDILRVNTEITKAPLSASMIKRYDEHHQDLTLLKALVRQQLPEKYKEIFFDQSKNGYAGYIDGGASQEEFYKFIKPILEKMDGTEELLVKLNREDLLRKQRTFDNGSIPHQIHLGELHAILRRQEDFYPFLKDNREKIEKILTFRIPYYVGPLARGNSRFAWMTRKSEETITPWNFEEVVDKGASAQSFIERMTNFDKNLPNEKVLPKHSLLYEYFTVYNELTKVKYVTEGMRKPAFLSGEQKKAIVDLLFKTNRKVTVKQLKEDYFKKIECFDSVEISGVEDRFNASLGTYHDLLKIIKDKDFLDNEENEDILEDIVLTLTLFEDREMIEERLKTYAHLFDDKVMKQLKRRRYTGWGRLSRKLINGIRDKQSGKTILDFLKSDGFANRNFMQLIHDDSLTFKEDIQKAQVSGQGDSLHEHIANLAGSPAIKKGILQTVKVVDELVKVMGRHKPENIVIEMARENQTTQKGQKNSRERMKRIEEGIKELGSQILKEHPVENTQLQNEKLYLYYLQNGRDMYVDQELDINRLSDYDVDHIVPQSFLKDDSIDNKVLTRSDKARGKSDNVPSEEVVKKMKNYWRQLLNAKLITQRKFDNLTKAERGGLSELDKAGFIKRQLVETRQITKHVAQILDSRMNTKYDENDKLIREVKVITLKSKLVSDFRKDFQFYKVREINNYHHAHDAYLNAVVGTALIKKYPKLESEFVYGDYKVYDVRKMIAKSEQEIGKATAKYFFYSNIMNFFKTEITLANGEIRKRPLIETNGETGEIVWDKGRDFATVRKVLSMPQVNIVKKTEVQTGGFSKESILPKRNSDKLIARKKDWDPKKYGGFDSPTVAYSVLVVAKVEKGKSKKLKSVKELLGITIMERSSFEKNPIDFLEAKGYKEVKKDLIIKLPKYSLFELENGRKRMLASAGELQKGNELALPSKYVNFLYLASHYEKLKGSPEDNEQKQLFVEQHKHYLDEIIEQISEFSKRVILADANLDKVLSAYNKHRDKPIREQAENIIHLFTLTNLGAPAAFKYFDTTIDRKRYTSTKEVLDATLIHQSITGLYETRIDLSQLGGDGGGSSGSSGSSGSSGGTAPLEEEYRLFLEAPIQNVTLLEQWKREIPKVWAEINPPGLASTQAPIHVQLLSTALPVRVRQYPITLEAKRSLRETIRKFRAAGILRPVHSPWNTPLLPVRKSGTSEYRMVQDLREVNKRVETIHPTVPNPYTLLSLLPPDRIWYSVLDLKDAFFCIPLAPESQLIFAFEWADAEEGESGQLTWTRLPQGFKNSPTLFDEALNRDLQGFRLDHPSVSLLQYVDDLLIAADTQAACLSATRDLLMTLAELGYRVSGKKAQLCQEEVTYLGFKIHKGSRSLSNSRTQAILQIPVPKTKRQVREFLGTIGYCRLWIPGFAELAQPLYAATRGGNDPLVWGEKEEEAFQSLKLALTQPPALALPSLDKPFQLFVEETSGAAKGVLTQALGPWKRPVAYLSKRLDPVAAGWPRCLRAIAAAALLTREASKLTFGQDIEITSSHNLESLLRSPPDKWLTNARITQYQVLLLDPPRVRFKQTAALNPATLLPETDDTLPIHHCLDTLDSLTSTRPDLTDQPLAQAEATLFTDGSSYIRDGKRYAGAAVVTLDSVIWAEPLPIGTSAQKAELIALTKALEWSKDKSVNIYTDSRYAFATLHVHGMIYRERGLLTAGGKAIKNAPEILALLTAVWLPKRVAVMHCKGHQKDDAPTSTGNRRADEVAREVAIRPLSTQATISAGKRTADGSEFEKRTADGSEFESPKKKAKVE

SEQ ID NO: 6316 - protein, 2099 aa, synthetic construct
MPAAKRVKLDGGDKKYSIGLDIGTNSVGWAVITDEYKVPSKKFKVLGNTDRHSIKKNLIGALLFDSGETAEATRLKRTARRRYTRRKNRICYLQEIFSNEMAKVDDSFFHRLEESFLVEEDKKHERHPIFGNIVDEVAYHEKYPTIYHLRKKLVDSTDKADLRLIYLALAHMIKFRGHFLIEGDLNPDNSDVDKLFIQLVQTYNQLFEENPINASGVDAKAILSARLSKSRRLENLIAQLPGEKKNGLFGNLIALSLGLTPNFKSNFDLAEDAKLQLSKDTYDDDLDNLLAQIGDQYADLFLAAKNLSDAILLSDILRVNTEITKAPLSASMIKRYDEHHQDLTLLKALVRQQLPEKYKEIFFDQSKNGYAGYIDGGASQEEFYKFIKPILEKMDGTEELLVKLNREDLLRKQRTFDNGSIPHQIHLGELHAILRRQEDFYPFLKDNREKIEKILTFRIPYYVGPLARGNSRFAWMTRKSEETITPWNFEEVVDKGASAQSFIERMTNFDKNLPNEKVLPKHSLLYEYFTVYNELTKVKYVTEGMRKPAFLSGEQKKAIVDLLFKTNRKVTVKQLKEDYFKKIECFDSVEISGVEDRFNASLGTYHDLLKIIKDKDFLDNEENEDILEDIVLTLTLFEDREMIEERLKTYAHLFDDKVMKQLKRRRYTGWGRLSRKLINGIRDKQSGKTILDFLKSDGFANRNFMQLIHDDSLTFKEDIQKAQVSGQGDSLHEHIANLAGSPAIKKGILQTVKVVDELVKVMGRHKPENIVIEMARENQTTQKGQKNSRERMKRIEEGIKELGSQILKEHPVENTQLQNEKLYLYYLQNGRDMYVDQELDINRLSDYDVDHIVPQSFLKDDSIDNKVLTRSDKARGKSDNVPSEEVVKKMKNYWRQLLNAKLITQRKFDNLTKAERGGLSELDKAGFIKRQLVETRQITKHVAQILDSRMNTKYDENDKLIREVKVITLKSKLVSDFRKDFQFYKVREINNYHHAHDAYLNAVVGTALIKKYPKLESEFVYGDYKVYDVRKMIAKSEQEIGKATAKYFFYSNIMNFFKTEITLANGEIRKRPLIETNGETGEIVWDKGRDFATVRKVLSMPQVNIVKKTEVQTGGFSKESILPKRNSDKLIARKKDWDPKKYGGFDSPTVAYSVLVVAKVEKGKSKKLKSVKELLGITIMERSSFEKNPIDFLEAKGYKEVKKDLIIKLPKYSLFELENGRKRMLASAGELQKGNELALPSKYVNFLYLASHYEKLKGSPEDNEQKQLFVEQHKHYLDEIIEQISEFSKRVILADANLDKVLSAYNKHRDKPIREQAENIIHLFTLTNLGAPAAFKYFDTTIDRKRYTSTKEVLDATLIHQSITGLYETRIDLSQLGGDGGGSSGSSGSSGSSGGTAPLEEEYRLFLEAPIQNVTLLEQWKREIPKVWAEINPPGLASTQAPIHVQLLSTALPVRVRQYPITLEAKRSLRETIRKFRAAGILRPVHSPWNTPLLPVRKSGTSEYRMVQDLREVNKRVETIHPTVPNPYTLLSLLPPDRIWYSVLDLKDAFFCIPLAPESQLIFAFEWADAEEGESGQLTWTRLPQGFKNSPTLFNEALNRDLQGFRLDHPSVSLLQYVDDLLIAADTQAACLSATRDLLMTLAELGYRVSGKKAQLCQEEVTYLGFKIHKGSRSLSNSRTQAILQIPVPKTKRQVREFLGTIGYCRLWIPGFAELAQPLYAATRPGNDPLVWGEKEEEAFQSLKLALTQPPALALPSLDKPFQLFVEETSGAAKGVLTQALGPWKRPVAYLSKRLDPVAAGWPRCLRAIAAAALLTREASKLTFGQDIEITSSHNLESLLRSPPDKWLTNARITQYQVLLLDPPRVRFKQTAALNPATLLPETDDTLPIHHCLDTLDSLTSTRPDLTDQPLAQAEATLFTDGSSYIRDGKRYAGAAVVTLDSVIWAEPLPIGTSAQKAELIALTKALEWSKDKSVNIYTDSRYAFATLHVHGMIYRERGWLTAGGKAIKNAPEILALLTAVWLPKRVAVMHCKGHQKDDAPTSTGNRRADEVAREVAIRPLSTQATISAGKRTADGSEFEKRTADGSEFESPKKKAKVE

SEQ ID NO: 6317 - protein, 2103 aa, synthetic construct
MPAAKRVKLDGGDKKYSIGLDIGTNSVGWAVITDEYKVPSKKFKVLGNTDRHSIKKNLIGALLFDSGETAEATRLKRTARRRYTRRKNRICYLQEIFSNEMAKVDDSFFHRLEESFLVEEDKKHERHPIFGNIVDEVAYHEKYPTIYHLRKKLVDSTDKADLRLIYLALAHMIKFRGHFLIEGDLNPDNSDVDKLFIQLVQTYNQLFEENPINASGVDAKAILSARLSKSRRLENLIAQLPGEKKNGLFGNLIALSLGLTPNFKSNFDLAEDAKLQLSKDTYDDDLDNLLAQIGDQYADLFLAAKNLSDAILLSDILRVNTEITKAPLSASMIKRYDEHHQDLTLLKALVRQQLPEKYKEIFFDQSKNGYAGYIDGGASQEEFYKFIKPILEKMDGTEELLVKLNREDLLRKQRTFDNGSIPHQIHLGELHAILRRQEDFYPFLKDNREKIEKILTFRIPYYVGPLARGNSRFAWMTRKSEETITPWNFEEVVDKGASAQSFIERMTNFDKNLPNEKVLPKHSLLYEYFTVYNELTKVKYVTEGMRKPAFLSGEQKKAIVDLLFKTNRKVTVKQLKEDYFKKIECFDSVEISGVEDRFNASLGTYHDLLKIIKDKDFLDNEENEDILEDIVLTLTLFEDREMIEERLKTYAHLFDDKVMKQLKRRRYTGWGRLSRKLINGIRDKQSGKTILDFLKSDGFANRNFMQLIHDDSLTFKEDIQKAQVSGQGDSLHEHIANLAGSPAIKKGILQTVKVVDELVKVMGRHKPENIVIEMARENQTTQKGQKNSRERMKRIEEGIKELGSQILKEHPVENTQLQNEKLYLYYLQNGRDMYVDQELDINRLSDYDVDHIVPQSFLKDDSIDNKVLTRSDKARGKSDNVPSEEVVKKMKNYWRQLLNAKLITQRKFDNLTKAERGGLSELDKAGFIKRQLVETRQITKHVAQILDSRMNTKYDENDKLIREVKVITLKSKLVSDFRKDFQFYKVREINNYHHAHDAYLNAVVGTALIKKYPKLESEFVYGDYKVYDVRKMIAKSEQEIGKATAKYFFYSNIMNFFKTEITLANGEIRKRPLIETNGETGEIVWDKGRDFATVRKVLSMPQVNIVKKTEVQTGGFSKESILPKRNSDKLIARKKDWDPKKYGGFDSPTVAYSVLVVAKVEKGKSKKLKSVKELLGITIMERSSFEKNPIDFLEAKGYKEVKKDLIIKLPKYSLFELENGRKRMLASAGELQKGNELALPSKYVNFLYLASHYEKLKGSPEDNEQKQLFVEQHKHYLDEIIEQISEFSKRVILADANLDKVLSAYNKHRDKPIREQAENIIHLFTLTNLGAPAAFKYFDTTIDRKRYTSTKEVLDATLIHQSITGLYETRIDLSQLGGDGGGSSGSSGSSGSSGGTVSLQDEHRLFDIPVTTSLPDVWLQDFPQAWAETGGLGRAKCQAPIIIDLKPTAVPVSIKQYPMSLEAHMGIRQHIIKFLELGVLRPCRSPWNTPLLPVKKPGTQDYRPVQDLREINKRTVDIHPTVPNPYNLLSTLKPDYSWYTVLDLKDAFFCLPLAPQSQELFAFEWKDPERGISGQLTWTRLPQGFKNSPTLFNEALHRDLTDFRTQHPEVTLLQYVDDLLLAAPTKKACTQGTRHLLQELGEKGYRASAKKAQICQTKVTYLGYILSEGKRWLTPGRIETVARIPPPRNPREVREFLGTAGFCRLWIPGFAELAAPLYALTKPSTPFTWQTEHQLAFEALKKALLSAPALGLPDTSKPFTLFLDERQGIAKGVLTQKLGPWKRPVAYLSKKLDPVAAGWPPCLRIMAATAMLVKDSAKLTLGQPLTVITPHTLEAIVRQPPDRWITNARLTHYQALLLDTDRVQFGPPVTLNPATLLPVPENQPSPHDCRQVLAETHGTREDLKDQELPDADHTWYTDGSSYLDSGTRRAGAAVVDGHNTIWAQSLPPGTSAQKAELIALTKALELSKGKKANIYTDSRYAFATAHTHGSIYERRGWLTSEGKEIKNKAEIIALLKALFLPQEVAIIHCPGHQKGQDPVAVGNRQADRVARQAAMAEVLTLATEPDNTSHITAGKRTADGSEFEKRTADGSEFESPKKKAKVE

SEQ ID NO: 6318 - protein, 2096 aa, synthetic construct
MPAAKRVKLDGGDKKYSIGLDIGTNSVGWAVITDEYKVPSKKFKVLGNTDRHSIKKNLIGALLFDSGETAEATRLKRTARRRYTRRKNRICYLQEIFSNEMAKVDDSFFHRLEESFLVEEDKKHERHPIFGNIVDEVAYHEKYPTIYHLRKKLVDSTDKADLRLIYLALAHMIKFRGHFLIEGDLNPDNSDVDKLFIQLVQTYNQLFEENPINASGVDAKAILSARLSKSRRLENLIAQLPGEKKNGLFGNLIALSLGLTPNFKSNFDLAEDAKLQLSKDTYDDDLDNLLAQIGDQYADLFLAAKNLSDAILLSDILRVNTEITKAPLSASMIKRYDEHHQDLTLLKALVRQQLPEKYKEIFFDQSKNGYAGYIDGGASQEEFYKFIKPILEKMDGTEELLVKLNREDLLRKQRTFDNGSIPHQIHLGELHAILRRQEDFYPFLKDNREKIEKILTFRIPYYVGPLARGNSRFAWMTRKSEETITPWNFEEVVDKGASAQSFIERMTNFDKNLPNEKVLPKHSLLYEYFTVYNELTKVKYVTEGMRKPAFLSGEQKKAIVDLLFKTNRKVTVKQLKEDYFKKIECFDSVEISGVEDRFNASLGTYHDLLKIIKDKDFLDNEENEDILEDIVLTLTLFEDREMIEERLKTYAHLFDDKVMKQLKRRRYTGWGRLSRKLINGIRDKQSGKTILDFLKSDGFANRNFMQLIHDDSLTFKEDIQKAQVSGQGDSLHEHIANLAGSPAIKKGILQTVKVVDELVKVMGRHKPENIVIEMARENQTTQKGQKNSRERMKRIEEGIKELGSQILKEHPVENTQLQNEKLYLYYLQNGRDMYVDQELDINRLSDYDVDHIVPQSFLKDDSIDNKVLTRSDKARGKSDNVPSEEVVKKMKNYWRQLLNAKLITQRKFDNLTKAERGGLSELDKAGFIKRQLVETRQITKHVAQILDSRMNTKYDENDKLIREVKVITLKSKLVSDFRKDFQFYKVREINNYHHAHDAYLNAVVGTALIKKYPKLESEFVYGDYKVYDVRKMIAKSEQEIGKATAKYFFYSNIMNFFKTEITLANGEIRKRPLIETNGETGEIVWDKGRDFATVRKVLSMPQVNIVKKTEVQTGGFSKESILPKRNSDKLIARKKDWDPKKYGGFDSPTVAYSVLVVAKVEKGKSKKLKSVKELLGITIMERSSFEKNPIDFLEAKGYKEVKKDLIIKLPKYSLFELENGRKRMLASAGELQKGNELALPSKYVNFLYLASHYEKLKGSPEDNEQKQLFVEQHKHYLDEIIEQISEFSKRVILADANLDKVLSAYNKHRDKPIREQAENIIHLFTLTNLGAPAAFKYFDTTIDRKRYTSTKEVLDATLIHQSITGLYETRIDLSQLGGDGGGSSGSSGSSGSSGGTLQLEEEYRLFEPESTQKQEMDIWLKNFPQAWAETGGMGTAHCQAPVLIQLKATATPISIRQYPMPHEAYQGIKPHIRRMLDQGILKPCQSPWNTPLLPVKKPGTEDYRPVQDLREVNKRVEDIHPTVPNPYNLLSTLPPSHPWYTVLDLKDAFFCLRLHSESQLLFAFEWRDPEIGLSGQLTWTRLPQGFKNSPTLFNEALHSDLADFRVRYPALVLLQYVDDLLLAAATRTECLEGTKALLETLGNKGYRASAKKAQICLQEVTYLGYSLKDGQRWLTKARKEAILSIPVPKNSRQVREFLGTAGYCRLWIPGFAELAAPLYPLTRPGTLFQWGTEQQLAFEDIKKALLSSPALGLPDITKPFELFIDENSGFAKGVLVQKLGPWKRPVAYLSKKLDTVASGWPPCLRMVAAIAILVKDAGKLTLGQPLTILTSHPVEALVRQPPNKWLSNARMTHYQAMLLDAERVHFGPTVSLNPATLLPLPSGGNHHDCLQILAETHGTRPDLTDQPLPDADLTWYTDGSSFIRNGEREAGAAVTTESEVIWAAPLPPGTSAQRAELIALTQALKMAEGKKLTVYTDSRYAFATTHVHGEIYRRRGWLTSEGKEIKNKNEILALLEALFLPKRLSIIHCPGHQKGDSPQAKGNRLADDTAKKAATETHSSLTVLPAGKRTADGSEFEKRTADGSEFESPKKKAKVE

SEQ ID NO: 6319 - protein, 2219 aa, synthetic construct
MPAAKRVKLDGGDKKYSIGLDIGTNSVGWAVITDEYKVPSKKFKVLGNTDRHSIKKNLIGALLFDSGETAEATRLKRTARRRYTRRKNRICYLQEIFSNEMAKVDDSFFHRLEESFLVEEDKKHERHPIFGNIVDEVAYHEKYPTIYHLRKKLVDSTDKADLRLIYLALAHMIKFRGHFLIEGDLNPDNSDVDKLFIQLVQTYNQLFEENPINASGVDAKAILSARLSKSRRLENLIAQLPGEKKNGLFGNLIALSLGLTPNFKSNFDLAEDAKLQLSKDTYDDDLDNLLAQIGDQYADLFLAAKNLSDAILLSDILRVNTEITKAPLSASMIKRYDEHHQDLTLLKALVRQQLPEKYKEIFFDQSKNGYAGYIDGGASQEEFYKFIKPILEKMDGTEELLVKLNREDLLRKQRTFDNGSIPHQIHLGELHAILRRQEDFYPFLKDNREKIEKILTFRIPYYVGPLARGNSRFAWMTRKSEETITPWNFEEVVDKGASAQSFIERMTNFDKNLPNEKVLPKHSLLYEYFTVYNELTKVKYVTEGMRKPAFLSGEQKKAIVDLLFKTNRKVTVKQLKEDYFKKIECFDSVEISGVEDRFNASLGTYHDLLKIIKDKDFLDNEENEDILEDIVLTLTLFEDREMIEERLKTYAHLFDDKVMKQLKRRRYTGWGRLSRKLINGIRDKQSGKTILDFLKSDGFANRNFMQLIHDDSLTFKEDIQKAQVSGQGDSLHEHIANLAGSPAIKKGILQTVKVVDELVKVMGRHKPENIVIEMARENQTTQKGQKNSRERMKRIEEGIKELGSQILKEHPVENTQLQNEKLYLYYLQNGRDMYVDQELDINRLSDYDVDHIVPQSFLKDDSIDNKVLTRSDKARGKSDNVPSEEVVKKMKNYWRQLLNAKLITQRKFDNLTKAERGGLSELDKAGFIKRQLVETRQITKHVAQILDSRMNTKYDENDKLIREVKVITLKSKLVSDFRKDFQFYKVREINNYHHAHDAYLNAVVGTALIKKYPKLESEFVYGDYKVYDVRKMIAKSEQEIGKATAKYFFYSNIMNFFKTEITLANGEIRKRPLIETNGETGEIVWDKGRDFATVRKVLSMPQVNIVKKTEVQTGGFSKESILPKRNSDKLIARKKDWDPKKYGGFDSPTVAYSVLVVAKVEKGKSKKLKSVKELLGITIMERSSFEKNPIDFLEAKGYKEVKKDLIIKLPKYSLFELENGRKRMLASAGELQKGNELALPSKYVNFLYLASHYEKLKGSPEDNEQKQLFVEQHKHYLDEIIEQISEFSKRVILADANLDKVLSAYNKHRDKPIREQAENIIHLFTLTNLGAPAAFKYFDTTIDRKRYTSTKEVLDATLIHQSITGLYETRIDLSQLGGDGGGSSGSSGSSGSSGGTLGDQGSRGSDPLPEPRVTLTVEGIPTEFLVNTGAEHSVLTKPMGKMGSKRTVVAGATGSKVYPWTTKRLLKIGQKQVTHSFLVIPECPAPLLGRDLLTKLKAQIQFSTEGPQVTWEDRPAMCLVLNLEEEYRLHEKPVPPSIDPSWLQLFPMVWAEKAGMGLANQVPPVVVELKSDASPVAVRQYPMSKEAREGIRPHIQRFLDLGILVPCQSPWNTPLLPVKKPGTNDYRPVQDLREVNKRVQDIHPTVPNPYNLLSSLPPSHTWYSVLDLKDAFFCLKLHPNSQPLFAFEWRDPEKGNTGQLTWTRLPQGFKNSPTLFDEALHRDLASFRALNPQVVMLQYVDDLLVAAPTYRDCKEGTRRLLQELSKLGYRVSAKKAQLCREEVTYLGYLLKGGKRWLTPARKATVMKIPTPTTPRQVREFLGTAGFCRLWIPGFASLAAPLYPLTREKVPFTWTEAHQEAFGRIKEALLSAPALALPDLTKPFALYVDEKEGVARGVLTQTLGPWRRPVAYLSKKLDPVASGWPTCLKAIAAVALLLKDADKLTLGQNVLVIAPHNLESIVRQPPDRWMTNARMTHYQSLLLNERVSFAPPAILNPATLLPVESDDTPIHICSEILAEETGTRPDLRDQPLPGVPAWYTDGSSFIMDGRRQAGAAIVDNKRTVWASNLPEGTSAQKAELIALTQALRLAEGKSINIYTDSRYAFATAHVHGAIYKQRGLLTSAGKDIKNKEEILALLEAIHLPKRVAIIHCPGHQRGTDPVATGNRKADEAAKQAAQSTRILTETTKNAGKRTADGSEFEKRTADGSEFESPKKKAKVE

SEQ ID NO: 6320 - protein, 2128 aa, synthetic construct
MPAAKRVKLDGGDKKYSIGLDIGTNSVGWAVITDEYKVPSKKFKVLGNTDRHSIKKNLIGALLFDSGETAEATRLKRTARRRYTRRKNRICYLQEIFSNEMAKVDDSFFHRLEESFLVEEDKKHERHPIFGNIVDEVAYHEKYPTIYHLRKKLVDSTDKADLRLIYLALAHMIKFRGHFLIEGDLNPDNSDVDKLFIQLVQTYNQLFEENPINASGVDAKAILSARLSKSRRLENLIAQLPGEKKNGLFGNLIALSLGLTPNFKSNFDLAEDAKLQLSKDTYDDDLDNLLAQIGDQYADLFLAAKNLSDAILLSDILRVNTEITKAPLSASMIKRYDEHHQDLTLLKALVRQQLPEKYKEIFFDQSKNGYAGYIDGGASQEEFYKFIKPILEKMDGTEELLVKLNREDLLRKQRTFDNGSIPHQIHLGELHAILRRQEDFYPFLKDNREKIEKILTFRIPYYVGPLARGNSRFAWMTRKSEETITPWNFEEVVDKGASAQSFIERMTNFDKNLPNEKVLPKHSLLYEYFTVYNELTKVKYVTEGMRKPAFLSGEQKKAIVDLLFKTNRKVTVKQLKEDYFKKIECFDSVEISGVEDRFNASLGTYHDLLKIIKDKDFLDNEENEDILEDIVLTLTLFEDREMIEERLKTYAHLFDDKVMKQLKRRRYTGWGRLSRKLINGIRDKQSGKTILDFLKSDGFANRNFMQLIHDDSLTFKEDIQKAQVSGQGDSLHEHIANLAGSPAIKKGILQTVKVVDELVKVMGRHKPENIVIEMARENQTTQKGQKNSRERMKRIEEGIKELGSQILKEHPVENTQLQNEKLYLYYLQNGRDMYVDQELDINRLSDYDVDHIVPQSFLKDDSIDNKVLTRSDKARGKSDNVPSEEVVKKMKNYWRQLLNAKLITQRKFDNLTKAERGGLSELDKAGFIKRQLVETRQITKHVAQILDSRMNTKYDENDKLIREVKVITLKSKLVSDFRKDFQFYKVREINNYHHAHDAYLNAVVGTALIKKYPKLESEFVYGDYKVYDVRKMIAKSEQEIGKATAKYFFYSNIMNFFKTEITLANGEIRKRPLIETNGETGEIVWDKGRDFATVRKVLSMPQVNIVKKTEVQTGGFSKESILPKRNSDKLIARKKDWDPKKYGGFDSPTVAYSVLVVAKVEKGKSKKLKSVKELLGITIMERSSFEKNPIDFLEAKGYKEVKKDLIIKLPKYSLFELENGRKRMLASAGELQKGNELALPSKYVNFLYLASHYEKLKGSPEDNEQKQLFVEQHKHYLDEIIEQISEFSKRVILADANLDKVLSAYNKHRDKPIREQAENIIHLFTLTNLGAPAAFKYFDTTIDRKRYTSTKEVLDATLIHQSITGLYETRIDLSQLGGDGGGSSGSSGSSGSSGGLLGRDLLTKLKAQIQFSTEGPQVTWEDRPAMCLVLNLEEEYRLHEKPVPPSIDPSWLQLFPMVWAEKAGMGLANQVPPVVVELKSDASPVAVRQYPMSKEAREGIRPHIQRFLDLGILVPCQSPWNTPLLPVKKPGTNDYRPVQDLREVNKRVQDIHPTVPNPYNLLSSLPPSHTWYSVLDLKDAFFCLKLHPNSQPLFAFEWRDPEKGNTGQLTWTRLPQGFKNSPTLFNEALHRDLASFRALNPQVVMLQYVDDLLVAAPTYRDCKEGTRRLLQELSKLGYRVSAKKAQLCREEVTYLGYLLKGGKRWLTPARKATVMKIPTPTTPRQVREFLGTAGFCRLWIPGFASLAAPLYPLTRPKVPFTWTEAHQEAFGRIKEALLSAPALALPDLTKPFALYVDEKEGVARGVLTQTLGPWRRPVAYLSKKLDPVASGWPTCLKAIAAVALLLKDADKLTLGQNVLVIAPHNLESIVRQPPDRWMTNARMTHYQSLLLNERVSFAPPAILNPATLLPVESDDTPIHICSEILAEETGTRPDLRDQPLPGVPAWYTDGSSFIMDGRRQAGAAIVDNKRTVWASNLPEGTSAQKAELIALTQALRLAEGKSINIYTDSRYAFATAHVHGAIYKQRGWLTSAGKDIKNKEEILALLEAIHLPKRVAIIHCPGHQRGTDPVATGNRKADEAAKQAAQSTRILTETTKNAGKRTADGSEFEKRTADGSEFESPKKKAKVE

SEQ ID NO: 6321 - protein, 2219 aa, synthetic construct
MPAAKRVKLDGGDKKYSIGLDIGTNSVGWAVITDEYKVPSKKFKVLGNTDRHSIKKNLIGALLFDSGETAEATRLKRTARRRYTRRKNRICYLQEIFSNEMAKVDDSFFHRLEESFLVEEDKKHERHPIFGNIVDEVAYHEKYPTIYHLRKKLVDSTDKADLRLIYLALAHMIKFRGHFLIEGDLNPDNSDVDKLFIQLVQTYNQLFEENPINASGVDAKAILSARLSKSRRLENLIAQLPGEKKNGLFGNLIALSLGLTPNFKSNFDLAEDAKLQLSKDTYDDDLDNLLAQIGDQYADLFLAAKNLSDAILLSDILRVNTEITKAPLSASMIKRYDEHHQDLTLLKALVRQQLPEKYKEIFFDQSKNGYAGYIDGGASQEEFYKFIKPILEKMDGTEELLVKLNREDLLRKQRTFDNGSIPHQIHLGELHAILRRQEDFYPFLKDNREKIEKILTFRIPYYVGPLARGNSRFAWMTRKSEETITPWNFEEVVDKGASAQSFIERMTNFDKNLPNEKVLPKHSLLYEYFTVYNELTKVKYVTEGMRKPAFLSGEQKKAIVDLLFKTNRKVTVKQLKEDYFKKIECFDSVEISGVEDRFNASLGTYHDLLKIIKDKDFLDNEENEDILEDIVLTLTLFEDREMIEERLKTYAHLFDDKVMKQLKRRRYTGWGRLSRKLINGIRDKQSGKTILDFLKSDGFANRNFMQLIHDDSLTFKEDIQKAQVSGQGDSLHEHIANLAGSPAIKKGILQTVKVVDELVKVMGRHKPENIVIEMARENQTTQKGQKNSRERMKRIEEGIKELGSQILKEHPVENTQLQNEKLYLYYLQNGRDMYVDQELDINRLSDYDVDHIVPQSFLKDDSIDNKVLTRSDKARGKSDNVPSEEVVKKMKNYWRQLLNAKLITQRKFDNLTKAERGGLSELDKAGFIKRQLVETRQITKHVAQILDSRMNTKYDENDKLIREVKVITLKSKLVSDFRKDFQFYKVREINNYHHAHDAYLNAVVGTALIKKYPKLESEFVYGDYKVYDVRKMIAKSEQEIGKATAKYFFYSNIMNFFKTEITLANGEIRKRPLIETNGETGEIVWDKGRDFATVRKVLSMPQVNIVKKTEVQTGGFSKESILPKRNSDKLIARKKDWDPKKYGGFDSPTVAYSVLVVAKVEKGKSKKLKSVKELLGITIMERSSFEKNPIDFLEAKGYKEVKKDLIIKLPKYSLFELENGRKRMLASAGELQKGNELALPSKYVNFLYLASHYEKLKGSPEDNEQKQLFVEQHKHYLDEIIEQISEFSKRVILADANLDKVLSAYNKHRDKPIREQAENIIHLFTLTNLGAPAAFKYFDTTIDRKRYTSTKEVLDATLIHQSITGLYETRIDLSQLGGDGGGSSGSSGSSGSSGGTLGDQGSRGSDPLPEPRVTLTVEGIPTEFLVNTGAEHSVLTKPMGKMGSKRTVVAGATGSKVYPWTTKRLLKIGQKQVTHSFLVIPECPAPLLGRDLLTKLKAQIQFSTEGPQVTWEDRPAMCLVLNLEEEYRLHEKPVPPSIDPSWLQLFPMVWAEKAGMGLANQVPPVVVELKSDASPVAVRQYPMSKEAREGIRPHIQRFLDLGILVPCQSPWNTPLLPVKKPGTNDYRPVQDLREVNKRVQDIHPTVPNPYNLLSSLPPSHTWYSVLDLKDAFFCLKLHPNSQPLFAFEWRDPEKGNTGQLTWTRLPQGFKNSPTLFNEALHRDLASFRALNPQVVMLQYVDDLLVAAPTYRDCKEGTRRLLQELSKLGYRVSAKKAQLCREEVTYLGYLLKGGKRWLTPARKATVMKIPTPTTPRQVREFLGKAGFCRLFIPGFASLAAPLYPLTRPKVPFTWTEAHQEAFGRIKEALLSAPALALPDLTKPFALYVDEKEGVARGVLTQTLGPWRRPVAYLSKKLDPVASGWPTCLKAIAAVALLLKDADKLTLGQNVLVIAPHNLESIVRQPPDRWMTNARMTHYQSLLLNERVSFAPPAILNPATLLPVESDDTPIHICSEILAEETGTRPDLRDQPLPGVPAWYTDGSSFIMDGRRQAGAAIVDNKRTVWASNLPEGTSAQKAELIALTQALRLAEGKSINIYTDSRYAFATAHVHGAIYKQRGWLTSAGKDIKNKEEILALLEAIHLPKRVAIIHCPGHQRGTDPVATGNRKADEAAKQAAQSTRILTETTKNAGKRTADGSEFEKRTADGSEFESPKKKAKVE

SEQ ID NO: 6322 - protein, 2097 aa, synthetic construct
MPAAKRVKLDGGDKKYSIGLDIGTNSVGWAVITDEYKVPSKKFKVLGNTDRHSIKKNLIGALLFDSGETAEATRLKRTARRRYTRRKNRICYLQEIFSNEMAKVDDSFFHRLEESFLVEEDKKHERHPIFGNIVDEVAYHEKYPTIYHLRKKLVDSTDKADLRLIYLALAHMIKFRGHFLIEGDLNPDNSDVDKLFIQLVQTYNQLFEENPINASGVDAKAILSARLSKSRRLENLIAQLPGEKKNGLFGNLIALSLGLTPNFKSNFDLAEDAKLQLSKDTYDDDLDNLLAQIGDQYADLFLAAKNLSDAILLSDILRVNTEITKAPLSASMIKRYDEHHQDLTLLKALVRQQLPEKYKEIFFDQSKNGYAGYIDGGASQEEFYKFIKPILEKMDGTEELLVKLNREDLLRKQRTFDNGSIPHQIHLGELHAILRRQEDFYPFLKDNREKIEKILTFRIPYYVGPLARGNSRFAWMTRKSEETITPWNFEEVVDKGASAQSFIERMTNFDKNLPNEKVLPKHSLLYEYFTVYNELTKVKYVTEGMRKPAFLSGEQKKAIVDLLFKTNRKVTVKQLKEDYFKKIECFDSVEISGVEDRFNASLGTYHDLLKIIKDKDFLDNEENEDILEDIVLTLTLFEDREMIEERLKTYAHLFDDKVMKQLKRRRYTGWGRLSRKLINGIRDKQSGKTILDFLKSDGFANRNFMQLIHDDSLTFKEDIQKAQVSGQGDSLHEHIANLAGSPAIKKGILQTVKVVDELVKVMGRHKPENIVIEMARENQTTQKGQKNSRERMKRIEEGIKELGSQILKEHPVENTQLQNEKLYLYYLQNGRDMYVDQELDINRLSDYDVDHIVPQSFLKDDSIDNKVLTRSDKARGKSDNVPSEEVVKKMKNYWRQLLNAKLITQRKFDNLTKAERGGLSELDKAGFIKRQLVETRQITKHVAQILDSRMNTKYDENDKLIREVKVITLKSKLVSDFRKDFQFYKVREINNYHHAHDAYLNAVVGTALIKKYPKLESEFVYGDYKVYDVRKMIAKSEQEIGKATAKYFFYSNIMNFFKTEITLANGEIRKRPLIETNGETGEIVWDKGRDFATVRKVLSMPQVNIVKKTEVQTGGFSKESILPKRNSDKLIARKKDWDPKKYGGFDSPTVAYSVLVVAKVEKGKSKKLKSVKELLGITIMERSSFEKNPIDFLEAKGYKEVKKDLIIKLPKYSLFELENGRKRMLASAGELQKGNELALPSKYVNFLYLASHYEKLKGSPEDNEQKQLFVEQHKHYLDEIIEQISEFSKRVILADANLDKVLSAYNKHRDKPIREQAENIIHLFTLTNLGAPAAFKYFDTTIDRKRYTSTKEVLDATLIHQSITGLYETRIDLSQLGGDGGGSSGSSGSSGSSGGLGIEDEYRLHETSTEPDVSLGSTWLSDFPQAWAETGGMGLAVRQAPLIIPLKATSTPVSIQQYPMSHEARLGIKPHIQRLLDQGILVPCQSPWNTPLLPVKKPGTNDYRPVQDLREVNKRVEDIHPTVPNPYNLLSGLPPSHQWYTVLDLKDAFFCLRLHPTSQPLFAFEWRDPGMGISGQLTWTRLPQGFKNSPTLFNEALHRDLADFRIQHPDLILLQYVDDILLAATSELDCQQGTRALLQTLGDLGYRASAKKAQICQKQVKYLGYLLREGQRWLTEARKETVMGQPVPKTPRQLREFLGKAGFCRLFIPGFAEMAAPLYPLTKPGTLFSWGPDQQKAYQEIKQALLTAPALGLPDLTKPFELFVDEKQGYAKGVLTQKLGPWRRPVAYLSKKLDPVAAGWPPCLRMVAAIAVLTKDAGKLTMGQPLVILAPHAVEALVKQPPDRWLSNARMTHYQAMLLDTDRVQFGPVVALNPATLLPLPEEGAPHDCLEILAETHGTRPDLTDQPIPDADHTWYTDGSSFLQEGQRKAGAAVTTETEVIWAGALPAGTSAQRAELIALTQALKMAEGKRLNVYTDSRYAFATAHIHGEIYRRRGWLTSEGREIKNKSEILALLKALFLPKRLSIIHCLGHQKGDSAEARGNRLADQAAREAAIKTPPDTSTLLIAGKRTADGSEFEKRTADGSEFESPKKKAKVE

SEQ ID NO: 6323 - protein, 2097 aa, synthetic construct
MPAAKRVKLDGGDKKYSIGLDIGTNSVGWAVITDEYKVPSKKFKVLGNTDRHSIKKNLIGALLFDSGETAEATRLKRTARRRYTRRKNRICYLQEIFSNEMAKVDDSFFHRLEESFLVEEDKKHERHPIFGNIVDEVAYHEKYPTIYHLRKKLVDSTDKADLRLIYLALAHMIKFRGHFLIEGDLNPDNSDVDKLFIQLVQTYNQLFEENPINASGVDAKAILSARLSKSRRLENLIAQLPGEKKNGLFGNLIALSLGLTPNFKSNFDLAEDAKLQLSKDTYDDDLDNLLAQIGDQYADLFLAAKNLSDAILLSDILRVNTEITKAPLSASMIKRYDEHHQDLTLLKALVRQQLPEKYKEIFFDQSKNGYAGYIDGGASQEEFYKFIKPILEKMDGTEELLVKLNREDLLRKQRTFDNGSIPHQIHLGELHAILRRQEDFYPFLKDNREKIEKILTFRIPYYVGPLARGNSRFAWMTRKSEETITPWNFEEVVDKGASAQSFIERMTNFDKNLPNEKVLPKHSLLYEYFTVYNELTKVKYVTEGMRKPAFLSGEQKKAIVDLLFKTNRKVTVKQLKEDYFKKIECFDSVEISGVEDRFNASLGTYHDLLKIIKDKDFLDNEENEDILEDIVLTLTLFEDREMIEERLKTYAHLFDDKVMKQLKRRRYTGWGRLSRKLINGIRDKQSGKTILDFLKSDGFANRNFMQLIHDDSLTFKEDIQKAQVSGQGDSLHEHIANLAGSPAIKKGILQTVKVVDELVKVMGRHKPENIVIEMARENQTTQKGQKNSRERMKRIEEGIKELGSQILKEHPVENTQLQNEKLYLYYLQNGRDMYVDQELDINRLSDYDVDHIVPQSFLKDDSIDNKVLTRSDKARGKSDNVPSEEVVKKMKNYWRQLLNAKLITQRKFDNLTKAERGGLSELDKAGFIKRQLVETRQITKHVAQILDSRMNTKYDENDKLIREVKVITLKSKLVSDFRKDFQFYKVREINNYHHAHDAYLNAVVGTALIKKYPKLESEFVYGDYKVYDVRKMIAKSEQEIGKATAKYFFYSNIMNFFKTEITLANGEIRKRPLIETNGETGEIVWDKGRDFATVRKVLSMPQVNIVKKTEVQTGGFSKESILPKRNSDKLIARKKDWDPKKYGGFDSPTVAYSVLVVAKVEKGKSKKLKSVKELLGITIMERSSFEKNPIDFLEAKGYKEVKKDLIIKLPKYSLFELENGRKRMLASAGELQKGNELALPSKYVNFLYLASHYEKLKGSPEDNEQKQLFVEQHKHYLDEIIEQISEFSKRVILADANLDKVLSAYNKHRDKPIREQAENIIHLFTLTNLGAPAAFKYFDTTIDRKRYTSTKEVLDATLIHQSITGLYETRIDLSQLGGDGGGSSGSSGSSGSSGGTLGIEDEYRLHETSTEPDVSLGSTWLSDFPQAWAETGGMGLAVRQAPLIIPLKATSTPVSIQQYPMSHEARLGIKPHIQRLLDQGILVPCQSPWNTPLLPVKKPGTNDYRPVQDLREVNKRVEDIHPTVPNPYNLLSGLPPSHQWYTVLDLKDAFFCLRLHPTSQPLFAFEWRDPGMGISGQLTWTRLPQGFKNSPTLFNEALHRDLADFRIQHPDLILLQYVDDILLAATSELDCQQGTRALLQTLGDLGYRASAKKAQICQKQVKYLGYLLREGQRWLTEARKETVMGQPVPKTPRQLREFLGTAGFCRLWIPGFAEMAAPLYPLTKPGTLFSWGPDQQKAYQEIKQALLTAPALGLPDLTKPFELFVDEKQGYAKGVLTQKLGPWRRPVAYLSKKLDPVAAGWPPCLRMVAAIAVLTKDAGKLTMGQPLVILAPHAVEALVKQPPDRWLSNARMTHYQAMLLDTDRVQFGPVVALNPATLLPLPEEGAPHDCLEILAETHGTRPDLTDQPIPDADHTWYTDGSSFLQEGQRKAGAAVTTETEVIWAGALPAGTSAQRAELIALTQALKMAEGKRLNVYTDSRYAFATAHIHGEIYRRRGWLTSEGREIKNKSEILALLKALFLPKRLSIIHCLGHQKGDSAEARGNRLADQAAREAAIKTPPDTSTLLAGKRTADGSEFEKRTADGSEFESPKKKAKVE

SEQ ID NO: 6324 - protein, 2097 aa, synthetic construct
MPAAKRVKLDGGDKKYSIGLDIGTNSVGWAVITDEYKVPSKKFKVLGNTDRHSIKKNLIGALLFDSGETAEATRLKRTARRRYTRRKNRICYLQEIFSNEMAKVDDSFFHRLEESFLVEEDKKHERHPIFGNIVDEVAYHEKYPTIYHLRKKLVDSTDKADLRLIYLALAHMIKFRGHFLIEGDLNPDNSDVDKLFIQLVQTYNQLFEENPINASGVDAKAILSARLSKSRRLENLIAQLPGEKKNGLFGNLIALSLGLTPNFKSNFDLAEDAKLQLSKDTYDDDLDNLLAQIGDQYADLFLAAKNLSDAILLSDILRVNTEITKAPLSASMIKRYDEHHQDLTLLKALVRQQLPEKYKEIFFDQSKNGYAGYIDGGASQEEFYKFIKPILEKMDGTEELLVKLNREDLLRKQRTFDNGSIPHQIHLGELHAILRRQEDFYPFLKDNREKIEKILTFRIPYYVGPLARGNSRFAWMTRKSEETITPWNFEEVVDKGASAQSFIERMTNFDKNLPNEKVLPKHSLLYEYFTVYNELTKVKYVTEGMRKPAFLSGEQKKAIVDLLFKTNRKVTVKQLKEDYFKKIECFDSVEISGVEDRFNASLGTYHDLLKIIKDKDFLDNEENEDILEDIVLTLTLFEDREMIEERLKTYAHLFDDKVMKQLKRRRYTGWGRLSRKLINGIRDKQSGKTILDFLKSDGFANRNFMQLIHDDSLTFKEDIQKAQVSGQGDSLHEHIANLAGSPAIKKGILQTVKVVDELVKVMGRHKPENIVIEMARENQTTQKGQKNSRERMKRIEEGIKELGSQILKEHPVENTQLQNEKLYLYYLQNGRDMYVDQELDINRLSDYDVDHIVPQSFLKDDSIDNKVLTRSDKARGKSDNVPSEEVVKKMKNYWRQLLNAKLITQRKFDNLTKAERGGLSELDKAGFIKRQLVETRQITKHVAQILDSRMNTKYDENDKLIREVKVITLKSKLVSDFRKDFQFYKVREINNYHHAHDAYLNAVVGTALIKKYPKLESEFVYGDYKVYDVRKMIAKSEQEIGKATAKYFFYSNIMNFFKTEITLANGEIRKRPLIETNGETGEIVWDKGRDFATVRKVLSMPQVNIVKKTEVQTGGFSKESILPKRNSDKLIARKKDWDPKKYGGFDSPTVAYSVLVVAKVEKGKSKKLKSVKELLGITIMERSSFEKNPIDFLEAKGYKEVKKDLIIKLPKYSLFELENGRKRMLASAGELQKGNELALPSKYVNFLYLASHYEKLKGSPEDNEQKQLFVEQHKHYLDEIIEQISEFSKRVILADANLDKVLSAYNKHRDKPIREQAENIIHLFTLTNLGAPAAFKYFDTTIDRKRYTSTKEVLDATLIHQSITGLYETRIDLSQLGGDGGGSSGSSGSSGSSGGTLNIEDEYRLHETSKGPDVPLGSTWLSDFPQAWAETGGMGLAVRQAPLIIPLKATSTPVSIKQYPMSQEARLGIKPHIQRLLDQGILVPCQSPWNTPLLPVKKPGTNDYRPVQDLREVNKRVEDIHPTVPNPYNLLSGLPPSHQWYTVLDLKDAFFCLRLHPTSQSLFAFEWRDPEMGISGQLTWTRLPQGFKNSPTLFNEALHRDLADFRIQHPDLILLQYVDDLLLAATSELDCQQGTRALLQTLGDLGYRASAKKAQICQKQVKYLGYLLKEGQRWLTEARKETVMGQPTPKTPRQLREFLGTAGFCRLWIPGFAEMAAPLYPLTKPGTLFEWGPDQQKAYQEIKQALLTAPALGLPDLTKPFELFVDEKQGYAKGVLTQKLGPWRRPVAYLSKKLDPVAAGWPPCLRMVAAIAVLTKDAGKLTMGQPLVILAPHAVEALVKQPPDRWLSNARMTHYQALLLDTDRVQFGPIVALNPATLLPLPEEGLQHDCLDILAEAHGTRPDLTDQPLPDADHTWYTDGSSFLQEGQRKAGAAVTTETEVVWAKALPAGTSAQRAELIALTQALKMAEGKKLNVYTDSRYAFATAHIHGEIYRRRGWLTSEGKEIKNKDEILALLKALFLPKRLSIIHCPGHQKGNRAEARGNRMADQAAREVATRETPETSTLLAGKRTADGSEFEKRTADGSEFESPKKKAKVE

SEQ ID NO: 6325 - protein, 2088 aa, synthetic construct
MPAAKRVKLDGGDKKYSIGLDIGTNSVGWAVITDEYKVPSKKFKVLGNTDRHSIKKNLIGALLFDSGETAEATRLKRTARRRYTRRKNRICYLQEIFSNEMAKVDDSFFHRLEESFLVEEDKKHERHPIFGNIVDEVAYHEKYPTIYHLRKKLVDSTDKADLRLIYLALAHMIKFRGHFLIEGDLNPDNSDVDKLFIQLVQTYNQLFEENPINASGVDAKAILSARLSKSRRLENLIAQLPGEKKNGLFGNLIALSLGLTPNFKSNFDLAEDAKLQLSKDTYDDDLDNLLAQIGDQYADLFLAAKNLSDAILLSDILRVNTEITKAPLSASMIKRYDEHHQDLTLLKALVRQQLPEKYKEIFFDQSKNGYAGYIDGGASQEEFYKFIKPILEKMDGTEELLVKLNREDLLRKQRTFDNGSIPHQIHLGELHAILRRQEDFYPFLKDNREKIEKILTFRIPYYVGPLARGNSRFAWMTRKSEETITPWNFEEVVDKGASAQSFIERMTNFDKNLPNEKVLPKHSLLYEYFTVYNELTKVKYVTEGMRKPAFLSGEQKKAIVDLLFKTNRKVTVKQLKEDYFKKIECFDSVEISGVEDRFNASLGTYHDLLKIIKDKDFLDNEENEDILEDIVLTLTLFEDREMIEERLKTYAHLFDDKVMKQLKRRRYTGWGRLSRKLINGIRDKQSGKTILDFLKSDGFANRNFMQLIHDDSLTFKEDIQKAQVSGQGDSLHEHIANLAGSPAIKKGILQTVKVVDELVKVMGRHKPENIVIEMARENQTTQKGQKNSRERMKRIEEGIKELGSQILKEHPVENTQLQNEKLYLYYLQNGRDMYVDQELDINRLSDYDVDHIVPQSFLKDDSIDNKVLTRSDKARGKSDNVPSEEVVKKMKNYWRQLLNAKLITQRKFDNLTKAERGGLSELDKAGFIKRQLVETRQITKHVAQILDSRMNTKYDENDKLIREVKVITLKSKLVSDFRKDFQFYKVREINNYHHAHDAYLNAVVGTALIKKYPKLESEFVYGDYKVYDVRKMIAKSEQEIGKATAKYFFYSNIMNFFKTEITLANGEIRKRPLIETNGETGEIVWDKGRDFATVRKVLSMPQVNIVKKTEVQTGGFSKESILPKRNSDKLIARKKDWDPKKYGGFDSPTVAYSVLVVAKVEKGKSKKLKSVKELLGITIMERSSFEKNPIDFLEAKGYKEVKKDLIIKLPKYSLFELENGRKRMLASAGELQKGNELALPSKYVNFLYLASHYEKLKGSPEDNEQKQLFVEQHKHYLDEIIEQISEFSKRVILADANLDKVLSAYNKHRDKPIREQAENIIHLFTLTNLGAPAAFKYFDTTIDRKRYTSTKEVLDATLIHQSITGLYETRIDLSQLGGDGGGSSGSSGSSGSSGGIPWLMKKPLQLTTLVPLQEYEERLLKQTMLTGSYKEKLQSLFLKYDALWQHWENQVGHRRIKPHHIATGTVNPRPQKQYPINPKAKASIQTVINDLLKQGVLIQQNSIMNTPVYPVPKPDGKWRMVLDYREVNKTIPLIAAQNQHSAGILSSIFRGKYKTTLDLSNGFWAHSITPESYWLTAFTWLGQQYCWTRLPQGFLNSPALFNADVVDLLKEVPNVQVYVDDIYISHDDPREHLEQLEKVFSLLLNAGYVVSLKKSEIAQHEVEFLGFNITKEGRGLTETFKQKLLNITPPRDLKQLQSILGLLNFARNFIPNFSELVKPLYNIIATAPGKYITWTTDNSQQLQNIISMLNSAENLEERNPEVRLIMKVNTSPSAGYIRFYNEFAKRPIMYLNYVYTKAEVKFTNTEKLLTTIHKGLIKALDLGMGQEILVYSPIVSMTKIQKTPLPERKALPIRWITWMSYLEDPRIQFHYDKTLPELQQVPTVTDDIIAKIKHPSEFSMVFYTDGSAIKHPNVNKSHNAGMGIAQVQFKPEFTVINTWSIPLGDHTAQLAEVAAVEFACKKALKIDGPVLIVTDSFYVAESVNKELPYWQSNGFFNNKKKPLKHVSKWKSIADCIQLKPDIIIIHEKGHQPTASTFHTEGNNLADKLATQGSYVVNAGKRTADGSEFEKRTADGSEFESPKKKAKVE

SEQ ID NO: 6326 - protein, 2177 aa, synthetic construct
MPAAKRVKLDGGDKKYSIGLDIGTNSVGWAVITDEYKVPSKKFKVLGNTDRHSIKKNLIGALLFDSGETAEATRLKRTARRRYTRRKNRICYLQEIFSNEMAKVDDSFFHRLEESFLVEEDKKHERHPIFGNIVDEVAYHEKYPTIYHLRKKLVDSTDKADLRLIYLALAHMIKFRGHFLIEGDLNPDNSDVDKLFIQLVQTYNQLFEENPINASGVDAKAILSARLSKSRRLENLIAQLPGEKKNGLFGNLIALSLGLTPNFKSNFDLAEDAKLQLSKDTYDDDLDNLLAQIGDQYADLFLAAKNLSDAILLSDILRVNTEITKAPLSASMIKRYDEHHQDLTLLKALVRQQLPEKYKEIFFDQSKNGYAGYIDGGASQEEFYKFIKPILEKMDGTEELLVKLNREDLLRKQRTFDNGSIPHQIHLGELHAILRRQEDFYPFLKDNREKIEKILTFRIPYYVGPLARGNSRFAWMTRKSEETITPWNFEEVVDKGASAQSFIERMTNFDKNLPNEKVLPKHSLLYEYFTVYNELTKVKYVTEGMRKPAFLSGEQKKAIVDLLFKTNRKVTVKQLKEDYFKKIECFDSVEISGVEDRFNASLGTYHDLLKIIKDKDFLDNEENEDILEDIVLTLTLFEDREMIEERLKTYAHLFDDKVMKQLKRRRYTGWGRLSRKLINGIRDKQSGKTILDFLKSDGFANRNFMQLIHDDSLTFKEDIQKAQVSGQGDSLHEHIANLAGSPAIKKGILQTVKVVDELVKVMGRHKPENIVIEMARENQTTQKGQKNSRERMKRIEEGIKELGSQILKEHPVENTQLQNEKLYLYYLQNGRDMYVDQELDINRLSDYDVDHIVPQSFLKDDSIDNKVLTRSDKARGKSDNVPSEEVVKKMKNYWRQLLNAKLITQRKFDNLTKAERGGLSELDKAGFIKRQLVETRQITKHVAQILDSRMNTKYDENDKLIREVKVITLKSKLVSDFRKDFQFYKVREINNYHHAHDAYLNAVVGTALIKKYPKLESEFVYGDYKVYDVRKMIAKSEQEIGKATAKYFFYSNIMNFFKTEITLANGEIRKRPLIETNGETGEIVWDKGRDFATVRKVLSMPQVNIVKKTEVQTGGFSKESILPKRNSDKLIARKKDWDPKKYGGFDSPTVAYSVLVVAKVEKGKSKKLKSVKELLGITIMERSSFEKNPIDFLEAKGYKEVKKDLIIKLPKYSLFELENGRKRMLASAGELQKGNELALPSKYVNFLYLASHYEKLKGSPEDNEQKQLFVEQHKHYLDEIIEQISEFSKRVILADANLDKVLSAYNKHRDKPIREQAENIIHLFTLTNLGAPAAFKYFDTTIDRKRYTSTKEVLDATLIHQSITGLYETRIDLSQLGGDGGGSSGSSGSSGSSGGMDPLQLLQPLEAEIKGTKLKAHWNSGATITCVPQAFLEEEVPIKNIWIKTIHGEKEQPVYYLTFKIQGRKVEAEVISSPYDYILVSPSDIPWLMKKPLQLTTLVPLQEYEERLLKQTMLTGSYKEKLQSLFLKYDALWQHWENQVGHRRIKPHHIATGTVNPRPQKQYPINPKAKASIQTVINDLLKQGVLIQQNSIMNTPVYPVPKPDGKWRMVLDYREVNKTIPLIAAQNQHSAGILSSIFRGKYKTTLDLSNGFWAHSITPESYWLTAFTWLGQQYCWTRLPQGFLNSPALFNADVVDLLKEVPNVQVYVDDIYISHDDPREHLEQLEKVFSLLLNAGYVVSLKKSEIAQHEVEFLGFNITKEGRGLTETFKQKLLNITPPRDLKQLQSILGKLNFARNFIPNFSELVKPLYNIIATAPGKYITWTTDNSQQLQNIISMLNSAENLEERNPEVRLIMKVNTSPSAGYIRFYNEFAKRPIMYLNYVYTKAEVKFTNTEKLLTTIHKGLIKALDLGMGQEILVYSPIVSMTKIQKTPLPERKALPIRWITWMSYLEDPRIQFHYDKTLPELQQVPTVTDDIIAKIKHPSEFSMVFYTDGSAIKHPNVNKSHNAGMGIAQVQFKPEFTVINTWSIPLGDHTAQLAEVAAVEFACKKALKIDGPVLIVTDSFYVAESVNKELPYWQSNGFFNNKKKPLKHVSKWKSIADCIQLKPDIIIIHEKGHQPTASTFHTEGNNLADKLATQGSYVVNAGKRTADGSEFEKRTADGSEFESPKKKAKVE

SEQ ID NO: 6327 - protein, 2097 aa, synthetic construct
MPAAKRVKLDGGDKKYSIGLDIGTNSVGWAVITDEYKVPSKKFKVLGNTDRHSIKKNLIGALLFDSGETAEATRLKRTARRRYTRRKNRICYLQEIFSNEMAKVDDSFFHRLEESFLVEEDKKHERHPIFGNIVDEVAYHEKYPTIYHLRKKLVDSTDKADLRLIYLALAHMIKFRGHFLIEGDLNPDNSDVDKLFIQLVQTYNQLFEENPINASGVDAKAILSARLSKSRRLENLIAQLPGEKKNGLFGNLIALSLGLTPNFKSNFDLAEDAKLQLSKDTYDDDLDNLLAQIGDQYADLFLAAKNLSDAILLSDILRVNTEITKAPLSASMIKRYDEHHQDLTLLKALVRQQLPEKYKEIFFDQSKNGYAGYIDGGASQEEFYKFIKPILEKMDGTEELLVKLNREDLLRKQRTFDNGSIPHQIHLGELHAILRRQEDFYPFLKDNREKIEKILTFRIPYYVGPLARGNSRFAWMTRKSEETITPWNFEEVVDKGASAQSFIERMTNFDKNLPNEKVLPKHSLLYEYFTVYNELTKVKYVTEGMRKPAFLSGEQKKAIVDLLFKTNRKVTVKQLKEDYFKKIECFDSVEISGVEDRFNASLGTYHDLLKIIKDKDFLDNEENEDILEDIVLTLTLFEDREMIEERLKTYAHLFDDKVMKQLKRRRYTGWGRLSRKLINGIRDKQSGKTILDFLKSDGFANRNFMQLIHDDSLTFKEDIQKAQVSGQGDSLHEHIANLAGSPAIKKGILQTVKVVDELVKVMGRHKPENIVIEMARENQTTQKGQKNSRERMKRIEEGIKELGSQILKEHPVENTQLQNEKLYLYYLQNGRDMYVDQELDINRLSDYDVDHIVPQSFLKDDSIDNKVLTRSDKARGKSDNVPSEEVVKKMKNYWRQLLNAKLITQRKFDNLTKAERGGLSELDKAGFIKRQLVETRQITKHVAQILDSRMNTKYDENDKLIREVKVITLKSKLVSDFRKDFQFYKVREINNYHHAHDAYLNAVVGTALIKKYPKLESEFVYGDYKVYDVRKMIAKSEQEIGKATAKYFFYSNIMNFFKTEITLANGEIRKRPLIETNGETGEIVWDKGRDFATVRKVLSMPQVNIVKKTEVQTGGFSKESILPKRNSDKLIARKKDWDPKKYGGFDSPTVAYSVLVVAKVEKGKSKKLKSVKELLGITIMERSSFEKNPIDFLEAKGYKEVKKDLIIKLPKYSLFELENGRKRMLASAGELQKGNELALPSKYVNFLYLASHYEKLKGSPEDNEQKQLFVEQHKHYLDEIIEQISEFSKRVILADANLDKVLSAYNKHRDKPIREQAENIIHLFTLTNLGAPAAFKYFDTTIDRKRYTSTKEVLDATLIHQSITGLYETRIDLSQLGGDGGGSSGSSGSSGSSGGTLNIEDEYRLHETSKEPDVPLGSTWLSDFPQAWAETGGMGLAVRQAPLIIPLKATSTPVSIKQYPMSQEARLGIKPHIQRLLDQGILVPCQSPWNTPLLPVKKPGTNDYRPVQDLREVNKRVEDIHPTVPNPYNLLSGLPPSHQWYTVLDLKDAFFCLRLHPTSQPLFAFEWRDPEMGISGQLTWTRLPQGFKNSPTLFNEALHRDLADFRIQHPDLILLQYVDDLLLAATSEQDCQRGTRALLQTLGNLGYRASAKKAQICQKQVKYLGYLLKEGQRWLTEARKETVMGQPTPKTPRQLREFLGTAGFCRLWIPGFAEMAAPLYPLTKPGTLFNWGPDQQKAYQEIKQALLTAPALGLPDLTKPFELFVDEKQGYAKGVLTQKLGPWRRPVAYLSKKLDPVAAGWPPCLRMVAAIAVLTKDAGKLTMGQPLVILAPHAVEALVKQPPDRWLSNARMTHYQAMLLDTDRVQFGPVVALNPATLLPLPEKEAPHDCLEILAETHGTRPDLTDQPIPDADYTWYTDGSSFLQEGQRRAGAAVTTETEVIWARALPAGTSAQRAELIALTQALKMAEGKKLNVYTDSRYAFATAHVHGEIYRRRGWLTSEGREIKNKNEILALLKALFLPKRLSIIHCPGHQKGNSAEARGNRMADQAAREAAMKAVLETSTLLAGKRTADGSEFEKRTADGSEFESPKKKAKVE

SEQ ID NO: 6328 - protein, 2102 aa, synthetic construct
MPAAKRVKLDGGDKKYSIGLDIGTNSVGWAVITDEYKVPSKKFKVLGNTDRHSIKKNLIGALLFDSGETAEATRLKRTARRRYTRRKNRICYLQEIFSNEMAKVDDSFFHRLEESFLVEEDKKHERHPIFGNIVDEVAYHEKYPTIYHLRKKLVDSTDKADLRLIYLALAHMIKFRGHFLIEGDLNPDNSDVDKLFIQLVQTYNQLFEENPINASGVDAKAILSARLSKSRRLENLIAQLPGEKKNGLFGNLIALSLGLTPNFKSNFDLAEDAKLQLSKDTYDDDLDNLLAQIGDQYADLFLAAKNLSDAILLSDILRVNTEITKAPLSASMIKRYDEHHQDLTLLKALVRQQLPEKYKEIFFDQSKNGYAGYIDGGASQEEFYKFIKPILEKMDGTEELLVKLNREDLLRKQRTFDNGSIPHQIHLGELHAILRRQEDFYPFLKDNREKIEKILTFRIPYYVGPLARGNSRFAWMTRKSEETITPWNFEEVVDKGASAQSFIERMTNFDKNLPNEKVLPKHSLLYEYFTVYNELTKVKYVTEGMRKPAFLSGEQKKAIVDLLFKTNRKVTVKQLKEDYFKKIECFDSVEISGVEDRFNASLGTYHDLLKIIKDKDFLDNEENEDILEDIVLTLTLFEDREMIEERLKTYAHLFDDKVMKQLKRRRYTGWGRLSRKLINGIRDKQSGKTILDFLKSDGFANRNFMQLIHDDSLTFKEDIQKAQVSGQGDSLHEHIANLAGSPAIKKGILQTVKVVDELVKVMGRHKPENIVIEMARENQTTQKGQKNSRERMKRIEEGIKELGSQILKEHPVENTQLQNEKLYLYYLQNGRDMYVDQELDINRLSDYDVDHIVPQSFLKDDSIDNKVLTRSDKARGKSDNVPSEEVVKKMKNYWRQLLNAKLITQRKFDNLTKAERGGLSELDKAGFIKRQLVETRQITKHVAQILDSRMNTKYDENDKLIREVKVITLKSKLVSDFRKDFQFYKVREINNYHHAHDAYLNAVVGTALIKKYPKLESEFVYGDYKVYDVRKMIAKSEQEIGKATAKYFFYSNIMNFFKTEITLANGEIRKRPLIETNGETGEIVWDKGRDFATVRKVLSMPQVNIVKKTEVQTGGFSKESILPKRNSDKLIARKKDWDPKKYGGFDSPTVAYSVLVVAKVEKGKSKKLKSVKELLGITIMERSSFEKNPIDFLEAKGYKEVKKDLIIKLPKYSLFELENGRKRMLASAGELQKGNELALPSKYVNFLYLASHYEKLKGSPEDNEQKQLFVEQHKHYLDEIIEQISEFSKRVILADANLDKVLSAYNKHRDKPIREQAENIIHLFTLTNLGAPAAFKYFDTTIDRKRYTSTKEVLDATLIHQSITGLYETRIDLSQLGGDGGGSSGSSGSSGSSGSSGGTAPLEEEYRLFLEAPIQNVTLLEQWKREIPKVWAEINPPGLASTQAPIHVQLLSTALPVRVRQYPITLEAKRSLRETIRKFRAAGILRPVHSPWNTPLLPVRKSGTSEYRMVQDLREVNKRVETIHPTVPNPYTLLSLLPPDRIWYSVLDLKDAFFCIPLAPESQLIFAFEWADAEEGESGQLTWTRLPQGFKNSPTLFDEALNRDLQGFRLDHPSVSLLQYVDDLLIAADTQAACLSATRDLLMTLAELGYRVSGKKAQLCQEEVTYLGFKIHKGSRSLSNSRTQAILQIPVPKTKRQVREFLGTIGYCRLWIPGFAELAQPLYAATRGGNDPLVWGEKEEEAFQSLKLALTQPPALALPSLDKPFQLFVEETSGAAKGVLTQALGPWKRPVAYLSKRLDPVAAGWPRCLRAIAAAALLTREASKLTFGQDIEITSSHNLESLLRSPPDKWLTNARITQYQVLLLDPPRVRFKQTAALNPATLLPETDDTLPIHHCLDTLDSLTSTRPDLTDQPLAQAEATLFTDGSSYIRDGKRYAGAAVVTLDSVIWAEPLPIGTSAQKAELIALTKALEWSKDKSVNIYTDSRYAFATLHVHGMIYRERGLLTAGGKAIKNAPEILALLTAVWLPKRVAVMHCKGHQKDDAPTSTGNRRADEVAREVAIRPLSTQATISAGKRTADGSEFEKRTADGSEFESPKKKAKVE

SEQ ID NO: 6329 - protein, 2102 aa, synthetic construct
MPAAKRVKLDGGDKKYSIGLDIGTNSVGWAVITDEYKVPSKKFKVLGNTDRHSIKKNLIGALLFDSGETAEATRLKRTARRRYTRRKNRICYLQEIFSNEMAKVDDSFFHRLEESFLVEEDKKHERHPIFGNIVDEVAYHEKYPTIYHLRKKLVDSTDKADLRLIYLALAHMIKFRGHFLIEGDLNPDNSDVDKLFIQLVQTYNQLFEENPINASGVDAKAILSARLSKSRRLENLIAQLPGEKKNGLFGNLIALSLGLTPNFKSNFDLAEDAKLQLSKDTYDDDLDNLLAQIGDQYADLFLAAKNLSDAILLSDILRVNTEITKAPLSASMIKRYDEHHQDLTLLKALVRQQLPEKYKEIFFDQSKNGYAGYIDGGASQEEFYKFIKPILEKMDGTEELLVKLNREDLLRKQRTFDNGSIPHQIHLGELHAILRRQEDFYPFLKDNREKIEKILTFRIPYYVGPLARGNSRFAWMTRKSEETITPWNFEEVVDKGASAQSFIERMTNFDKNLPNEKVLPKHSLLYEYFTVYNELTKVKYVTEGMRKPAFLSGEQKKAIVDLLFKTNRKVTVKQLKEDYFKKIECFDSVEISGVEDRFNASLGTYHDLLKIIKDKDFLDNEENEDILEDIVLTLTLFEDREMIEERLKTYAHLFDDKVMKQLKRRRYTGWGRLSRKLINGIRDKQSGKTILDFLKSDGFANRNFMQLIHDDSLTFKEDIQKAQVSGQGDSLHEHIANLAGSPAIKKGILQTVKVVDELVKVMGRHKPENIVIEMARENQTTQKGQKNSRERMKRIEEGIKELGSQILKEHPVENTQLQNEKLYLYYLQNGRDMYVDQELDINRLSDYDVDHIVPQSFLKDDSIDNKVLTRSDKARGKSDNVPSEEVVKKMKNYWRQLLNAKLITQRKFDNLTKAERGGLSELDKAGFIKRQLVETRQITKHVAQILDSRMNTKYDENDKLIREVKVITLKSKLVSDFRKDFQFYKVREINNYHHAHDAYLNAVVGTALIKKYPKLESEFVYGDYKVYDVRKMIAKSEQEIGKATAKYFFYSNIMNFFKTEITLANGEIRKRPLIETNGETGEIVWDKGRDFATVRKVLSMPQVNIVKKTEVQTGGFSKESILPKRNSDKLIARKKDWDPKKYGGFDSPTVAYSVLVVAKVEKGKSKKLKSVKELLGITIMERSSFEKNPIDFLEAKGYKEVKKDLIIKLPKYSLFELENGRKRMLASAGELQKGNELALPSKYVNFLYLASHYEKLKGSPEDNEQKQLFVEQHKHYLDEIIEQISEFSKRVILADANLDKVLSAYNKHRDKPIREQAENIIHLFTLTNLGAPAAFKYFDTTIDRKRYTSTKEVLDATLIHQSITGLYETRIDLSQLGGDGGGSSGSSGSSGSSGSSGGTAPLEEEYRLFLEAPIQNVTLLEQWKREIPKVWAEINPPGLASTQAPIHVQLLSTALPVRVRQYPITLEAKRSLRETIRKFRAAGILRPVHSPWNTPLLPVRKSGTSEYRMVQDLREVNKRVETIHPTVPNPYTLLSLLPPDRIWYSVLDLKDAFFCIPLAPESQLIFAFEWADAEEGESGQLTWTRLPQGFKNSPTLFNEALNRDLQGFRLDHPSVSLLQYVDDLLIAADTQAACLSATRDLLMTLAELGYRVSGKKAQLCQEEVTYLGFKIHKGSRSLSNSRTQAILQIPVPKTKRQVREFLGKIGYCRLFIPGFAELAQPLYAATRPGNDPLVWGEKEEEAFQSLKLALTQPPALALPSLDKPFQLFVEETSGAAKGVLTQALGPWKRPVAYLSKRLDPVAAGWPRCLRAIAAAALLTREASKLTFGQDIEITSSHNLESLLRSPPDKWLTNARITQYQVLLLDPPRVRFKQTAALNPATLLPETDDTLPIHHCLDTLDSLTSTRPDLTDQPLAQAEATLFTDGSSYIRDGKRYAGAAVVTLDSVIWAEPLPIGTSAQKAELIALTKALEWSKDKSVNIYTDSRYAFATLHVHGMIYRERGWLTAGGKAIKNAPEILALLTAVWLPKRVAVMHCKGHQKDDAPTSTGNRRADEVAREVAIRPLSTQATISAGKRTADGSEFEKRTADGSEFESPKKKAKVE

SEQ ID NO: 6330 - protein, 2131 aa, synthetic construct
MPAAKRVKLDGGDKKYSIGLDIGTNSVGWAVITDEYKVPSKKFKVLGNTDRHSIKKNLIGALLFDSGETAEATRLKRTARRRYTRRKNRICYLQEIFSNEMAKVDDSFFHRLEESFLVEEDKKHERHPIFGNIVDEVAYHEKYPTIYHLRKKLVDSTDKADLRLIYLALAHMIKFRGHFLIEGDLNPDNSDVDKLFIQLVQTYNQLFEENPINASGVDAKAILSARLSKSRRLENLIAQLPGEKKNGLFGNLIALSLGLTPNFKSNFDLAEDAKLQLSKDTYDDDLDNLLAQIGDQYADLFLAAKNLSDAILLSDILRVNTEITKAPLSASMIKRYDEHHQDLTLLKALVRQQLPEKYKEIFFDQSKNGYAGYIDGGASQEEFYKFIKPILEKMDGTEELLVKLNREDLLRKQRTFDNGSIPHQIHLGELHAILRRQEDFYPFLKDNREKIEKILTFRIPYYVGPLARGNSRFAWMTRKSEETITPWNFEEVVDKGASAQSFIERMTNFDKNLPNEKVLPKHSLLYEYFTVYNELTKVKYVTEGMRKPAFLSGEQKKAIVDLLFKTNRKVTVKQLKEDYFKKIECFDSVEISGVEDRFNASLGTYHDLLKIIKDKDFLDNEENEDILEDIVLTLTLFEDREMIEERLKTYAHLFDDKVMKQLKRRRYTGWGRLSRKLINGIRDKQSGKTILDFLKSDGFANRNFMQLIHDDSLTFKEDIQKAQVSGQGDSLHEHIANLAGSPAIKKGILQTVKVVDELVKVMGRHKPENIVIEMARENQTTQKGQKNSRERMKRIEEGIKELGSQILKEHPVENTQLQNEKLYLYYLQNGRDMYVDQELDINRLSDYDVDHIVPQSFLKDDSIDNKVLTRSDKARGKSDNVPSEEVVKKMKNYWRQLLNAKLITQRKFDNLTKAERGGLSELDKAGFIKRQLVETRQITKHVAQILDSRMNTKYDENDKLIREVKVITLKSKLVSDFRKDFQFYKVREINNYHHAHDAYLNAVVGTALIKKYPKLESEFVYGDYKVYDVRKMIAKSEQEIGKATAKYFFYSNIMNFFKTEITLANGEIRKRPLIETNGETGEIVWDKGRDFATVRKVLSMPQVNIVKKTEVQTGGFSKESILPKRNSDKLIARKKDWDPKKYGGFDSPTVAYSVLVVAKVEKGKSKKLKSVKELLGITIMERSSFEKNPIDFLEAKGYKEVKKDLIIKLPKYSLFELENGRKRMLASAGELQKGNELALPSKYVNFLYLASHYEKLKGSPEDNEQKQLFVEQHKHYLDEIIEQISEFSKRVILADANLDKVLSAYNKHRDKPIREQAENIIHLFTLTNLGAPAAFKYFDTTIDRKRYTSTKEVLDATLIHQSITGLYETRIDLSQLGGDGGGSSGSSGSSGSSGSSGGLLGRDLLTKLKAQIQFSTEGPQVTWEDRPAMCLVLNLEEEYRLHEKPVPPSIDPSWLQLFPMVWAEKAGMGLANQVPPVVVELKSDASPVAVRQYPMSKEAREGIRPHIQRFLDLGILVPCQSPWNTPLLPVKKPGTNDYRPVQDLREVNKRVQDIHPTVPNPYNLLSSLPPSHTWYSVLDLKDAFFCLKLHPNSQPLFAFEWRDPEKGNTGQLTWTRLPQGFKNSPTLFDEALHRDLASFRALNPQVVMLQYVDDLLVAAPTYRDCKEGTRRLLQELSKLGYRVSAKKAQLCREEVTYLGYLLKGGKRWLTPARKATVMKIPTPTTPRQVREFLGTAGFCRLWIPGFASLAAPLYPLTREKVPFTWTEAHQEAFGRIKEALLSAPALALPDLTKPFALYVDEKEGVARGVLTQTLGPWRRPVAYLSKKLDPVASGWPTCLKAIAAVALLLKDADKLTLGQNVLVIAPHNLESIVRQPPDRWMTNARMTHYQSLLLNERVSFAPPAILNPATLLPVESDDTPIHICSEILAEETGTRPDLRDQPLPGVPAWYTDGSSFIMDGRRQAGAAIVDNKRTVWASNLPEGTSAQKAELIALTQALRLAEGKSINIYTDSRYAFATAHVHGAIYKQRGLLTSAGKDIKNKEEILALLEAIHLPKRVAIIHCPGHQRGTDPVATGNRKADEAAKQAAQSTRILTETTKNAGKRTADGSEFEKRTADGSEFESPKKKAKVE

SEQ ID NO: 6331 - protein, 2222 aa, synthetic construct
MPAAKRVKLDGGDKKYSIGLDIGTNSVGWAVITDEYKVPSKKFKVLGNTDRHSIKKNLIGALLFDSGETAEATRLKRTARRRYTRRKNRICYLQEIFSNEMAKVDDSFFHRLEESFLVEEDKKHERHPIFGNIVDEVAYHEKYPTIYHLRKKLVDSTDKADLRLIYLALAHMIKFRGHFLIEGDLNPDNSDVDKLFIQLVQTYNQLFEENPINASGVDAKAILSARLSKSRRLENLIAQLPGEKKNGLFGNLIALSLGLTPNFKSNFDLAEDAKLQLSKDTYDDDLDNLLAQIGDQYADLFLAAKNLSDAILLSDILRVNTEITKAPLSASMIKRYDEHHQDLTLLKALVRQQLPEKYKEIFFDQSKNGYAGYIDGGASQEEFYKFIKPILEKMDGTEELLVKLNREDLLRKQRTFDNGSIPHQIHLGELHAILRRQEDFYPFLKDNREKIEKILTFRIPYYVGPLARGNSRFAWMTRKSEETITPWNFEEVVDKGASAQSFIERMTNFDKNLPNEKVLPKHSLLYEYFTVYNELTKVKYVTEGMRKPAFLSGEQKKAIVDLLFKTNRKVTVKQLKEDYFKKIECFDSVEISGVEDRFNASLGTYHDLLKIIKDKDFLDNEENEDILEDIVLTLTLFEDREMIEERLKTYAHLFDDKVMKQLKRRRYTGWGRLSRKLINGIRDKQSGKTILDFLKSDGFANRNFMQLIHDDSLTFKEDIQKAQVSGQGDSLHEHIANLAGSPAIKKGILQTVKVVDELVKVMGRHKPENIVIEMARENQTTQKGQKNSRERMKRIEEGIKELGSQILKEHPVENTQLQNEKLYLYYLQNGRDMYVDQELDINRLSDYDVDHIVPQSFLKDDSIDNKVLTRSDKARGKSDNVPSEEVVKKMKNYWRQLLNAKLITQRKFDNLTKAERGGLSELDKAGFIKRQLVETRQITKHVAQILDSRMNTKYDENDKLIREVKVITLKSKLVSDFRKDFQFYKVREINNYHHAHDAYLNAVVGTALIKKYPKLESEFVYGDYKVYDVRKMIAKSEQEIGKATAKYFFYSNIMNFFKTEITLANGEIRKRPLIETNGETGEIVWDKGRDFATVRKVLSMPQVNIVKKTEVQTGGFSKESILPKRNSDKLIARKKDWDPKKYGGFDSPTVAYSVLVVAKVEKGKSKKLKSVKELLGITIMERSSFEKNPIDFLEAKGYKEVKKDLIIKLPKYSLFELENGRKRMLASAGELQKGNELALPSKYVNFLYLASHYEKLKGSPEDNEQKQLFVEQHKHYLDEIIEQISEFSKRVILADANLDKVLSAYNKHRDKPIREQAENIIHLFTLTNLGAPAAFKYFDTTIDRKRYTSTKEVLDATLIHQSITGLYETRIDLSQLGGDGGGSSGSSGSSGSSGSSGGTLGDQGSRGSDPLPEPRVTLTVEGIPTEFLVNTGAEHSVLTKPMGKMGSKRTVVAGATGSKVYPWTTKRLLKIGQKQVTHSFLVIPECPAPLLGRDLLTKLKAQIQFSTEGPQVTWEDRPAMCLVLNLEEEYRLHEKPVPPSIDPSWLQLFPMVWAEKAGMGLANQVPPVVVELKSDASPVAVRQYPMSKEAREGIRPHIQRFLDLGILVPCQSPWNTPLLPVKKPGTNDYRPVQDLREVNKRVQDIHPTVPNPYNLLSSLPPSHTWYSVLDLKDAFFCLKLHPNSQPLFAFEWRDPEKGNTGQLTWTRLPQGFKNSPTLFNEALHRDLASFRALNPQVVMLQYVDDLLVAAPTYRDCKEGTRRLLQELSKLGYRVSAKKAQLCREEVTYLGYLLKGGKRWLTPARKATVMKIPTPTTPRQVREFLGTAGFCRLWIPGFASLAAPLYPLTRPKVPFTWTEAHQEAFGRIKEALLSAPALALPDLTKPFALYVDEKEGVARGVLTQTLGPWRRPVAYLSKKLDPVASGWPTCLKAIAAVALLLKDADKLTLGQNVLVIAPHNLESIVRQPPDRWMTNARMTHYQSLLLNERVSFAPPAILNPATLLPVESDDTPIHICSEILAEETGTRPDLRDQPLPGVPAWYTDGSSFIMDGRRQAGAAIVDNKRTVWASNLPEGTSAQKAELIALTQALRLAEGKSINIYTDSRYAFATAHVHGAIYKQRGWLTSAGKDIKNKEEILALLEAIHLPKRVAIIHCPGHQRGTDPVATGNRKADEAAKQAAQSTRILTETTKNAGKRTADGSEFEKRTADGSEFESPKKKAKVE

SEQ ID NO: 6332 - protein, 2100 aa, synthetic construct
MPAAKRVKLDGGDKKYSIGLDIGTNSVGWAVITDEYKVPSKKFKVLGNTDRHSIKKNLIGALLFDSGETAEATRLKRTARRRYTRRKNRICYLQEIFSNEMAKVDDSFFHRLEESFLVEEDKKHERHPIFGNIVDEVAYHEKYPTIYHLRKKLVDSTDKADLRLIYLALAHMIKFRGHFLIEGDLNPDNSDVDKLFIQLVQTYNQLFEENPINASGVDAKAILSARLSKSRRLENLIAQLPGEKKNGLFGNLIALSLGLTPNFKSNFDLAEDAKLQLSKDTYDDDLDNLLAQIGDQYADLFLAAKNLSDAILLSDILRVNTEITKAPLSASMIKRYDEHHQDLTLLKALVRQQLPEKYKEIFFDQSKNGYAGYIDGGASQEEFYKFIKPILEKMDGTEELLVKLNREDLLRKQRTFDNGSIPHQIHLGELHAILRRQEDFYPFLKDNREKIEKILTFRIPYYVGPLARGNSRFAWMTRKSEETITPWNFEEVVDKGASAQSFIERMTNFDKNLPNEKVLPKHSLLYEYFTVYNELTKVKYVTEGMRKPAFLSGEQKKAIVDLLFKTNRKVTVKQLKEDYFKKIECFDSVEISGVEDRFNASLGTYHDLLKIIKDKDFLDNEENEDILEDIVLTLTLFEDREMIEERLKTYAHLFDDKVMKQLKRRRYTGWGRLSRKLINGIRDKQSGKTILDFLKSDGFANRNFMQLIHDDSLTFKEDIQKAQVSGQGDSLHEHIANLAGSPAIKKGILQTVKVVDELVKVMGRHKPENIVIEMARENQTTQKGQKNSRERMKRIEEGIKELGSQILKEHPVENTQLQNEKLYLYYLQNGRDMYVDQELDINRLSDYDVDHIVPQSFLKDDSIDNKVLTRSDKARGKSDNVPSEEVVKKMKNYWRQLLNAKLITQRKFDNLTKAERGGLSELDKAGFIKRQLVETRQITKHVAQILDSRMNTKYDENDKLIREVKVITLKSKLVSDFRKDFQFYKVREINNYHHAHDAYLNAVVGTALIKKYPKLESEFVYGDYKVYDVRKMIAKSEQEIGKATAKYFFYSNIMNFFKTEITLANGEIRKRPLIETNGETGEIVWDKGRDFATVRKVLSMPQVNIVKKTEVQTGGFSKESILPKRNSDKLIARKKDWDPKKYGGFDSPTVAYSVLVVAKVEKGKSKKLKSVKELLGITIMERSSFEKNPIDFLEAKGYKEVKKDLIIKLPKYSLFELENGRKRMLASAGELQKGNELALPSKYVNFLYLASHYEKLKGSPEDNEQKQLFVEQHKHYLDEIIEQISEFSKRVILADANLDKVLSAYNKHRDKPIREQAENIIHLFTLTNLGAPAAFKYFDTTIDRKRYTSTKEVLDATLIHQSITGLYETRIDLSQLGGDGGGSSGSSGSSGSSGSSGGTLNLEDEYRLYETSAEPEVSPGSTWLSDFPQAWAETGGMGLAVRQAPLIIPLKATSTPVSIKQYPMSQEAKLGIKPHIQRLLDQGILVPCQSPWNTPLLPVKKPGTNDYRPVQDLREVNKRVEDIHPTVPNPYNLLSGLPPSHRWYTVLDLKDAFFCLRLHPTSQPLFAFEWRDPGMGISGQLTWTRLPQGFKNSPTLFNEALHRDLADFRIQHPDLILLQYVDDILLAATSELDCQQGTRALLLTLGNLGYRASAKKAQLCQKQVKYLGYLLKEGQRWLTEARKETVMGQPTPKTPRQLREFLGTAGFCRLWIPGFAEMAAPLYPLTKPGTLFNWGPDQQKAYQEIKQALLTAPALGLPDLTKPFELFVDEKQGYAKGVLTQKLGPWRRPVAYLSKKLDPVAAGWPPCLRMVAAIAVLRKDAGKLTMGQPLVILAPHAVEALVKQPPDRWLSNARMTHYQAMLLDTDRVQFGPVVALNPATLLPLPEEGAPHDCLEILAETHGTRPDLTDQPIPDADHTWYTDGSSFLQEGQRKAGAAVTTETEVIWARALPAGTSAQRAELIALTQALKMAEGKRLNVYTDSRYAFATAHIHGEIYRRRGWLTSEGREIKNKSEILALLKALFLPKRLSIIHCLGHQKGDSAEARGNRLADQAAREAAIKTPPDTSTLLAGKRTADGSEFEKRTADGSEFESPKKKAKVE

SEQ ID NO: 6333 - protein, 2100 aa, synthetic construct
MPAAKRVKLDGGDKKYSIGLDIGTNSVGWAVITDEYKVPSKKFKVLGNTDRHSIKKNLIGALLFDSGETAEATRLKRTARRRYTRRKNRICYLQEIFSNEMAKVDDSFFHRLEESFLVEEDKKHERHPIFGNIVDEVAYHEKYPTIYHLRKKLVDSTDKADLRLIYLALAHMIKFRGHFLIEGDLNPDNSDVDKLFIQLVQTYNQLFEENPINASGVDAKAILSARLSKSRRLENLIAQLPGEKKNGLFGNLIALSLGLTPNFKSNFDLAEDAKLQLSKDTYDDDLDNLLAQIGDQYADLFLAAKNLSDAILLSDILRVNTEITKAPLSASMIKRYDEHHQDLTLLKALVRQQLPEKYKEIFFDQSKNGYAGYIDGGASQEEFYKFIKPILEKMDGTEELLVKLNREDLLRKQRTFDNGSIPHQIHLGELHAILRRQEDFYPFLKDNREKIEKILTFRIPYYVGPLARGNSRFAWMTRKSEETITPWNFEEVVDKGASAQSFIERMTNFDKNLPNEKVLPKHSLLYEYFTVYNELTKVKYVTEGMRKPAFLSGEQKKAIVDLLFKTNRKVTVKQLKEDYFKKIECFDSVEISGVEDRFNASLGTYHDLLKIIKDKDFLDNEENEDILEDIVLTLTLFEDREMIEERLKTYAHLFDDKVMKQLKRRRYTGWGRLSRKLINGIRDKQSGKTILDFLKSDGFANRNFMQLIHDDSLTFKEDIQKAQVSGQGDSLHEHIANLAGSPAIKKGILQTVKVVDELVKVMGRHKPENIVIEMARENQTTQKGQKNSRERMKRIEEGIKELGSQILKEHPVENTQLQNEKLYLYYLQNGRDMYVDQELDINRLSDYDVDHIVPQSFLKDDSIDNKVLTRSDKARGKSDNVPSEEVVKKMKNYWRQLLNAKLITQRKFDNLTKAERGGLSELDKAGFIKRQLVETRQITKHVAQILDSRMNTKYDENDKLIREVKVITLKSKLVSDFRKDFQFYKVREINNYHHAHDAYLNAVVGTALIKKYPKLESEFVYGDYKVYDVRKMIAKSEQEIGKATAKYFFYSNIMNFFKTEITLANGEIRKRPLIETNGETGEIVWDKGRDFATVRKVLSMPQVNIVKKTEVQTGGFSKESILPKRNSDKLIARKKDWDPKKYGGFDSPTVAYSVLVVAKVEKGKSKKLKSVKELLGITIMERSSFEKNPIDFLEAKGYKEVKKDLIIKLPKYSLFELENGRKRMLASAGELQKGNELALPSKYVNFLYLASHYEKLKGSPEDNEQKQLFVEQHKHYLDEIIEQISEFSKRVILADANLDKVLSAYNKHRDKPIREQAENIIHLFTLTNLGAPAAFKYFDTTIDRKRYTSTKEVLDATLIHQSITGLYETRIDLSQLGGDGGGSSGSSGSSGSSGSSGGTLGIEDEYRLHETSTEPDVSLGSTWLSDFPQAWAETGGMGLAVRQAPLIIPLKATSTPVSIQQYPMSHEARLGIKPHIQRLLDQGILVPCQSPWNTPLLPVKKPGTNDYRPVQDLREVNKRVEDIHPTVPNPYNLLSGLPPSHQWYTVLDLKDAFFCLRLHPTSQPLFAFEWRDPGMGISGQLTWTRLPQGFKNSPTLFNEALHRDLADFRIQHPDLILLQYVDDILLAATSELDCQQGTRALLQTLGDLGYRASAKKAQICQKQVKYLGYLLREGQRWLTEARKETVMGQPVPKTPRQLREFLGTAGFCRLWIPGFAEMAAPLYPLTKPGTLFSWGPDQQKAYQEIKQALLTAPALGLPDLTKPFELFVDEKQGYAKGVLTQKLGPWRRPVAYLSKKLDPVAAGWPPCLRMVAAIAVLTKDAGKLTMGQPLVILAPHAVEALVKQPPDRWLSNARMTHYQAMLLDTDRVQFGPVVALNPATLLPLPEEGAPHDCLEILAETHGTRPDLTDQPIPDADHTWYTDGSSFLQEGQRKAGAAVTTETEVIWAGALPAGTSAQRAELIALTQALKMAEGKRLNVYTDSRYAFATAHIHGEIYRRRGWLTSEGREIKNKSEILALLKALFLPKRLSIIHCLGHQKGDSAEARGNRLADQAAREAAIKTPPDTSTLLAGKRTADGSEFEKRTADGSEFESPKKKAKVE

SEQ ID NO: 6334 - protein, 2100 aa, synthetic construct
MPAAKRVKLDGGDKKYSIGLDIGTNSVGWAVITDEYKVPSKKFKVLGNTDRHSIKKNLIGALLFDSGETAEATRLKRTARRRYTRRKNRICYLQEIFSNEMAKVDDSFFHRLEESFLVEEDKKHERHPIFGNIVDEVAYHEKYPTIYHLRKKLVDSTDKADLRLIYLALAHMIKFRGHFLIEGDLNPDNSDVDKLFIQLVQTYNQLFEENPINASGVDAKAILSARLSKSRRLENLIAQLPGEKKNGLFGNLIALSLGLTPNFKSNFDLAEDAKLQLSKDTYDDDLDNLLAQIGDQYADLFLAAKNLSDAILLSDILRVNTEITKAPLSASMIKRYDEHHQDLTLLKALVRQQLPEKYKEIFFDQSKNGYAGYIDGGASQEEFYKFIKPILEKMDGTEELLVKLNREDLLRKQRTFDNGSIPHQIHLGELHAILRRQEDFYPFLKDNREKIEKILTFRIPYYVGPLARGNSRFAWMTRKSEETITPWNFEEVVDKGASAQSFIERMTNFDKNLPNEKVLPKHSLLYEYFTVYNELTKVKYVTEGMRKPAFLSGEQKKAIVDLLFKTNRKVTVKQLKEDYFKKIECFDSVEISGVEDRFNASLGTYHDLLKIIKDKDFLDNEENEDILEDIVLTLTLFEDREMIEERLKTYAHLFDDKVMKQLKRRRYTGWGRLSRKLINGIRDKQSGKTILDFLKSDGFANRNFMQLIHDDSLTFKEDIQKAQVSGQGDSLHEHIANLAGSPAIKKGILQTVKVVDELVKVMGRHKPENIVIEMARENQTTQKGQKNSRERMKRIEEGIKELGSQILKEHPVENTQLQNEKLYLYYLQNGRDMYVDQELDINRLSDYDVDHIVPQSFLKDDSIDNKVLTRSDKARGKSDNVPSEEVVKKMKNYWRQLLNAKLITQRKFDNLTKAERGGLSELDKAGFIKRQLVETRQITKHVAQILDSRMNTKYDENDKLIREVKVITLKSKLVSDFRKDFQFYKVREINNYHHAHDAYLNAVVGTALIKKYPKLESEFVYGDYKVYDVRKMIAKSEQEIGKATAKYFFYSNIMNFFKTEITLANGEIRKRPLIETNGETGEIVWDKGRDFATVRKVLSMPQVNIVKKTEVQTGGFSKESILPKRNSDKLIARKKDWDPKKYGGFDSPTVAYSVLVVAKVEKGKSKKLKSVKELLGITIMERSSFEKNPIDFLEAKGYKEVKKDLIIKLPKYSLFELENGRKRMLASAGELQKGNELALPSKYVNFLYLASHYEKLKGSPEDNEQKQLFVEQHKHYLDEIIEQISEFSKRVILADANLDKVLSAYNKHRDKPIREQAENIIHLFTLTNLGAPAAFKYFDTTIDRKRYTSTKEVLDATLIHQSITGLYETRIDLSQLGGDGGGSSGSSGSSGSSGSSGGTLNIEDEYRLHEISTEPDVSPGSTWLSDFPQAWAETGGMGLAVRQAPLIIPLKATSTPVSIKQYPMSQEAKLGIKPHIQRLLDQGILVPCQSPWNTPLLPVKKPGTNDYRPVQGLREVNKRVEDIHPTVPNPYNLLSGLPTSHRWYTVLDLKDAFFCLRLHPTSQPLFASEWRDPGMGISGQLTWTRLPQGFKNSPTLFDEALHRGLADFRIQHPDLILLQYVDDLLLAATSELDCQQGTRALLKTLGNLGYRASAKKAQICQKQVKYLGYLLREGQRWLTEARKETVMGQPTPKTPRQLREFLGTAGFCRLWIPRFAEMAAPLYPLTKTGTLFNWGPDQQKAYHEIKQALLTAPALGLPDLTKPFELFVDEKQGYAKGVLTQKLGPWRRPVAYLSKKLDPVAAGWPPCLRMVAAIAVLTKDAGKLTMGQPLVILAPHAVEALVKQPPDRWLSNARMTHYQAMLLDTDRVQFGPVVALNPATLLPLPEEGAPHDCLEILAETHGTEPDLTDQPIPDADHTWYTDGSSFLQEGQRKAGAAVTTETEVIWARALPAGTSAQRAELIALTQALKMAEGKRLNVYTDSRYAFATAHIHGEIYKRRGLLTSEGREIKNKSEILALLKALFLPKRLSIIHCLGHQKGDSAEARGNRLADQAAREAAIKTPPDTSTLLAGKRTADGSEFEKRTADGSEFESPKKKAKVE

SEQ ID NO: 6335 - protein, 2100 aa, synthetic construct
MPAAKRVKLDGGDKKYSIGLDIGTNSVGWAVITDEYKVPSKKFKVLGNTDRHSIKKNLIGALLFDSGETAEATRLKRTARRRYTRRKNRICYLQEIFSNEMAKVDDSFFHRLEESFLVEEDKKHERHPIFGNIVDEVAYHEKYPTIYHLRKKLVDSTDKADLRLIYLALAHMIKFRGHFLIEGDLNPDNSDVDKLFIQLVQTYNQLFEENPINASGVDAKAILSARLSKSRRLENLIAQLPGEKKNGLFGNLIALSLGLTPNFKSNFDLAEDAKLQLSKDTYDDDLDNLLAQIGDQYADLFLAAKNLSDAILLSDILRVNTEITKAPLSASMIKRYDEHHQDLTLLKALVRQQLPEKYKEIFFDQSKNGYAGYIDGGASQEEFYKFIKPILEKMDGTEELLVKLNREDLLRKQRTFDNGSIPHQIHLGELHAILRRQEDFYPFLKDNREKIEKILTFRIPYYVGPLARGNSRFAWMTRKSEETITPWNFEEVVDKGASAQSFIERMTNFDKNLPNEKVLPKHSLLYEYFTVYNELTKVKYVTEGMRKPAFLSGEQKKAIVDLLFKTNRKVTVKQLKEDYFKKIECFDSVEISGVEDRFNASLGTYHDLLKIIKDKDFLDNEENEDILEDIVLTLTLFEDREMIEERLKTYAHLFDDKVMKQLKRRRYTGWGRLSRKLINGIRDKQSGKTILDFLKSDGFANRNFMQLIHDDSLTFKEDIQKAQVSGQGDSLHEHIANLAGSPAIKKGILQTVKVVDELVKVMGRHKPENIVIEMARENQTTQKGQKNSRERMKRIEEGIKELGSQILKEHPVENTQLQNEKLYLYYLQNGRDMYVDQELDINRLSDYDVDHIVPQSFLKDDSIDNKVLTRSDKARGKSDNVPSEEVVKKMKNYWRQLLNAKLITQRKFDNLTKAERGGLSELDKAGFIKRQLVETRQITKHVAQILDSRMNTKYDENDKLIREVKVITLKSKLVSDFRKDFQFYKVREINNYHHAHDAYLNAVVGTALIKKYPKLESEFVYGDYKVYDVRKMIAKSEQEIGKATAKYFFYSNIMNFFKTEITLANGEIRKRPLIETNGETGEIVWDKGRDFATVRKVLSMPQVNIVKKTEVQTGGFSKESILPKRNSDKLIARKKDWDPKKYGGFDSPTVAYSVLVVAKVEKGKSKKLKSVKELLGITIMERSSFEKNPIDFLEAKGYKEVKKDLIIKLPKYSLFELENGRKRMLASAGELQKGNELALPSKYVNFLYLASHYEKLKGSPEDNEQKQLFVEQHKHYLDEIIEQISEFSKRVILADANLDKVLSAYNKHRDKPIREQAENIIHLFTLTNLGAPAAFKYFDTTIDRKRYTSTKEVLDATLIHQSITGLYETRIDLSQLGGDGGGSSGSSGSSGSSGSSGGTLNIEDEYRLHEISTEPDVSPGSTWLSDFPQAWAETGGMGLAVRQAPLIIPLKATSTPVSIKQYPMSQEAKLGIKPHIQRLLDQGILVPCQSPWNTPLLPVKKPGTNDYRPVQGLREVNKRVEDIHPTVPNPYNLLSGLPTSHRWYTVLDLKDAFFCLRLHPTSQPLFASEWRDPGMGISGQLTWTRLPQGFKNSPTLFNEALHRGLADFRIQHPDLILLQYVDDLLLAATSELDCQQGTRALLKTLGNLGYRASAKKAQICQKQVKYLGYLLREGQRWLTEARKETVMGQPTPKTPRQLREFLGTAGFCRLWIPRFAEMAAPLYPLTKPGTLFNWGPDQQKAYHEIKQALLTAPALGLPDLTKPFELFVDEKQGYAKGVLTQKLGPWRRPVAYLSKKLDPVAAGWPPCLRMVAAIAVLTKDAGKLTMGQPLVILAPHAVEALVKQPPDRWLSNARMTHYQAMLLDTDRVQFGPVVALNPATLLPLPEEGAPHDCLEILAETHGTEPDLTDQPIPDADHTWYTDGSSFLQEGQRKAGAAVTTETEVIWARALPAGTSAQRAELIALTQALKMAEGKRLNVYTDSRYAFATAHIHGEIYKRRGWLTSEGREIKNKSEILALLKALFLPKRLSIIHCLGHQKGDSAEARGNRLADQAAREAAIKTPPDTSTLLAGKRTADGSEFEKRTADGSEFESPKKKAKVE

SEQ ID NO: 6336 - protein, 2091 aa, synthetic construct
MPAAKRVKLDGGDKKYSIGLDIGTNSVGWAVITDEYKVPSKKFKVLGNTDRHSIKKNLIGALLFDSGETAEATRLKRTARRRYTRRKNRICYLQEIFSNEMAKVDDSFFHRLEESFLVEEDKKHERHPIFGNIVDEVAYHEKYPTIYHLRKKLVDSTDKADLRLIYLALAHMIKFRGHFLIEGDLNPDNSDVDKLFIQLVQTYNQLFEENPINASGVDAKAILSARLSKSRRLENLIAQLPGEKKNGLFGNLIALSLGLTPNFKSNFDLAEDAKLQLSKDTYDDDLDNLLAQIGDQYADLFLAAKNLSDAILLSDILRVNTEITKAPLSASMIKRYDEHHQDLTLLKALVRQQLPEKYKEIFFDQSKNGYAGYIDGGASQEEFYKFIKPILEKMDGTEELLVKLNREDLLRKQRTFDNGSIPHQIHLGELHAILRRQEDFYPFLKDNREKIEKILTFRIPYYVGPLARGNSRFAWMTRKSEETITPWNFEEVVDKGASAQSFIERMTNFDKNLPNEKVLPKHSLLYEYFTVYNELTKVKYVTEGMRKPAFLSGEQKKAIVDLLFKTNRKVTVKQLKEDYFKKIECFDSVEISGVEDRFNASLGTYHDLLKIIKDKDFLDNEENEDILEDIVLTLTLFEDREMIEERLKTYAHLFDDKVMKQLKRRRYTGWGRLSRKLINGIRDKQSGKTILDFLKSDGFANRNFMQLIHDDSLTFKEDIQKAQVSGQGDSLHEHIANLAGSPAIKKGILQTVKVVDELVKVMGRHKPENIVIEMARENQTTQKGQKNSRERMKRIEEGIKELGSQILKEHPVENTQLQNEKLYLYYLQNGRDMYVDQELDINRLSDYDVDHIVPQSFLKDDSIDNKVLTRSDKARGKSDNVPSEEVVKKMKNYWRQLLNAKLITQRKFDNLTKAERGGLSELDKAGFIKRQLVETRQITKHVAQILDSRMNTKYDENDKLIREVKVITLKSKLVSDFRKDFQFYKVREINNYHHAHDAYLNAVVGTALIKKYPKLESEFVYGDYKVYDVRKMIAKSEQEIGKATAKYFFYSNIMNFFKTEITLANGEIRKRPLIETNGETGEIVWDKGRDFATVRKVLSMPQVNIVKKTEVQTGGFSKESILPKRNSDKLIARKKDWDPKKYGGFDSPTVAYSVLVVAKVEKGKSKKLKSVKELLGITIMERSSFEKNPIDFLEAKGYKEVKKDLIIKLPKYSLFELENGRKRMLASAGELQKGNELALPSKYVNFLYLASHYEKLKGSPEDNEQKQLFVEQHKHYLDEIIEQISEFSKRVILADANLDKVLSAYNKHRDKPIREQAENIIHLFTLTNLGAPAAFKYFDTTIDRKRYTSTKEVLDATLIHQSITGLYETRIDLSQLGGDGGGSSGSSGSSGSSGSSGGIPWLMKKPLQLTTLVPLQEYEERLLKQTMLTGSYKEKLQSLFLKYDALWQHWENQVGHRRIKPHHIATGTVNPRPQKQYPINPKAKASIQTVINDLLKQGVLIQQNSIMNTPVYPVPKPDGKWRMVLDYREVNKTIPLIAAQNQHSAGILSSIFRGKYKTTLDLSNGFWAHSITPESYWLTAFTWLGQQYCWTRLPQGFLNSPALFNADVVDLLKEVPNVQVYVDDIYISHDDPREHLEQLEKVFSLLLNAGYVVSLKKSEIAQHEVEFLGFNITKEGRGLTETFKQKLLNITPPRDLKQLQSILGKLNFARNFIPNFSELVKPLYNIIATAPGKYITWTTDNSQQLQNIISMLNSAENLEERNPEVRLIMKVNTSPSAGYIRFYNEFAKRPIMYLNYVYTKAEVKFTNTEKLLTTIHKGLIKALDLGMGQEILVYSPIVSMTKIQKTPLPERKALPIRWITWMSYLEDPRIQFHYDKTLPELQQVPTVTDDIIAKIKHPSEFSMVFYTDGSAIKHPNVNKSHNAGMGIAQVQFKPEFTVINTWSIPLGDHTAQLAEVAAVEFACKKALKIDGPVLIVTDSFYVAESVNKELPYWQSNGFFNNKKKPLKHVSKWKSIADCIQLKPDIIIIHEKGHQPTASTFHTEGNNLADKLATQGSYVVNAGKRTADGSEFEKRTADGSEFESPKKKAKVE

SEQ ID NO: 6337 - protein, 2105 aa, synthetic construct
MPAAKRVKLDGGDKKYSIGLDIGTNSVGWAVITDEYKVPSKKFKVLGNTDRHSIKKNLIGALLFDSGETAEATRLKRTARRRYTRRKNRICYLQEIFSNEMAKVDDSFFHRLEESFLVEEDKKHERHPIFGNIVDEVAYHEKYPTIYHLRKKLVDSTDKADLRLIYLALAHMIKFRGHFLIEGDLNPDNSDVDKLFIQLVQTYNQLFEENPINASGVDAKAILSARLSKSRRLENLIAQLPGEKKNGLFGNLIALSLGLTPNFKSNFDLAEDAKLQLSKDTYDDDLDNLLAQIGDQYADLFLAAKNLSDAILLSDILRVNTEITKAPLSASMIKRYDEHHQDLTLLKALVRQQLPEKYKEIFFDQSKNGYAGYIDGGASQEEFYKFIKPILEKMDGTEELLVKLNREDLLRKQRTFDNGSIPHQIHLGELHAILRRQEDFYPFLKDNREKIEKILTFRIPYYVGPLARGNSRFAWMTRKSEETITPWNFEEVVDKGASAQSFIERMTNFDKNLPNEKVLPKHSLLYEYFTVYNELTKVKYVTEGMRKPAFLSGEQKKAIVDLLFKTNRKVTVKQLKEDYFKKIECFDSVEISGVEDRFNASLGTYHDLLKIIKDKDFLDNEENEDILEDIVLTLTLFEDREMIEERLKTYAHLFDDKVMKQLKRRRYTGWGRLSRKLINGIRDKQSGKTILDFLKSDGFANRNFMQLIHDDSLTFKEDIQKAQVSGQGDSLHEHIANLAGSPAIKKGILQTVKVVDELVKVMGRHKPENIVIEMARENQTTQKGQKNSRERMKRIEEGIKELGSQILKEHPVENTQLQNEKLYLYYLQNGRDMYVDQELDINRLSDYDVDHIVPQSFLKDDSIDNKVLTRSDKARGKSDNVPSEEVVKKMKNYWRQLLNAKLITQRKFDNLTKAERGGLSELDKAGFIKRQLVETRQITKHVAQILDSRMNTKYDENDKLIREVKVITLKSKLVSDFRKDFQFYKVREINNYHHAHDAYLNAVVGTALIKKYPKLESEFVYGDYKVYDVRKMIAKSEQEIGKATAKYFFYSNIMNFFKTEITLANGEIRKRPLIETNGETGEIVWDKGRDFATVRKVLSMPQVNIVKKTEVQTGGFSKESILPKRNSDKLIARKKDWDPKKYGGFDSPTVAYSVLVVAKVEKGKSKKLKSVKELLGITIMERSSFEKNPIDFLEAKGYKEVKKDLIIKLPKYSLFELENGRKRMLASAGELQKGNELALPSKYVNFLYLASHYEKLKGSPEDNEQKQLFVEQHKHYLDEIIEQISEFSKRVILADANLDKVLSAYNKHRDKPIREQAENIIHLFTLTNLGAPAAFKYFDTTIDRKRYTSTKEVLDATLIHQSITGLYETRIDLSQLGGDGGGSSGSSGSSGSSGSSGSSGGTAPLEEEYRLFLEAPIQNVTLLEQWKREIPKVWAEINPPGLASTQAPIHVQLLSTALPVRVRQYPITLEAKRSLRETIRKFRAAGILRPVHSPWNTPLLPVRKSGTSEYRMVQDLREVNKRVETIHPTVPNPYTLLSLLPPDRIWYSVLDLKDAFFCIPLAPESQLIFAFEWADAEEGESGQLTWTRLPQGFKNSPTLFDEALNRDLQGFRLDHPSVSLLQYVDDLLIAADTQAACLSATRDLLMTLAELGYRVSGKKAQLCQEEVTYLGFKIHKGSRSLSNSRTQAILQIPVPKTKRQVREFLGTIGYCRLWIPGFAELAQPLYAATRGGNDPLVWGEKEEEAFQSLKLALTQPPALALPSLDKPFQLFVEETSGAAKGVLTQALGPWKRPVAYLSKRLDPVAAGWPRCLRAIAAAALLTREASKLTFGQDIEITSSHNLESLLRSPPDKWLTNARITQYQVLLLDPPRVRFKQTAALNPATLLPETDDTLPIHHCLDTLDSLTSTRPDLTDQPLAQAEATLFTDGSSYIRDGKRYAGAAVVTLDSVIWAEPLPIGTSAQKAELIALTKALEWSKDKSVNIYTDSRYAFATLHVHGMIYRERGLLTAGGKAIKNAPEILALLTAVWLPKRVAVMHCKGHQKDDAPTSTGNRRADEVAREVAIRPLSTQATISAGKRTADGSEFEKRTADGSEFESPKKKAKVE

SEQ ID NO: 6338 - protein, 2180 aa, synthetic construct
MPAAKRVKLDGGDKKYSIGLDIGTNSVGWAVITDEYKVPSKKFKVLGNTDRHSIKKNLIGALLFDSGETAEATRLKRTARRRYTRRKNRICYLQEIFSNEMAKVDDSFFHRLEESFLVEEDKKHERHPIFGNIVDEVAYHEKYPTIYHLRKKLVDSTDKADLRLIYLALAHMIKFRGHFLIEGDLNPDNSDVDKLFIQLVQTYNQLFEENPINASGVDAKAILSARLSKSRRLENLIAQLPGEKKNGLFGNLIALSLGLTPNFKSNFDLAEDAKLQLSKDTYDDDLDNLLAQIGDQYADLFLAAKNLSDAILLSDILRVNTEITKAPLSASMIKRYDEHHQDLTLLKALVRQQLPEKYKEIFFDQSKNGYAGYIDGGASQEEFYKFIKPILEKMDGTEELLVKLNREDLLRKQRTFDNGSIPHQIHLGELHAILRRQEDFYPFLKDNREKIEKILTFRIPYYVGPLARGNSRFAWMTRKSEETITPWNFEEVVDKGASAQSFIERMTNFDKNLPNEKVLPKHSLLYEYFTVYNELTKVKYVTEGMRKPAFLSGEQKKAIVDLLFKTNRKVTVKQLKEDYFKKIECFDSVEISGVEDRFNASLGTYHDLLKIIKDKDFLDNEENEDILEDIVLTLTLFEDREMIEERLKTYAHLFDDKVMKQLKRRRYTGWGRLSRKLINGIRDKQSGKTILDFLKSDGFANRNFMQLIHDDSLTFKEDIQKAQVSGQGDSLHEHIANLAGSPAIKKGILQTVKVVDELVKVMGRHKPENIVIEMARENQTTQKGQKNSRERMKRIEEGIKELGSQILKEHPVENTQLQNEKLYLYYLQNGRDMYVDQELDINRLSDYDVDHIVPQSFLKDDSIDNKVLTRSDKARGKSDNVPSEEVVKKMKNYWRQLLNAKLITQRKFDNLTKAERGGLSELDKAGFIKRQLVETRQITKHVAQILDSRMNTKYDENDKLIREVKVITLKSKLVSDFRKDFQFYKVREINNYHHAHDAYLNAVVGTALIKKYPKLESEFVYGDYKVYDVRKMIAKSEQEIGKATAKYFFYSNIMNFFKTEITLANGEIRKRPLIETNGETGEIVWDKGRDFATVRKVLSMPQVNIVKKTEVQTGGFSKESILPKRNSDKLIARKKDWDPKKYGGFDSPTVAYSVLVVAKVEKGKSKKLKSVKELLGITIMERSSFEKNPIDFLEAKGYKEVKKDLIIKLPKYSLFELENGRKRMLASAGELQKGNELALPSKYVNFLYLASHYEKLKGSPEDNEQKQLFVEQHKHYLDEIIEQISEFSKRVILADANLDKVLSAYNKHRDKPIREQAENIIHLFTLTNLGAPAAFKYFDTTIDRKRYTSTKEVLDATLIHQSITGLYETRIDLSQLGGDGGGSSGSSGSSGSSGSSGSSGGMDLLKPLTVERKGVKIKGYWNSQADITCVPKDLLQGEEPVRQQNVTTIHGTQEGDVYYVNLKIDGRRINTEVIGTTLDYAIITPGDVPWILKKPLELTIKLDLEEQQGTLLNNSILSKKGKEELKQLFEKYSALWQSWENQVGHRRIRPHKIATGTVKPTPQKQYHINPKAKPDIQIVINDLLKQGVLIQKESTMNTPVYPVPKPNGRWRMVLDYRAVNKVTPLIAVQNQHSYGILGSLFKGRYKTTIDLSNGFWAHPIVPEDYWITAFTWQGKQYCWTVLPQGFLNSPGLFNGDVVDLLQGIPNVEVYVDDVYISHDSEKEHLEYLDILFNRLKEAGYIISLKKSNIANSIVDFLGFQITNEGRGLTDTFKEKLENITAPTTLKQLQSILGLLNFARNFIPDFTELIAPLYALIPKSPKNYVPWQIEHSTTLETLITKLNGAEYLQGRKGDKTLIMKVNASYTTGYIRYYNEGEKKPISYVSIVFSKTELKFTELEKLLTTVHKGLLKALDLSMGQNIHVYSPIVSMQNIQKTPQTAKKALASRWLSWLSYLEDPRIRFFYDPQMPALKDLPAVDTGKDNKKHPSNFQHIFYTDGSAITSPTKEGHLNAGMGIVYFINKDGNLQKQQEWSISLGNHTAQFAEIAAFEFALKKCLPLGGNILVVTDSNYVAKAYNEELDVWASNGFVNNRKKPLKHISKWKSVADLKRLRPDVVVTHEPGHQKLDSSPHAYGNNLADQLATQASFKVHAGKRTADGSEFEKRTADGSEFESPKKKAKVE

SEQ ID NO: 6339 - protein, 2102 aa, synthetic construct
MPAAKRVKLDGGDKKYSIGLDIGTNSVGWAVITDEYKVPSKKFKVLGNTDRHSIKKNLIGALLFDSGETAEATRLKRTARRRYTRRKNRICYLQEIFSNEMAKVDDSFFHRLEESFLVEEDKKHERHPIFGNIVDEVAYHEKYPTIYHLRKKLVDSTDKADLRLIYLALAHMIKFRGHFLIEGDLNPDNSDVDKLFIQLVQTYNQLFEENPINASGVDAKAILSARLSKSRRLENLIAQLPGEKKNGLFGNLIALSLGLTPNFKSNFDLAEDAKLQLSKDTYDDDLDNLLAQIGDQYADLFLAAKNLSDAILLSDILRVNTEITKAPLSASMIKRYDEHHQDLTLLKALVRQQLPEKYKEIFFDQSKNGYAGYIDGGASQEEFYKFIKPILEKMDGTEELLVKLNREDLLRKQRTFDNGSIPHQIHLGELHAILRRQEDFYPFLKDNREKIEKILTFRIPYYVGPLARGNSRFAWMTRKSEETITPWNFEEVVDKGASAQSFIERMTNFDKNLPNEKVLPKHSLLYEYFTVYNELTKVKYVTEGMRKPAFLSGEQKKAIVDLLFKTNRKVTVKQLKEDYFKKIECFDSVEISGVEDRFNASLGTYHDLLKIIKDKDFLDNEENEDILEDIVLTLTLFEDREMIEERLKTYAHLFDDKVMKQLKRRRYTGWGRLSRKLINGIRDKQSGKTILDFLKSDGFANRNFMQLIHDDSLTFKEDIQKAQVSGQGDSLHEHIANLAGSPAIKKGILQTVKVVDELVKVMGRHKPENIVIEMARENQTTQKGQKNSRERMKRIEEGIKELGSQILKEHPVENTQLQNEKLYLYYLQNGRDMYVDQELDINRLSDYDVDHIVPQSFLKDDSIDNKVLTRSDKARGKSDNVPSEEVVKKMKNYWRQLLNAKLITQRKFDNLTKAERGGLSELDKAGFIKRQLVETRQITKHVAQILDSRMNTKYDENDKLIREVKVITLKSKLVSDFRKDFQFYKVREINNYHHAHDAYLNAVVGTALIKKYPKLESEFVYGDYKVYDVRKMIAKSEQEIGKATAKYFFYSNIMNFFKTEITLANGEIRKRPLIETNGETGEIVWDKGRDFATVRKVLSMPQVNIVKKTEVQTGGFSKESILPKRNSDKLIARKKDWDPKKYGGFDSPTVAYSVLVVAKVEKGKSKKLKSVKELLGITIMERSSFEKNPIDFLEAKGYKEVKKDLIIKLPKYSLFELENGRKRMLASAGELQKGNELALPSKYVNFLYLASHYEKLKGSPEDNEQKQLFVEQHKHYLDEIIEQISEFSKRVILADANLDKVLSAYNKHRDKPIREQAENIIHLFTLTNLGAPAAFKYFDTTIDRKRYTSTKEVLDATLIHQSITGLYETRIDLSQLGGDGGGSSGSSGSSGSSGSSGSSGGTLQLEEEYRLFEPESTQKQEMDIWLKNFPQAWAETGGMGTAHCQAPVLIQLKATATPISIRQYPMPHEAYQGIKPHIRRMLDQGILKPCQSPWNTPLLPVKKPGTEDYRPVQDLREVNKRVEDIHPTVPNPYNLLSTLPPSHPWYTVLDLKDAFFCLRLHSESQLLFAFEWRDPEIGLSGQLTWTRLPQGFKNSPTLFNEALHSDLADFRVRYPALVLLQYVDDLLLAAATRTECLEGTKALLETLGNKGYRASAKKAQICLQEVTYLGYSLKDGQRWLTKARKEAILSIPVPKNSRQVREFLGTAGYCRLWIPGFAELAAPLYPLTRPGTLFQWGTEQQLAFEDIKKALLSSPALGLPDITKPFELFIDENSGFAKGVLVQKLGPWKRPVAYLSKKLDTVASGWPPCLRMVAAIAILVKDAGKLTLGQPLTILTSHPVEALVRQPPNKWLSNARMTHYQAMLLDAERVHFGPTVSLNPATLLPLPSGGNHHDCLQILAETHGTRPDLTDQPLPDADLTWYTDGSSFIRNGEREAGAAVTTESEVIWAAPLPPGTSAQRAELIALTQALKMAEGKKLTVYTDSRYAFATTHVHGEIYRRRGWLTSEGKEIKNKNEILALLEALFLPKRLSIIHCPGHQKGDSPQAKGNRLADDTAKKAATETHSSLTVLPAGKRTADGSEFEKRTADGSEFESPKKKAKVE

SEQ ID NO: 6340 - protein, 2094 aa, synthetic construct
MPAAKRVKLDGGDKKYSIGLDIGTNSVGWAVITDEYKVPSKKFKVLGNTDRHSIKKNLIGALLFDSGETAEATRLKRTARRRYTRRKNRICYLQEIFSNEMAKVDDSFFHRLEESFLVEEDKKHERHPIFGNIVDEVAYHEKYPTIYHLRKKLVDSTDKADLRLIYLALAHMIKFRGHFLIEGDLNPDNSDVDKLFIQLVQTYNQLFEENPINASGVDAKAILSARLSKSRRLENLIAQLPGEKKNGLFGNLIALSLGLTPNFKSNFDLAEDAKLQLSKDTYDDDLDNLLAQIGDQYADLFLAAKNLSDAILLSDILRVNTEITKAPLSASMIKRYDEHHQDLTLLKALVRQQLPEKYKEIFFDQSKNGYAGYIDGGASQEEFYKFIKPILEKMDGTEELLVKLNREDLLRKQRTFDNGSIPHQIHLGELHAILRRQEDFYPFLKDNREKIEKILTFRIPYYVGPLARGNSRFAWMTRKSEETITPWNFEEVVDKGASAQSFIERMTNFDKNLPNEKVLPKHSLLYEYFTVYNELTKVKYVTEGMRKPAFLSGEQKKAIVDLLFKTNRKVTVKQLKEDYFKKIECFDSVEISGVEDRFNASLGTYHDLLKIIKDKDFLDNEENEDILEDIVLTLTLFEDREMIEERLKTYAHLFDDKVMKQLKRRRYTGWGRLSRKLINGIRDKQSGKTILDFLKSDGFANRNFMQLIHDDSLTFKEDIQKAQVSGQGDSLHEHIANLAGSPAIKKGILQTVKVVDELVKVMGRHKPENIVIEMARENQTTQKGQKNSRERMKRIEEGIKELGSQILKEHPVENTQLQNEKLYLYYLQNGRDMYVDQELDINRLSDYDVDHIVPQSFLKDDSIDNKVLTRSDKARGKSDNVPSEEVVKKMKNYWRQLLNAKLITQRKFDNLTKAERGGLSELDKAGFIKRQLVETRQITKHVAQILDSRMNTKYDENDKLIREVKVITLKSKLVSDFRKDFQFYKVREINNYHHAHDAYLNAVVGTALIKKYPKLESEFVYGDYKVYDVRKMIAKSEQEIGKATAKYFFYSNIMNFFKTEITLANGEIRKRPLIETNGETGEIVWDKGRDFATVRKVLSMPQVNIVKKTEVQTGGFSKESILPKRNSDKLIARKKDWDPKKYGGFDSPTVAYSVLVVAKVEKGKSKKLKSVKELLGITIMERSSFEKNPIDFLEAKGYKEVKKDLIIKLPKYSLFELENGRKRMLASAGELQKGNELALPSKYVNFLYLASHYEKLKGSPEDNEQKQLFVEQHKHYLDEIIEQISEFSKRVILADANLDKVLSAYNKHRDKPIREQAENIIHLFTLTNLGAPAAFKYFDTTIDRKRYTSTKEVLDATLIHQSITGLYETRIDLSQLGGDGGGSSGSSGSSGSSGSSGSSGGVPWLTQQPLQLTILVPLQEYQEKILSKTALPEDQKQQLKTLFVKYDNLWQHWENQVGHRKIRPHNIATGDYPPRPQKQYPINPKAKPSIQIVIDDLLKQGVLTPQNSTMNTPVYPVPKPDGRWRMVLDYREVNKTIPLTAAQNQHSAGILATIVRQKYKTTLDLANGFWAHPITPESYWLTAFTWQGKQYCWTRLPQGFLNSPALFNADVVDLLKEIPNVQVYVDDIYLSHDDPKEHVQQLEKVFQILLQAGYVVSLKKSEIGQKTVEFLGFNITKEGRGLTDTFKTKLLNITPPKDLKQLQSILGLLNFARNFIPNFAELVQPLYNLIAPAKGKYIEWSEENTKQLNMVIEALNTASNLEERLPEQRLVIKVNTSPSAGYVRYYNETGKKPIMYLNYVFSKAELKFSMLEKLLTTMHKALIKAMDLAMGQEILVYSPIVSMTKIQKTPLPERKALPIRWITWMTYLEDPRIQFHYDKTLPELKHIPDVYTSSQSPVKHPSQYEGVFYTDGSAIKSPDPTKSNNAGMGIVHATYKPEYQVLNQWSIPLGNHTAQMAEIAAVEFACKKALKIPGPVLVITDSFYVAESANKELPYWKSNGFVNNKKKPLKHISKWKSIAECLSMKPDITIQHEKGISLQIPVFILKGNALADKLATQGSYVVNAGKRTADGSEFEKRTADGSEFESPKKKAKVE

SEQ ID NO: 6341 - protein, 2094 aa, synthetic construct
MPAAKRVKLDGGDKKYSIGLDIGTNSVGWAVITDEYKVPSKKFKVLGNTDRHSIKKNLIGALLFDSGETAEATRLKRTARRRYTRRKNRICYLQEIFSNEMAKVDDSFFHRLEESFLVEEDKKHERHPIFGNIVDEVAYHEKYPTIYHLRKKLVDSTDKADLRLIYLALAHMIKFRGHFLIEGDLNPDNSDVDKLFIQLVQTYNQLFEENPINASGVDAKAILSARLSKSRRLENLIAQLPGEKKNGLFGNLIALSLGLTPNFKSNFDLAEDAKLQLSKDTYDDDLDNLLAQIGDQYADLFLAAKNLSDAILLSDILRVNTEITKAPLSASMIKRYDEHHQDLTLLKALVRQQLPEKYKEIFFDQSKNGYAGYIDGGASQEEFYKFIKPILEKMDGTEELLVKLNREDLLRKQRTFDNGSIPHQIHLGELHAILRRQEDFYPFLKDNREKIEKILTFRIPYYVGPLARGNSRFAWMTRKSEETITPWNFEEVVDKGASAQSFIERMTNFDKNLPNEKVLPKHSLLYEYFTVYNELTKVKYVTEGMRKPAFLSGEQKKAIVDLLFKTNRKVTVKQLKEDYFKKIECFDSVEISGVEDRFNASLGTYHDLLKIIKDKDFLDNEENEDILEDIVLTLTLFEDREMIEERLKTYAHLFDDKVMKQLKRRRYTGWGRLSRKLINGIRDKQSGKTILDFLKSDGFANRNFMQLIHDDSLTFKEDIQKAQVSGQGDSLHEHIANLAGSPAIKKGILQTVKVVDELVKVMGRHKPENIVIEMARENQTTQKGQKNSRERMKRIEEGIKELGSQILKEHPVENTQLQNEKLYLYYLQNGRDMYVDQELDINRLSDYDVDHIVPQSFLKDDSIDNKVLTRSDKARGKSDNVPSEEVVKKMKNYWRQLLNAKLITQRKFDNLTKAERGGLSELDKAGFIKRQLVETRQITKHVAQILDSRMNTKYDENDKLIREVKVITLKSKLVSDFRKDFQFYKVREINNYHHAHDAYLNAVVGTALIKKYPKLESEFVYGDYKVYDVRKMIAKSEQEIGKATAKYFFYSNIMNFFKTEITLANGEIRKRPLIETNGETGEIVWDKGRDFATVRKVLSMPQVNIVKKTEVQTGGFSKESILPKRNSDKLIARKKDWDPKKYGGFDSPTVAYSVLVVAKVEKGKSKKLKSVKELLGITIMERSSFEKNPIDFLEAKGYKEVKKDLIIKLPKYSLFELENGRKRMLASAGELQKGNELALPSKYVNFLYLASHYEKLKGSPEDNEQKQLFVEQHKHYLDEIIEQISEFSKRVILADANLDKVLSAYNKHRDKPIREQAENIIHLFTLTNLGAPAAFKYFDTTIDRKRYTSTKEVLDATLIHQSITGLYETRIDLSQLGGDGGGSSGSSGSSGSSGSSGSSGGVPWLTQQPLQLTILVPLQEYQEKILSKTALPEDQKQQLKTLFVKYDNLWQHWENQVGHRKIRPHNIATGDYPPRPQKQYPINPKAKPSIQIVIDDLLKQGVLTPQNSTMNTPVYPVPKPDGRWRMVLDYREVNKTIPLTAAQNQHSAGILATIVRQKYKTTLDLANGFWAHPITPESYWLTAFTWQGKQYCWTRLPQGFLNSPALFNADVVDLLKEIPNVQVYVDDIYLSHDDPKEHVQQLEKVFQILLQAGYVVSLKKSEIGQKTVEFLGFNITKEGRGLTDTFKTKLLNITPPKDLKQLQSILGKLNFARNFIPNFAELVQPLYNLIAPAKGKYIEWSEENTKQLNMVIEALNTASNLEERLPEQRLVIKVNTSPSAGYVRYYNETGKKPIMYLNYVFSKAELKFSMLEKLLTTMHKALIKAMDLAMGQEILVYSPIVSMTKIQKTPLPERKALPIRWITWMTYLEDPRIQFHYDKTLPELKHIPDVYTSSQSPVKHPSQYEGVFYTDGSAIKSPDPTKSNNAGMGIVHATYKPEYQVLNQWSIPLGNHTAQMAEIAAVEFACKKALKIPGPVLVITDSFYVAESANKELPYWKSNGFVNNKKKPLKHISKWKSIAECLSMKPDITIQHEKGISLQIPVFILKGNALADKLATQGSYVVNAGKRTADGSEFEKRTADGSEFESPKKKAKVE

SEQ ID NO: 6342 - protein, 2183 aa, synthetic construct
MPAAKRVKLDGGDKKYSIGLDIGTNSVGWAVITDEYKVPSKKFKVLGNTDRHSIKKNLIGALLFDSGETAEATRLKRTARRRYTRRKNRICYLQEIFSNEMAKVDDSFFHRLEESFLVEEDKKHERHPIFGNIVDEVAYHEKYPTIYHLRKKLVDSTDKADLRLIYLALAHMIKFRGHFLIEGDLNPDNSDVDKLFIQLVQTYNQLFEENPINASGVDAKAILSARLSKSRRLENLIAQLPGEKKNGLFGNLIALSLGLTPNFKSNFDLAEDAKLQLSKDTYDDDLDNLLAQIGDQYADLFLAAKNLSDAILLSDILRVNTEITKAPLSASMIKRYDEHHQDLTLLKALVRQQLPEKYKEIFFDQSKNGYAGYIDGGASQEEFYKFIKPILEKMDGTEELLVKLNREDLLRKQRTFDNGSIPHQIHLGELHAILRRQEDFYPFLKDNREKIEKILTFRIPYYVGPLARGNSRFAWMTRKSEETITPWNFEEVVDKGASAQSFIERMTNFDKNLPNEKVLPKHSLLYEYFTVYNELTKVKYVTEGMRKPAFLSGEQKKAIVDLLFKTNRKVTVKQLKEDYFKKIECFDSVEISGVEDRFNASLGTYHDLLKIIKDKDFLDNEENEDILEDIVLTLTLFEDREMIEERLKTYAHLFDDKVMKQLKRRRYTGWGRLSRKLINGIRDKQSGKTILDFLKSDGFANRNFMQLIHDDSLTFKEDIQKAQVSGQGDSLHEHIANLAGSPAIKKGILQTVKVVDELVKVMGRHKPENIVIEMARENQTTQKGQKNSRERMKRIEEGIKELGSQILKEHPVENTQLQNEKLYLYYLQNGRDMYVDQELDINRLSDYDVDHIVPQSFLKDDSIDNKVLTRSDKARGKSDNVPSEEVVKKMKNYWRQLLNAKLITQRKFDNLTKAERGGLSELDKAGFIKRQLVETRQITKHVAQILDSRMNTKYDENDKLIREVKVITLKSKLVSDFRKDFQFYKVREINNYHHAHDAYLNAVVGTALIKKYPKLESEFVYGDYKVYDVRKMIAKSEQEIGKATAKYFFYSNIMNFFKTEITLANGEIRKRPLIETNGETGEIVWDKGRDFATVRKVLSMPQVNIVKKTEVQTGGFSKESILPKRNSDKLIARKKDWDPKKYGGFDSPTVAYSVLVVAKVEKGKSKKLKSVKELLGITIMERSSFEKNPIDFLEAKGYKEVKKDLIIKLPKYSLFELENGRKRMLASAGELQKGNELALPSKYVNFLYLASHYEKLKGSPEDNEQKQLFVEQHKHYLDEIIEQISEFSKRVILADANLDKVLSAYNKHRDKPIREQAENIIHLFTLTNLGAPAAFKYFDTTIDRKRYTSTKEVLDATLIHQSITGLYETRIDLSQLGGDGGGSSGSSGSSGSSGSSGSSGGMNPLQLLQPLPAEIKGTKLLAHWNSGATITCIPESFLEDEQPIKKTLIKTIHGEKQQNVYYVTFKVKGRKVEAEVIASPYEYILLSPTDVPWLTQQPLQLTILVPLQEYQEKILSKTALPEDQKQQLKTLFVKYDNLWQHWENQVGHRKIRPHNIATGDYPPRPQKQYPINPKAKPSIQIVIDDLLKQGVLTPQNSTMNTPVYPVPKPDGRWRMVLDYREVNKTIPLTAAQNQHSAGILATIVRQKYKTTLDLANGFWAHPITPESYWLTAFTWQGKQYCWTRLPQGFLNSPALFNADVVDLLKEIPNVQVYVDDIYLSHDDPKEHVQQLEKVFQILLQAGYVVSLKKSEIGQKTVEFLGFNITKEGRGLTDTFKTKLLNITPPKDLKQLQSILGLLNFARNFIPNFAELVQPLYNLIAPAKGKYIEWSEENTKQLNMVIEALNTASNLEERLPEQRLVIKVNTSPSAGYVRYYNETGKKPIMYLNYVFSKAELKFSMLEKLLTTMHKALIKAMDLAMGQEILVYSPIVSMTKIQKTPLPERKALPIRWITWMTYLEDPRIQFHYDKTLPELKHIPDVYTSSQSPVKHPSQYEGVFYTDGSAIKSPDPTKSNNAGMGIVHATYKPEYQVLNQWSIPLGNHTAQMAEIAAVEFACKKALKIPGPVLVITDSFYVAESANKELPYWKSNGFVNNKKKPLKHISKWKSIAECLSMKPDITIQHEKGISLQIPVFILKGNALADKLATQGSYVVNAGKRTADGSEFEKRTADGSEFESPKKKAKVE

SEQ ID NO: 6343 - protein, 2101 aa, synthetic construct
MPAAKRVKLDGGDKKYSIGLDIGTNSVGWAVITDEYKVPSKKFKVLGNTDRHSIKKNLIGALLFDSGETAEATRLKRTARRRYTRRKNRICYLQEIFSNEMAKVDDSFFHRLEESFLVEEDKKHERHPIFGNIVDEVAYHEKYPTIYHLRKKLVDSTDKADLRLIYLALAHMIKFRGHFLIEGDLNPDNSDVDKLFIQLVQTYNQLFEENPINASGVDAKAILSARLSKSRRLENLIAQLPGEKKNGLFGNLIALSLGLTPNFKSNFDLAEDAKLQLSKDTYDDDLDNLLAQIGDQYADLFLAAKNLSDAILLSDILRVNTEITKAPLSASMIKRYDEHHQDLTLLKALVRQQLPEKYKEIFFDQSKNGYAGYIDGGASQEEFYKFIKPILEKMDGTEELLVKLNREDLLRKQRTFDNGSIPHQIHLGELHAILRRQEDFYPFLKDNREKIEKILTFRIPYYVGPLARGNSRFAWMTRKSEETITPWNFEEVVDKGASAQSFIERMTNFDKNLPNEKVLPKHSLLYEYFTVYNELTKVKYVTEGMRKPAFLSGEQKKAIVDLLFKTNRKVTVKQLKEDYFKKIECFDSVEISGVEDRFNASLGTYHDLLKIIKDKDFLDNEENEDILEDIVLTLTLFEDREMIEERLKTYAHLFDDKVMKQLKRRRYTGWGRLSRKLINGIRDKQSGKTILDFLKSDGFANRNFMQLIHDDSLTFKEDIQKAQVSGQGDSLHEHIANLAGSPAIKKGILQTVKVVDELVKVMGRHKPENIVIEMARENQTTQKGQKNSRERMKRIEEGIKELGSQILKEHPVENTQLQNEKLYLYYLQNGRDMYVDQELDINRLSDYDVDHIVPQSFLKDDSIDNKVLTRSDKARGKSDNVPSEEVVKKMKNYWRQLLNAKLITQRKFDNLTKAERGGLSELDKAGFIKRQLVETRQITKHVAQILDSRMNTKYDENDKLIREVKVITLKSKLVSDFRKDFQFYKVREINNYHHAHDAYLNAVVGTALIKKYPKLESEFVYGDYKVYDVRKMIAKSEQEIGKATAKYFFYSNIMNFFKTEITLANGEIRKRPLIETNGETGEIVWDKGRDFATVRKVLSMPQVNIVKKTEVQTGGFSKESILPKRNSDKLIARKKDWDPKKYGGFDSPTVAYSVLVVAKVEKGKSKKLKSVKELLGITIMERSSFEKNPIDFLEAKGYKEVKKDLIIKLPKYSLFELENGRKRMLASAGELQKGNELALPSKYVNFLYLASHYEKLKGSPEDNEQKQLFVEQHKHYLDEIIEQISEFSKRVILADANLDKVLSAYNKHRDKPIREQAENIIHLFTLTNLGAPAAFKYFDTTIDRKRYTSTKEVLDATLIHQSITGLYETRIDLSQLGGDGGGSSGSSGSSGSSGSSGSSGGVLNLEEEYRLHEKPVPSSIDPSWLQLFPTVWAERAGMGLANQVPPVVVELRSGASPVAVRQYPMSKEAREGIRPHIQKFLDLGVLVPCRSPWNTPLLPVKKPGTNDYRPVQDLREINKRVQDIHPTVPNPYNLLSSLPPSYTWYSVLDLKDAFFCLRLHPNSQPLFAFEWKDPEKGNTGQLTWTRLPQGFKNSPTLFNEALHRDLAPFRALNPQVVLLQYVDDLLVAAPTYEDCKKGTQKLLQELSKLGYRVSAKKAQLCQREVTYLGYLLKEGKRWLTPARKATVMKIPVPTTPRQVREFLGKAGFCRLFIPGFASLAAPLYPLTKPSIPFIWTEEHQQAFDHIKKALLSAPALALPDLTKPFTLYIDERAGVARGVLTQTLGPWRRPVAYLSKKLDPVASGWPTCLKAVAAVALLLKDADKLTLGQNVTVIASHSLESIVRQPPDRWMTNARMTHYQSLLLNERVSFAPPAVLNPATLLPVESEATPVHRCSEILAEETGTRRDLEDQPLPGVPTWYTDGSSFITEGKRRAGAPIVDGKRTVWASSLPEGTSAQKAELVALTQALRLAEGKNINIYTDSRYAFATAHIHGAIYKQRGWLTSAGKDIKNKEEILALLEAIHLPRRVAIIHCPGHQRGSNPVATGNRRADEAAKQAALSTRVLAGTTKPAGKRTADGSEFEKRTADGSEFESPKKKAKVE

SEQ ID NO: 6344 - protein, 2134 aa, synthetic construct
MPAAKRVKLDGGDKKYSIGLDIGTNSVGWAVITDEYKVPSKKFKVLGNTDRHSIKKNLIGALLFDSGETAEATRLKRTARRRYTRRKNRICYLQEIFSNEMAKVDDSFFHRLEESFLVEEDKKHERHPIFGNIVDEVAYHEKYPTIYHLRKKLVDSTDKADLRLIYLALAHMIKFRGHFLIEGDLNPDNSDVDKLFIQLVQTYNQLFEENPINASGVDAKAILSARLSKSRRLENLIAQLPGEKKNGLFGNLIALSLGLTPNFKSNFDLAEDAKLQLSKDTYDDDLDNLLAQIGDQYADLFLAAKNLSDAILLSDILRVNTEITKAPLSASMIKRYDEHHQDLTLLKALVRQQLPEKYKEIFFDQSKNGYAGYIDGGASQEEFYKFIKPILEKMDGTEELLVKLNREDLLRKQRTFDNGSIPHQIHLGELHAILRRQEDFYPFLKDNREKIEKILTFRIPYYVGPLARGNSRFAWMTRKSEETITPWNFEEVVDKGASAQSFIERMTNFDKNLPNEKVLPKHSLLYEYFTVYNELTKVKYVTEGMRKPAFLSGEQKKAIVDLLFKTNRKVTVKQLKEDYFKKIECFDSVEISGVEDRFNASLGTYHDLLKIIKDKDFLDNEENEDILEDIVLTLTLFEDREMIEERLKTYAHLFDDKVMKQLKRRRYTGWGRLSRKLINGIRDKQSGKTILDFLKSDGFANRNFMQLIHDDSLTFKEDIQKAQVSGQGDSLHEHIANLAGSPAIKKGILQTVKVVDELVKVMGRHKPENIVIEMARENQTTQKGQKNSRERMKRIEEGIKELGSQILKEHPVENTQLQNEKLYLYYLQNGRDMYVDQELDINRLSDYDVDHIVPQSFLKDDSIDNKVLTRSDKARGKSDNVPSEEVVKKMKNYWRQLLNAKLITQRKFDNLTKAERGGLSELDKAGFIKRQLVETRQITKHVAQILDSRMNTKYDENDKLIREVKVITLKSKLVSDFRKDFQFYKVREINNYHHAHDAYLNAVVGTALIKKYPKLESEFVYGDYKVYDVRKMIAKSEQEIGKATAKYFFYSNIMNFFKTEITLANGEIRKRPLIETNGETGEIVWDKGRDFATVRKVLSMPQVNIVKKTEVQTGGFSKESILPKRNSDKLIARKKDWDPKKYGGFDSPTVAYSVLVVAKVEKGKSKKLKSVKELLGITIMERSSFEKNPIDFLEAKGYKEVKKDLIIKLPKYSLFELENGRKRMLASAGELQKGNELALPSKYVNFLYLASHYEKLKGSPEDNEQKQLFVEQHKHYLDEIIEQISEFSKRVILADANLDKVLSAYNKHRDKPIREQAENIIHLFTLTNLGAPAAFKYFDTTIDRKRYTSTKEVLDATLIHQSITGLYETRIDLSQLGGDGGGSSGSSGSSGSSGSSGSSGGLLGRDLLTKLKAQIQFSTEGPQVTWEDRPAMCLVLNLEEEYRLHEKPVPPSIDPSWLQLFPMVWAEKAGMGLANQVPPVVVELKSDASPVAVRQYPMSKEAREGIRPHIQRFLDLGILVPCQSPWNTPLLPVKKPGTNDYRPVQDLREVNKRVQDIHPTVPNPYNLLSSLPPSHTWYSVLDLKDAFFCLKLHPNSQPLFAFEWRDPEKGNTGQLTWTRLPQGFKNSPTLFNEALHRDLASFRALNPQVVMLQYVDDLLVAAPTYRDCKEGTRRLLQELSKLGYRVSAKKAQLCREEVTYLGYLLKGGKRWLTPARKATVMKIPTPTTPRQVREFLGTAGFCRLWIPGFASLAAPLYPLTRPKVPFTWTEAHQEAFGRIKEALLSAPALALPDLTKPFALYVDEKEGVARGVLTQTLGPWRRPVAYLSKKLDPVASGWPTCLKAIAAVALLLKDADKLTLGQNVLVIAPHNLESIVRQPPDRWMTNARMTHYQSLLLNERVSFAPPAILNPATLLPVESDDTPIHICSEILAEETGTRPDLRDQPLPGVPAWYTDGSSFIMDGRRQAGAAIVDNKRTVWASNLPEGTSAQKAELIALTQALRLAEGKSINIYTDSRYAFATAHVHGAIYKQRGWLTSAGKDIKNKEEILALLEAIHLPKRVAIIHCPGHQRGTDPVATGNRKADEAAKQAAQSTRILTETTKNAGKRTADGSEFEKRTADGSEFESPKKKAKVE

SEQ ID NO: 6345 - protein, 2225 aa, synthetic construct
MPAAKRVKLDGGDKKYSIGLDIGTNSVGWAVITDEYKVPSKKFKVLGNTDRHSIKKNLIGALLFDSGETAEATRLKRTARRRYTRRKNRICYLQEIFSNEMAKVDDSFFHRLEESFLVEEDKKHERHPIFGNIVDEVAYHEKYPTIYHLRKKLVDSTDKADLRLIYLALAHMIKFRGHFLIEGDLNPDNSDVDKLFIQLVQTYNQLFEENPINASGVDAKAILSARLSKSRRLENLIAQLPGEKKNGLFGNLIALSLGLTPNFKSNFDLAEDAKLQLSKDTYDDDLDNLLAQIGDQYADLFLAAKNLSDAILLSDILRVNTEITKAPLSASMIKRYDEHHQDLTLLKALVRQQLPEKYKEIFFDQSKNGYAGYIDGGASQEEFYKFIKPILEKMDGTEELLVKLNREDLLRKQRTFDNGSIPHQIHLGELHAILRRQEDFYPFLKDNREKIEKILTFRIPYYVGPLARGNSRFAWMTRKSEETITPWNFEEVVDKGASAQSFIERMTNFDKNLPNEKVLPKHSLLYEYFTVYNELTKVKYVTEGMRKPAFLSGEQKKAIVDLLFKTNRKVTVKQLKEDYFKKIECFDSVEISGVEDRFNASLGTYHDLLKIIKDKDFLDNEENEDILEDIVLTLTLFEDREMIEERLKTYAHLFDDKVMKQLKRRRYTGWGRLSRKLINGIRDKQSGKTILDFLKSDGFANRNFMQLIHDDSLTFKEDIQKAQVSGQGDSLHEHIANLAGSPAIKKGILQTVKVVDELVKVMGRHKPENIVIEMARENQTTQKGQKNSRERMKRIEEGIKELGSQILKEHPVENTQLQNEKLYLYYLQNGRDMYVDQELDINRLSDYDVDHIVPQSFLKDDSIDNKVLTRSDKARGKSDNVPSEEVVKKMKNYWRQLLNAKLITQRKFDNLTKAERGGLSELDKAGFIKRQLVETRQITKHVAQILDSRMNTKYDENDKLIREVKVITLKSKLVSDFRKDFQFYKVREINNYHHAHDAYLNAVVGTALIKKYPKLESEFVYGDYKVYDVRKMIAKSEQEIGKATAKYFFYSNIMNFFKTEITLANGEIRKRPLIETNGETGEIVWDKGRDFATVRKVLSMPQVNIVKKTEVQTGGFSKESILPKRNSDKLIARKKDWDPKKYGGFDSPTVAYSVLVVAKVEKGKSKKLKSVKELLGITIMERSSFEKNPIDFLEAKGYKEVKKDLIIKLPKYSLFELENGRKRMLASAGELQKGNELALPSKYVNFLYLASHYEKLKGSPEDNEQKQLFVEQHKHYLDEIIEQISEFSKRVILADANLDKVLSAYNKHRDKPIREQAENIIHLFTLTNLGAPAAFKYFDTTIDRKRYTSTKEVLDATLIHQSITGLYETRIDLSQLGGDGGGSSGSSGSSGSSGSSGSSGGTLGDQGSRGSDPLPEPRVTLTVEGIPTEFLVNTGAEHSVLTKPMGKMGSKRTVVAGATGSKVYPWTTKRLLKIGQKQVTHSFLVIPECPAPLLGRDLLTKLKAQIQFSTEGPQVTWEDRPAMCLVLNLEEEYRLHEKPVPPSIDPSWLQLFPMVWAEKAGMGLANQVPPVVVELKSDASPVAVRQYPMSKEAREGIRPHIQRFLDLGILVPCQSPWNTPLLPVKKPGTNDYRPVQDLREVNKRVQDIHPTVPNPYNLLSSLPPSHTWYSVLDLKDAFFCLKLHPNSQPLFAFEWRDPEKGNTGQLTWTRLPQGFKNSPTLFNEALHRDLASFRALNPQVVMLQYVDDLLVAAPTYRDCKEGTRRLLQELSKLGYRVSAKKAQLCREEVTYLGYLLKGGKRWLTPARKATVMKIPTPTTPRQVREFLGTAGFCRLWIPGFASLAAPLYPLTRPKVPFTWTEAHQEAFGRIKEALLSAPALALPDLTKPFALYVDEKEGVARGVLTQTLGPWRRPVAYLSKKLDPVASGWPTCLKAIAAVALLLKDADKLTLGQNVLVIAPHNLESIVRQPPDRWMTNARMTHYQSLLLNERVSFAPPAILNPATLLPVESDDTPIHICSEILAEETGTRPDLRDQPLPGVPAWYTDGSSFIMDGRRQAGAAIVDNKRTVWASNLPEGTSAQKAELIALTQALRLAEGKSINIYTDSRYAFATAHVHGAIYKQRGWLTSAGKDIKNKEEILALLEAIHLPKRVAIIHCPGHQRGTDPVATGNRKADEAAKQAAQSTRILTETTKNAGKRTADGSEFEKRTADGSEFESPKKKAKVE

SEQ ID NO: 6346 - protein, 2225 aa, synthetic construct
MPAAKRVKLDGGDKKYSIGLDIGTNSVGWAVITDEYKVPSKKFKVLGNTDRHSIKKNLIGALLFDSGETAEATRLKRTARRRYTRRKNRICYLQEIFSNEMAKVDDSFFHRLEESFLVEEDKKHERHPIFGNIVDEVAYHEKYPTIYHLRKKLVDSTDKADLRLIYLALAHMIKFRGHFLIEGDLNPDNSDVDKLFIQLVQTYNQLFEENPINASGVDAKAILSARLSKSRRLENLIAQLPGEKKNGLFGNLIALSLGLTPNFKSNFDLAEDAKLQLSKDTYDDDLDNLLAQIGDQYADLFLAAKNLSDAILLSDILRVNTEITKAPLSASMIKRYDEHHQDLTLLKALVRQQLPEKYKEIFFDQSKNGYAGYIDGGASQEEFYKFIKPILEKMDGTEELLVKLNREDLLRKQRTFDNGSIPHQIHLGELHAILRRQEDFYPFLKDNREKIEKILTFRIPYYVGPLARGNSRFAWMTRKSEETITPWNFEEVVDKGASAQSFIERMTNFDKNLPNEKVLPKHSLLYEYFTVYNELTKVKYVTEGMRKPAFLSGEQKKAIVDLLFKTNRKVTVKQLKEDYFKKIECFDSVEISGVEDRFNASLGTYHDLLKIIKDKDFLDNEENEDILEDIVLTLTLFEDREMIEERLKTYAHLFDDKVMKQLKRRRYTGWGRLSRKLINGIRDKQSGKTILDFLKSDGFANRNFMQLIHDDSLTFKEDIQKAQVSGQGDSLHEHIANLAGSPAIKKGILQTVKVVDELVKVMGRHKPENIVIEMARENQTTQKGQKNSRERMKRIEEGIKELGSQILKEHPVENTQLQNEKLYLYYLQNGRDMYVDQELDINRLSDYDVDHIVPQSFLKDDSIDNKVLTRSDKARGKSDNVPSEEVVKKMKNYWRQLLNAKLITQRKFDNLTKAERGGLSELDKAGFIKRQLVETRQITKHVAQILDSRMNTKYDENDKLIREVKVITLKSKLVSDFRKDFQFYKVREINNYHHAHDAYLNAVVGTALIKKYPKLESEFVYGDYKVYDVRKMIAKSEQEIGKATAKYFFYSNIMNFFKTEITLANGEIRKRPLIETNGETGEIVWDKGRDFATVRKVLSMPQVNIVKKTEVQTGGFSKESILPKRNSDKLIARKKDWDPKKYGGFDSPTVAYSVLVVAKVEKGKSKKLKSVKELLGITIMERSSFEKNPIDFLEAKGYKEVKKDLIIKLPKYSLFELENGRKRMLASAGELQKGNELALPSKYVNFLYLASHYEKLKGSPEDNEQKQLFVEQHKHYLDEIIEQISEFSKRVILADANLDKVLSAYNKHRDKPIREQAENIIHLFTLTNLGAPAAFKYFDTTIDRKRYTSTKEVLDATLIHQSITGLYETRIDLSQLGGDGGGSSGSSGSSGSSGSSGSSGGTLGDQGSRGSDPLPEPRVTLTVEGIPTEFLVNTGAEHSVLTKPMGKMGSKRTVVAGATGSKVYPWTTKRLLKIGQKQVTHSFLVIPECPAPLLGRDLLTKLKAQIQFSTEGPQVTWEDRPAMCLVLNLEEEYRLHEKPVPPSIDPSWLQLFPMVWAEKAGMGLANQVPPVVVELKSDASPVAVRQYPMSKEAREGIRPHIQRFLDLGILVPCQSPWNTPLLPVKKPGTNDYRPVQDLREVNKRVQDIHPTVPNPYNLLSSLPPSHTWYSVLDLKDAFFCLKLHPNSQPLFAFEWRDPEKGNTGQLTWTRLPQGFKNSPTLFNEALHRDLASFRALNPQVVMLQYVDDLLVAAPTYRDCKEGTRRLLQELSKLGYRVSAKKAQLCREEVTYLGYLLKGGKRWLTPARKATVMKIPTPTTPRQVREFLGKAGFCRLFIPGFASLAAPLYPLTRPKVPFTWTEAHQEAFGRIKEALLSAPALALPDLTKPFALYVDEKEGVARGVLTQTLGPWRRPVAYLSKKLDPVASGWPTCLKAIAAVALLLKDADKLTLGQNVLVIAPHNLESIVRQPPDRWMTNARMTHYQSLLLNERVSFAPPAILNPATLLPVESDDTPIHICSEILAEETGTRPDLRDQPLPGVPAWYTDGSSFIMDGRRQAGAAIVDNKRTVWASNLPEGTSAQKAELIALTQALRLAEGKSINIYTDSRYAFATAHVHGAIYKQRGWLTSAGKDIKNKEEILALLEAIHLPKRVAIIHCPGHQRGTDPVATGNRKADEAAKQAAQSTRILTETTKNAGKRTADGSEFEKRTADGSEFESPKKKAKVE

SEQ ID NO: 6347 - protein, 2103 aa, synthetic construct
MPAAKRVKLDGGDKKYSIGLDIGTNSVGWAVITDEYKVPSKKFKVLGNTDRHSIKKNLIGALLFDSGETAEATRLKRTARRRYTRRKNRICYLQEIFSNEMAKVDDSFFHRLEESFLVEEDKKHERHPIFGNIVDEVAYHEKYPTIYHLRKKLVDSTDKADLRLIYLALAHMIKFRGHFLIEGDLNPDNSDVDKLFIQLVQTYNQLFEENPINASGVDAKAILSARLSKSRRLENLIAQLPGEKKNGLFGNLIALSLGLTPNFKSNFDLAEDAKLQLSKDTYDDDLDNLLAQIGDQYADLFLAAKNLSDAILLSDILRVNTEITKAPLSASMIKRYDEHHQDLTLLKALVRQQLPEKYKEIFFDQSKNGYAGYIDGGASQEEFYKFIKPILEKMDGTEELLVKLNREDLLRKQRTFDNGSIPHQIHLGELHAILRRQEDFYPFLKDNREKIEKILTFRIPYYVGPLARGNSRFAWMTRKSEETITPWNFEEVVDKGASAQSFIERMTNFDKNLPNEKVLPKHSLLYEYFTVYNELTKVKYVTEGMRKPAFLSGEQKKAIVDLLFKTNRKVTVKQLKEDYFKKIECFDSVEISGVEDRFNASLGTYHDLLKIIKDKDFLDNEENEDILEDIVLTLTLFEDREMIEERLKTYAHLFDDKVMKQLKRRRYTGWGRLSRKLINGIRDKQSGKTILDFLKSDGFANRNFMQLIHDDSLTFKEDIQKAQVSGQGDSLHEHIANLAGSPAIKKGILQTVKVVDELVKVMGRHKPENIVIEMARENQTTQKGQKNSRERMKRIEEGIKELGSQILKEHPVENTQLQNEKLYLYYLQNGRDMYVDQELDINRLSDYDVDHIVPQSFLKDDSIDNKVLTRSDKARGKSDNVPSEEVVKKMKNYWRQLLNAKLITQRKFDNLTKAERGGLSELDKAGFIKRQLVETRQITKHVAQILDSRMNTKYDENDKLIREVKVITLKSKLVSDFRKDFQFYKVREINNYHHAHDAYLNAVVGTALIKKYPKLESEFVYGDYKVYDVRKMIAKSEQEIGKATAKYFFYSNIMNFFKTEITLANGEIRKRPLIETNGETGEIVWDKGRDFATVRKVLSMPQVNIVKKTEVQTGGFSKESILPKRNSDKLIARKKDWDPKKYGGFDSPTVAYSVLVVAKVEKGKSKKLKSVKELLGITIMERSSFEKNPIDFLEAKGYKEVKKDLIIKLPKYSLFELENGRKRMLASAGELQKGNELALPSKYVNFLYLASHYEKLKGSPEDNEQKQLFVEQHKHYLDEIIEQISEFSKRVILADANLDKVLSAYNKHRDKPIREQAENIIHLFTLTNLGAPAAFKYFDTTIDRKRYTSTKEVLDATLIHQSITGLYETRIDLSQLGGDGGGSSGSSGSSGSSGSSGSSGGTLNLEDEYRLYETSAEPEVSPGSTWLSDFPQAWAETGGMGLAVRQAPLIIPLKATSTPVSIKQYPMSQEAKLGIKPHIQRLLDQGILVPCQSPWNTPLLPVKKPGTNDYRPVQDLREVNKRVEDIHPTVPNPYNLLSGLPPSHRWYTVLDLKDAFFCLRLHPTSQPLFAFEWRDPGMGISGQLTWTRLPQGFKNSPTLFNEALHRDLADFRIQHPDLILLQYVDDILLAATSELDCQQGTRALLLTLGNLGYRASAKKAQLCQKQVKYLGYLLKEGQRWLTEARKETVMGQPTPKTPRQLREFLGTAGFCRLWIPGFAEMAAPLYPLTKPGTLFNWGPDQQKAYQEIKQALLTAPALGLPDLTKPFELFVDEKQGYAKGVLTQKLGPWRRPVAYLSKKLDPVAAGWPPCLRMVAAIAVLRKDAGKLTMGQPLVILAPHAVEALVKQPPDRWLSNARMTHYQAMLLDTDRVQFGPVVALNPATLLPLPEEGAPHDCLEILAETHGTRPDLTDQPIPDADHTWYTDGSSFLQEGQRKAGAAVTTETEVIWARALPAGTSAQRAELIALTQALKMAEGKRLNVYTDSRYAFATAHIHGEIYRRRGWLTSEGREIKNKSEILALLKALFLPKRLSIIHCLGHQKGDSAEARGNRLADQAAREAAIKTPPDTSTLLAGKRTADGSEFEKRTADGSEFESPKKKAKVE

SEQ ID NO: 6348 - protein, 2103 aa, synthetic construct
MPAAKRVKLDGGDKKYSIGLDIGTNSVGWAVITDEYKVPSKKFKVLGNTDRHSIKKNLIGALLFDSGETAEATRLKRTARRRYTRRKNRICYLQEIFSNEMAKVDDSFFHRLEESFLVEEDKKHERHPIFGNIVDEVAYHEKYPTIYHLRKKLVDSTDKADLRLIYLALAHMIKFRGHFLIEGDLNPDNSDVDKLFIQLVQTYNQLFEENPINASGVDAKAILSARLSKSRRLENLIAQLPGEKKNGLFGNLIALSLGLTPNFKSNFDLAEDAKLQLSKDTYDDDLDNLLAQIGDQYADLFLAAKNLSDAILLSDILRVNTEITKAPLSASMIKRYDEHHQDLTLLKALVRQQLPEKYKEIFFDQSKNGYAGYIDGGASQEEFYKFIKPILEKMDGTEELLVKLNREDLLRKQRTFDNGSIPHQIHLGELHAILRRQEDFYPFLKDNREKIEKILTFRIPYYVGPLARGNSRFAWMTRKSEETITPWNFEEVVDKGASAQSFIERMTNFDKNLPNEKVLPKHSLLYEYFTVYNELTKVKYVTEGMRKPAFLSGEQKKAIVDLLFKTNRKVTVKQLKEDYFKKIECFDSVEISGVEDRFNASLGTYHDLLKIIKDKDFLDNEENEDILEDIVLTLTLFEDREMIEERLKTYAHLFDDKVMKQLKRRRYTGWGRLSRKLINGIRDKQSGKTILDFLKSDGFANRNFMQLIHDDSLTFKEDIQKAQVSGQGDSLHEHIANLAGSPAIKKGILQTVKVVDELVKVMGRHKPENIVIEMARENQTTQKGQKNSRERMKRIEEGIKELGSQILKEHPVENTQLQNEKLYLYYLQNGRDMYVDQELDINRLSDYDVDHIVPQSFLKDDSIDNKVLTRSDKARGKSDNVPSEEVVKKMKNYWRQLLNAKLITQRKFDNLTKAERGGLSELDKAGFIKRQLVETRQITKHVAQILDSRMNTKYDENDKLIREVKVITLKSKLVSDFRKDFQFYKVREINNYHHAHDAYLNAVVGTALIKKYPKLESEFVYGDYKVYDVRKMIAKSEQEIGKATAKYFFYSNIMNFFKTEITLANGEIRKRPLIETNGETGEIVWDKGRDFATVRKVLSMPQVNIVKKTEVQTGGFSKESILPKRNSDKLIARKKDWDPKKYGGFDSPTVAYSVLVVAKVEKGKSKKLKSVKELLGITIMERSSFEKNPIDFLEAKGYKEVKKDLIIKLPKYSLFELENGRKRMLASAGELQKGNELALPSKYVNFLYLASHYEKLKGSPEDNEQKQLFVEQHKHYLDEIIEQISEFSKRVILADANLDKVLSAYNKHRDKPIREQAENIIHLFTLTNLGAPAAFKYFDTTIDRKRYTSTKEVLDATLIHQSITGLYETRIDLSQLGGDGGGSSGSSGSSGSSGSSGSSGGTLNLEDEYRLYETSAEPEVSPGSTWLSDFPQAWAETGGMGLAVRQAPLIIPLKATSTPVSIKQYPMSQEAKLGIKPHIQRLLDQGILVPCQSPWNTPLLPVKKPGTNDYRPVQDLREVNKRVEDIHPTVPNPYNLLSGLPPSHRWYTVLDLKDAFFCLRLHPTSQPLFAFEWRDPGMGISGQLTWTRLPQGFKNSPTLFNEALHRDLADFRIQHPDLILLQYVDDILLAATSELDCQQGTRALLLTLGNLGYRASAKKAQLCQKQVKYLGYLLKEGQRWLTEARKETVMGQPTPKTPRQLREFLGKAGFCRLFIPGFAEMAAPLYPLTKPGTLFNWGPDQQKAYQEIKQALLTAPALGLPDLTKPFELFVDEKQGYAKGVLTQKLGPWRRPVAYLSKKLDPVAAGWPPCLRMVAAIAVLRKDAGKLTMGQPLVILAPHAVEALVKQPPDRWLSNARMTHYQAMLLDTDRVQFGPVVALNPATLLPLPEEGAPHDCLEILAETHGTRPDLTDQPIPDADHTWYTDGSSFLQEGQRKAGAAVTTETEVIWARALPAGTSAQRAELIALTQALKMAEGKRLNVYTDSRYAFATAHIHGEIYRRRGWLTSEGREIKNKSEILALLKALFLPKRLSIIHCLGHQKGDSAEARGNRLADQAAREAAIKTPPDTSTLLAGKRTADGSEFEKRTADGSEFESPKKKAKVE

SEQ ID NO: 6349 - protein, 2103 aa, synthetic construct
MPAAKRVKLDGGDKKYSIGLDIGTNSVGWAVITDEYKVPSKKFKVLGNTDRHSIKKNLIGALLFDSGETAEATRLKRTARRRYTRRKNRICYLQEIFSNEMAKVDDSFFHRLEESFLVEEDKKHERHPIFGNIVDEVAYHEKYPTIYHLRKKLVDSTDKADLRLIYLALAHMIKFRGHFLIEGDLNPDNSDVDKLFIQLVQTYNQLFEENPINASGVDAKAILSARLSKSRRLENLIAQLPGEKKNGLFGNLIALSLGLTPNFKSNFDLAEDAKLQLSKDTYDDDLDNLLAQIGDQYADLFLAAKNLSDAILLSDILRVNTEITKAPLSASMIKRYDEHHQDLTLLKALVRQQLPEKYKEIFFDQSKNGYAGYIDGGASQEEFYKFIKPILEKMDGTEELLVKLNREDLLRKQRTFDNGSIPHQIHLGELHAILRRQEDFYPFLKDNREKIEKILTFRIPYYVGPLARGNSRFAWMTRKSEETITPWNFEEVVDKGASAQSFIERMTNFDKNLPNEKVLPKHSLLYEYFTVYNELTKVKYVTEGMRKPAFLSGEQKKAIVDLLFKTNRKVTVKQLKEDYFKKIECFDSVEISGVEDRFNASLGTYHDLLKIIKDKDFLDNEENEDILEDIVLTLTLFEDREMIEERLKTYAHLFDDKVMKQLKRRRYTGWGRLSRKLINGIRDKQSGKTILDFLKSDGFANRNFMQLIHDDSLTFKEDIQKAQVSGQGDSLHEHIANLAGSPAIKKGILQTVKVVDELVKVMGRHKPENIVIEMARENQTTQKGQKNSRERMKRIEEGIKELGSQILKEHPVENTQLQNEKLYLYYLQNGRDMYVDQELDINRLSDYDVDHIVPQSFLKDDSIDNKVLTRSDKARGKSDNVPSEEVVKKMKNYWRQLLNAKLITQRKFDNLTKAERGGLSELDKAGFIKRQLVETRQITKHVAQILDSRMNTKYDENDKLIREVKVITLKSKLVSDFRKDFQFYKVREINNYHHAHDAYLNAVVGTALIKKYPKLESEFVYGDYKVYDVRKMIAKSEQEIGKATAKYFFYSNIMNFFKTEITLANGEIRKRPLIETNGETGEIVWDKGRDFATVRKVLSMPQVNIVKKTEVQTGGFSKESILPKRNSDKLIARKKDWDPKKYGGFDSPTVAYSVLVVAKVEKGKSKKLKSVKELLGITIMERSSFEKNPIDFLEAKGYKEVKKDLIIKLPKYSLFELENGRKRMLASAGELQKGNELALPSKYVNFLYLASHYEKLKGSPEDNEQKQLFVEQHKHYLDEIIEQISEFSKRVILADANLDKVLSAYNKHRDKPIREQAENIIHLFTLTNLGAPAAFKYFDTTIDRKRYTSTKEVLDATLIHQSITGLYETRIDLSQLGGDGGGSSGSSGSSGSSGSSGSSGGTLNIEDEYRLHETSKEPDVSLGSTWLSDFPQAWAETGGMGLAVRQAPLIIPLKATSTPVSIKQYPMSQEARLGIKPHIQRLLDQGILVPCQSPWNTPLLPVKKPGTNDYRPVQDLREVNKRVEDIHPTVPNPYNLLSGLPPSHQWYTVLDLKDAFFCLRLHPTSQPLFAFEWRDPEMGISGQLTWTRLPQGFKNSPTLFNEALHRDLAGFRIQHPDLILLQYVDDLLLAATSELDCQQGTRALLQTLGDLGYRASAKKAQICQKQVKYLGYLLKEGQRWLTEARKETVMGQPIPKTPRQLREFLGTAGFCRLWIPGFAEMAAPLYPLTKPGTLFNWGPDQQKAFQEIKQALLTAPALGLPDLTKPFELFVDEKQGYAKGVLTQKLGPWRRPVAYLSKKLDPVAAGWPPCLRMVAAIAVLTKDAGKLTMGQPLVILAPHAVEALVKQPPDRWLSNARMTHYQALLLDTDRVQFGPVVALNPATLLPLPEEGLQHDCLDILAEAHGTRSDLMDQPLPDADHTWYTDGSSFLQEGQRKAGAAVTTETEVIWARALPAGTSAQRAELIALTQALKMAEGKKLNVYTDSRYAFATAHIHGEIYRRRGWLTSEGKEIKNKDEILALLKALFLPKRLSIIHCPGHQKGNSAEARGNRMADQAAREVATRETPETSTLLAGKRTADGSEFEKRTADGSEFESPKKKAKVE

SEQ ID NO: 6350 - protein, 2103 aa, synthetic construct
MPAAKRVKLDGGDKKYSIGLDIGTNSVGWAVITDEYKVPSKKFKVLGNTDRHSIKKNLIGALLFDSGETAEATRLKRTARRRYTRRKNRICYLQEIFSNEMAKVDDSFFHRLEESFLVEEDKKHERHPIFGNIVDEVAYHEKYPTIYHLRKKLVDSTDKADLRLIYLALAHMIKFRGHFLIEGDLNPDNSDVDKLFIQLVQTYNQLFEENPINASGVDAKAILSARLSKSRRLENLIAQLPGEKKNGLFGNLIALSLGLTPNFKSNFDLAEDAKLQLSKDTYDDDLDNLLAQIGDQYADLFLAAKNLSDAILLSDILRVNTEITKAPLSASMIKRYDEHHQDLTLLKALVRQQLPEKYKEIFFDQSKNGYAGYIDGGASQEEFYKFIKPILEKMDGTEELLVKLNREDLLRKQRTFDNGSIPHQIHLGELHAILRRQEDFYPFLKDNREKIEKILTFRIPYYVGPLARGNSRFAWMTRKSEETITPWNFEEVVDKGASAQSFIERMTNFDKNLPNEKVLPKHSLLYEYFTVYNELTKVKYVTEGMRKPAFLSGEQKKAIVDLLFKTNRKVTVKQLKEDYFKKIECFDSVEISGVEDRFNASLGTYHDLLKIIKDKDFLDNEENEDILEDIVLTLTLFEDREMIEERLKTYAHLFDDKVMKQLKRRRYTGWGRLSRKLINGIRDKQSGKTILDFLKSDGFANRNFMQLIHDDSLTFKEDIQKAQVSGQGDSLHEHIANLAGSPAIKKGILQTVKVVDELVKVMGRHKPENIVIEMARENQTTQKGQKNSRERMKRIEEGIKELGSQILKEHPVENTQLQNEKLYLYYLQNGRDMYVDQELDINRLSDYDVDHIVPQSFLKDDSIDNKVLTRSDKARGKSDNVPSEEVVKKMKNYWRQLLNAKLITQRKFDNLTKAERGGLSELDKAGFIKRQLVETRQITKHVAQILDSRMNTKYDENDKLIREVKVITLKSKLVSDFRKDFQFYKVREINNYHHAHDAYLNAVVGTALIKKYPKLESEFVYGDYKVYDVRKMIAKSEQEIGKATAKYFFYSNIMNFFKTEITLANGEIRKRPLIETNGETGEIVWDKGRDFATVRKVLSMPQVNIVKKTEVQTGGFSKESILPKRNSDKLIARKKDWDPKKYGGFDSPTVAYSVLVVAKVEKGKSKKLKSVKELLGITIMERSSFEKNPIDFLEAKGYKEVKKDLIIKLPKYSLFELENGRKRMLASAGELQKGNELALPSKYVNFLYLASHYEKLKGSPEDNEQKQLFVEQHKHYLDEIIEQISEFSKRVILADANLDKVLSAYNKHRDKPIREQAENIIHLFTLTNLGAPAAFKYFDTTIDRKRYTSTKEVLDATLIHQSITGLYETRIDLSQLGGDGGGSSGSSGSSGSSGSSGSSGGTLNIEDEYRLHETSKGPDVPLGSTWLSDFPQAWAETGGMGLAFRQAPLIISLKATSTPVSIKQYPMSQEARLGIKPHIQRLLDQGILVPCQSPWNTPLLPVKKPGTNDYRPVQDLREVNKRVEDIHPTVPNPYNLLSGLPPSHQWYTVLDLKDAFFCLRLHPTSQSLFAFEWKDPEMGISGQLTWTRLPQGFKNSPTLFDEALHRDLADFRIQHPDLILLQYVDDLLLAATSELDCQQGTRALLQTLGDLGYRASAKKAQICQKQVKYLGYLLKEGQRWLTEARKETVMGQPTPKTPRQLREFLGTAGLCRLWIPGFAEMAAPLYPLTKTGTLFKWGPDQQKAYQEIKQALLTAPALGLPDLTKPFELFVDEKQGYAKGVLTQKLGPWRRPVAYLSKKLDPVAAGWPPCLRMVAAIAVLTKDVGKLTMGQPLVILAPHAVEALVKQPPDRWLSNARMTHYQALLLDTDRVQFGPIVALNPATLLPLPEEGLQHDCLDILAEAHGTRPDLTDQPLPDADHTWYTDGSSFLQEGQRRAGAAVTTETEVIWAKALPAGTSAQRAELIALTQALKMAAGKKLNVYTDSRYAFATAHIHGEIYRRRGLLTSEGKEIKNKDEILALLKALFLPKRLSIIHCPGHQKGNHAEARGNRMADQAAREVATRETPETSTLLAGKRTADGSEFEKRTADGSEFESPKKKAKVE

SEQ ID NO: 6351 - protein, 2103 aa, synthetic construct
MPAAKRVKLDGGDKKYSIGLDIGTNSVGWAVITDEYKVPSKKFKVLGNTDRHSIKKNLIGALLFDSGETAEATRLKRTARRRYTRRKNRICYLQEIFSNEMAKVDDSFFHRLEESFLVEEDKKHERHPIFGNIVDEVAYHEKYPTIYHLRKKLVDSTDKADLRLIYLALAHMIKFRGHFLIEGDLNPDNSDVDKLFIQLVQTYNQLFEENPINASGVDAKAILSARLSKSRRLENLIAQLPGEKKNGLFGNLIALSLGLTPNFKSNFDLAEDAKLQLSKDTYDDDLDNLLAQIGDQYADLFLAAKNLSDAILLSDILRVNTEITKAPLSASMIKRYDEHHQDLTLLKALVRQQLPEKYKEIFFDQSKNGYAGYIDGGASQEEFYKFIKPILEKMDGTEELLVKLNREDLLRKQRTFDNGSIPHQIHLGELHAILRRQEDFYPFLKDNREKIEKILTFRIPYYVGPLARGNSRFAWMTRKSEETITPWNFEEVVDKGASAQSFIERMTNFDKNLPNEKVLPKHSLLYEYFTVYNELTKVKYVTEGMRKPAFLSGEQKKAIVDLLFKTNRKVTVKQLKEDYFKKIECFDSVEISGVEDRFNASLGTYHDLLKIIKDKDFLDNEENEDILEDIVLTLTLFEDREMIEERLKTYAHLFDDKVMKQLKRRRYTGWGRLSRKLINGIRDKQSGKTILDFLKSDGFANRNFMQLIHDDSLTFKEDIQKAQVSGQGDSLHEHIANLAGSPAIKKGILQTVKVVDELVKVMGRHKPENIVIEMARENQTTQKGQKNSRERMKRIEEGIKELGSQILKEHPVENTQLQNEKLYLYYLQNGRDMYVDQELDINRLSDYDVDHIVPQSFLKDDSIDNKVLTRSDKARGKSDNVPSEEVVKKMKNYWRQLLNAKLITQRKFDNLTKAERGGLSELDKAGFIKRQLVETRQITKHVAQILDSRMNTKYDENDKLIREVKVITLKSKLVSDFRKDFQFYKVREINNYHHAHDAYLNAVVGTALIKKYPKLESEFVYGDYKVYDVRKMIAKSEQEIGKATAKYFFYSNIMNFFKTEITLANGEIRKRPLIETNGETGEIVWDKGRDFATVRKVLSMPQVNIVKKTEVQTGGFSKESILPKRNSDKLIARKKDWDPKKYGGFDSPTVAYSVLVVAKVEKGKSKKLKSVKELLGITIMERSSFEKNPIDFLEAKGYKEVKKDLIIKLPKYSLFELENGRKRMLASAGELQKGNELALPSKYVNFLYLASHYEKLKGSPEDNEQKQLFVEQHKHYLDEIIEQISEFSKRVILADANLDKVLSAYNKHRDKPIREQAENIIHLFTLTNLGAPAAFKYFDTTIDRKRYTSTKEVLDATLIHQSITGLYETRIDLSQLGGDGGGSSGSSGSSGSSGSSGSSGGTLNIEDEYRLHETSKGPDVPLGSTWLSDFPQAWAETGGMGLAVRQAPLIIPLKATSTPVSIKQYPMSQEARLGIKPHIQRLLDQGILVPCQSPWNTPLLPVKKPGTNDYRPVQDLREVNKRVEDIHPTVPNPYNLLSGLPPSHQWYTVLDLKDAFFCLRLHPTSQSLFAFEWRDPEMGISGQLTWTRLPQGFKNSPTLFNEALHRDLADFRIQHPDLILLQYVDDLLLAATSELDCQQGTRALLQTLGDLGYRASAKKAQICQKQVKYLGYLLKEGQRWLTEARKETVMGQPTPKTPRQLREFLGTAGFCRLWIPGFAEMAAPLYPLTKPGTLFEWGPDQQKAYQEIKQALLTAPALGLPDLTKPFELFVDEKQGYAKGVLTQKLGPWRRPVAYLSKKLDPVAAGWPPCLRMVAAIAVLTKDAGKLTMGQPLVILAPHAVEALVKQPPDRWLSNARMTHYQALLLDTDRVQFGPIVALNPATLLPLPEEGLQHDCLDILAEAHGTRPDLTDQPLPDADHTWYTDGSSFLQEGQRKAGAAVTTETEVVWAKALPAGTSAQRAELIALTQALKMAEGKKLNVYTDSRYAFATAHIHGEIYRRRGWLTSEGKEIKNKDEILALLKALFLPKRLSIIHCPGHQKGNRAEARGNRMADQAAREVATRETPETSTLLAGKRTADGSEFEKRTADGSEFESPKKKAKVE

SEQ ID NO: 6352 - protein, 2103 aa, synthetic construct
MPAAKRVKLDGGDKKYSIGLDIGTNSVGWAVITDEYKVPSKKFKVLGNTDRHSIKKNLIGALLFDSGETAEATRLKRTARRRYTRRKNRICYLQEIFSNEMAKVDDSFFHRLEESFLVEEDKKHERHPIFGNIVDEVAYHEKYPTIYHLRKKLVDSTDKADLRLIYLALAHMIKFRGHFLIEGDLNPDNSDVDKLFIQLVQTYNQLFEENPINASGVDAKAILSARLSKSRRLENLIAQLPGEKKNGLFGNLIALSLGLTPNFKSNFDLAEDAKLQLSKDTYDDDLDNLLAQIGDQYADLFLAAKNLSDAILLSDILRVNTEITKAPLSASMIKRYDEHHQDLTLLKALVRQQLPEKYKEIFFDQSKNGYAGYIDGGASQEEFYKFIKPILEKMDGTEELLVKLNREDLLRKQRTFDNGSIPHQIHLGELHAILRRQEDFYPFLKDNREKIEKILTFRIPYYVGPLARGNSRFAWMTRKSEETITPWNFEEVVDKGASAQSFIERMTNFDKNLPNEKVLPKHSLLYEYFTVYNELTKVKYVTEGMRKPAFLSGEQKKAIVDLLFKTNRKVTVKQLKEDYFKKIECFDSVEISGVEDRFNASLGTYHDLLKIIKDKDFLDNEENEDILEDIVLTLTLFEDREMIEERLKTYAHLFDDKVMKQLKRRRYTGWGRLSRKLINGIRDKQSGKTILDFLKSDGFANRNFMQLIHDDSLTFKEDIQKAQVSGQGDSLHEHIANLAGSPAIKKGILQTVKVVDELVKVMGRHKPENIVIEMARENQTTQKGQKNSRERMKRIEEGIKELGSQILKEHPVENTQLQNEKLYLYYLQNGRDMYVDQELDINRLSDYDVDHIVPQSFLKDDSIDNKVLTRSDKARGKSDNVPSEEVVKKMKNYWRQLLNAKLITQRKFDNLTKAERGGLSELDKAGFIKRQLVETRQITKHVAQILDSRMNTKYDENDKLIREVKVITLKSKLVSDFRKDFQFYKVREINNYHHAHDAYLNAVVGTALIKKYPKLESEFVYGDYKVYDVRKMIAKSEQEIGKATAKYFFYSNIMNFFKTEITLANGEIRKRPLIETNGETGEIVWDKGRDFATVRKVLSMPQVNIVKKTEVQTGGFSKESILPKRNSDKLIARKKDWDPKKYGGFDSPTVAYSVLVVAKVEKGKSKKLKSVKELLGITIMERSSFEKNPIDFLEAKGYKEVKKDLIIKLPKYSLFELENGRKRMLASAGELQKGNELALPSKYVNFLYLASHYEKLKGSPEDNEQKQLFVEQHKHYLDEIIEQISEFSKRVILADANLDKVLSAYNKHRDKPIREQAENIIHLFTLTNLGAPAAFKYFDTTIDRKRYTSTKEVLDATLIHQSITGLYETRIDLSQLGGDGGGSSGSSGSSGSSGSSGSSGGTLNIEDEHRLHETSKEPDVSLGSTWLSDFPQAWAETGGMGLAVRQAPLIIPLKATSTPVSIKQYPMSQEARLGIKPHIQRLLDQGILVPCQSPWNTPLLPVKKPGTNDYRPVQDLREVNKRVEDIHPTVPNPYNLLSGLPPSHQWYTVLDLKDAFFCLRLHPTSQPLFAFEWRDPEMGISGQLTWTRLPQGFKNSPTLFDEALHRDLADFRIQHPDLILLQYVDDLLLAATSELDCQQGTRALLQTLGNLGYRASAKKAQICQKQVKYLGYLLKEGQRWLTEARKETVMGQPTPKTPRQLREFLGTAGFCRLWIPGFAEMAAPLYPLTKTGTLFNWGPDQQKAYQEIKQALLTAPALGLPDLTKPFELFVDEKQGYAKGVLTQKLGPWRRPVAYLSKKLDPVAAGWPPCLRMVAAIAVLTKDAGKLTMGQPLVILAPHAVEALVKQPPDRWLSNARMTHYQALLLDTDRVQFGPVVALNPATLLPLPEEGLQHNCLDILAEAHGTRPDLTDQPLPDADHTWYTDGSSLLQEGQRKAGAAVTTETEVIWAKALPAGTSAQRAELIALTQALKMAEGKKLNVYTDSRYAFATAHIHGEIYRRRGLLTSEGKEIKNKDEILALLKALFLPKRLSIIHCPGHQKGHSAEARGNRMADQAARKAAITETPDTSTLLAGKRTADGSEFEKRTADGSEFESPKKKAKVE

SEQ ID NO: 6353 - protein, 2103 aa, synthetic construct
MPAAKRVKLDGGDKKYSIGLDIGTNSVGWAVITDEYKVPSKKFKVLGNTDRHSIKKNLIGALLFDSGETAEATRLKRTARRRYTRRKNRICYLQEIFSNEMAKVDDSFFHRLEESFLVEEDKKHERHPIFGNIVDEVAYHEKYPTIYHLRKKLVDSTDKADLRLIYLALAHMIKFRGHFLIEGDLNPDNSDVDKLFIQLVQTYNQLFEENPINASGVDAKAILSARLSKSRRLENLIAQLPGEKKNGLFGNLIALSLGLTPNFKSNFDLAEDAKLQLSKDTYDDDLDNLLAQIGDQYADLFLAAKNLSDAILLSDILRVNTEITKAPLSASMIKRYDEHHQDLTLLKALVRQQLPEKYKEIFFDQSKNGYAGYIDGGASQEEFYKFIKPILEKMDGTEELLVKLNREDLLRKQRTFDNGSIPHQIHLGELHAILRRQEDFYPFLKDNREKIEKILTFRIPYYVGPLARGNSRFAWMTRKSEETITPWNFEEVVDKGASAQSFIERMTNFDKNLPNEKVLPKHSLLYEYFTVYNELTKVKYVTEGMRKPAFLSGEQKKAIVDLLFKTNRKVTVKQLKEDYFKKIECFDSVEISGVEDRFNASLGTYHDLLKIIKDKDFLDNEENEDILEDIVLTLTLFEDREMIEERLKTYAHLFDDKVMKQLKRRRYTGWGRLSRKLINGIRDKQSGKTILDFLKSDGFANRNFMQLIHDDSLTFKEDIQKAQVSGQGDSLHEHIANLAGSPAIKKGILQTVKVVDELVKVMGRHKPENIVIEMARENQTTQKGQKNSRERMKRIEEGIKELGSQILKEHPVENTQLQNEKLYLYYLQNGRDMYVDQELDINRLSDYDVDHIVPQSFLKDDSIDNKVLTRSDKARGKSDNVPSEEVVKKMKNYWRQLLNAKLITQRKFDNLTKAERGGLSELDKAGFIKRQLVETRQITKHVAQILDSRMNTKYDENDKLIREVKVITLKSKLVSDFRKDFQFYKVREINNYHHAHDAYLNAVVGTALIKKYPKLESEFVYGDYKVYDVRKMIAKSEQEIGKATAKYFFYSNIMNFFKTEITLANGEIRKRPLIETNGETGEIVWDKGRDFATVRKVLSMPQVNIVKKTEVQTGGFSKESILPKRNSDKLIARKKDWDPKKYGGFDSPTVAYSVLVVAKVEKGKSKKLKSVKELLGITIMERSSFEKNPIDFLEAKGYKEVKKDLIIKLPKYSLFELENGRKRMLASAGELQKGNELALPSKYVNFLYLASHYEKLKGSPEDNEQKQLFVEQHKHYLDEIIEQISEFSKRVILADANLDKVLSAYNKHRDKPIREQAENIIHLFTLTNLGAPAAFKYFDTTIDRKRYTSTKEVLDATLIHQSITGLYETRIDLSQLGGDGGGSSGSSGSSGSSGSSGSSGGTLNIEDEYRLHEISTEPDVSPGSTWLSDFPQAWAETGGMGLAVRQAPLIIPLKATSTPVSIKQYPMSQEAKLGIKPHIQRLLDQGILVPCQSPWNTPLLPVKKPGTNDYRPVQGLREVNKRVEDIHPTVPNPYNLLSGLPTSHRWYTVLDLKDAFFCLRLHPTSQPLFASEWRDPGMGISGQLTWTRLPQGFKNSPTLFDEALHRGLADFRIQHPDLILLQYVDDLLLAATSELDCQQGTRALLKTLGNLGYRASAKKAQICQKQVKYLGYLLREGQRWLTEARKETVMGQPTPKTPRQLREFLGTAGFCRLWIPRFAEMAAPLYPLTKTGTLFNWGPDQQKAYHEIKQALLTAPALGLPDLTKPFELFVDEKQGYAKGVLTQKLGPWRRPVAYLSKKLDPVAAGWPPCLRMVAAIAVLTKDAGKLTMGQPLVILAPHAVEALVKQPPDRWLSNARMTHYQAMLLDTDRVQFGPVVALNPATLLPLPEEGAPHDCLEILAETHGTEPDLTDQPIPDADHTWYTDGSSFLQEGQRKAGAAVTTETEVIWARALPAGTSAQRAELIALTQALKMAEGKRLNVYTDSRYAFATAHIHGEIYKRRGLLTSEGREIKNKSEILALLKALFLPKRLSIIHCLGHQKGDSAEARGNRLADQAAREAAIKTPPDTSTLLAGKRTADGSEFEKRTADGSEFESPKKKAKVE

SEQ ID NO: 6354 - protein, 2097 aa, synthetic construct
MPAAKRVKLDGGDKKYSIGLDIGTNSVGWAVITDEYKVPSKKFKVLGNTDRHSIKKNLIGALLFDSGETAEATRLKRTARRRYTRRKNRICYLQEIFSNEMAKVDDSFFHRLEESFLVEEDKKHERHPIFGNIVDEVAYHEKYPTIYHLRKKLVDSTDKADLRLIYLALAHMIKFRGHFLIEGDLNPDNSDVDKLFIQLVQTYNQLFEENPINASGVDAKAILSARLSKSRRLENLIAQLPGEKKNGLFGNLIALSLGLTPNFKSNFDLAEDAKLQLSKDTYDDDLDNLLAQIGDQYADLFLAAKNLSDAILLSDILRVNTEITKAPLSASMIKRYDEHHQDLTLLKALVRQQLPEKYKEIFFDQSKNGYAGYIDGGASQEEFYKFIKPILEKMDGTEELLVKLNREDLLRKQRTFDNGSIPHQIHLGELHAILRRQEDFYPFLKDNREKIEKILTFRIPYYVGPLARGNSRFAWMTRKSEETITPWNFEEVVDKGASAQSFIERMTNFDKNLPNEKVLPKHSLLYEYFTVYNELTKVKYVTEGMRKPAFLSGEQKKAIVDLLFKTNRKVTVKQLKEDYFKKIECFDSVEISGVEDRFNASLGTYHDLLKIIKDKDFLDNEENEDILEDIVLTLTLFEDREMIEERLKTYAHLFDDKVMKQLKRRRYTGWGRLSRKLINGIRDKQSGKTILDFLKSDGFANRNFMQLIHDDSLTFKEDIQKAQVSGQGDSLHEHIANLAGSPAIKKGILQTVKVVDELVKVMGRHKPENIVIEMARENQTTQKGQKNSRERMKRIEEGIKELGSQILKEHPVENTQLQNEKLYLYYLQNGRDMYVDQELDINRLSDYDVDHIVPQSFLKDDSIDNKVLTRSDKARGKSDNVPSEEVVKKMKNYWRQLLNAKLITQRKFDNLTKAERGGLSELDKAGFIKRQLVETRQITKHVAQILDSRMNTKYDENDKLIREVKVITLKSKLVSDFRKDFQFYKVREINNYHHAHDAYLNAVVGTALIKKYPKLESEFVYGDYKVYDVRKMIAKSEQEIGKATAKYFFYSNIMNFFKTEITLANGEIRKRPLIETNGETGEIVWDKGRDFATVRKVLSMPQVNIVKKTEVQTGGFSKESILPKRNSDKLIARKKDWDPKKYGGFDSPTVAYSVLVVAKVEKGKSKKLKSVKELLGITIMERSSFEKNPIDFLEAKGYKEVKKDLIIKLPKYSLFELENGRKRMLASAGELQKGNELALPSKYVNFLYLASHYEKLKGSPEDNEQKQLFVEQHKHYLDEIIEQISEFSKRVILADANLDKVLSAYNKHRDKPIREQAENIIHLFTLTNLGAPAAFKYFDTTIDRKRYTSTKEVLDATLIHQSITGLYETRIDLSQLGGDGGGSSGSSGSSGSSGSSGSSGGTLQLDDEYRLYSPLVKPDQNIQFWLEQFPQAWAETAGMGLAKQVPPQVIQLKASATPVSVRQYPLSKEAQEGIRPHVQRLIQQGILVPVQSPWNTPLLPVRKPGTNDYRPVQDLREVNKRVQDIHPTVPNPYNLLCALPPQRSWYTVLDLKDAFFCLRLHPTSQPLFAFEWRDPGTGRTGQLTWTRLPQGFKNSPTIFDEALHRDLANFRIQHPQVTLLQYVDDLLLAGATKQDCLEGTKALLLELSDLGYRASAKKAQICRREVTYLGYSLRDGQRWLTEARKKTVVQIPAPTTAKQVREFLGTAGFCRLWIPGFATLAAPLYPLTKEKGEFSWAPEHQKAFDAIKKALLSAPALALPDVTKPFTLYVDERKGVARGVLTQTLGPWRRPVAYLSKKLDPVASGWPVCLKAIAAVAILVKDADKLTLGQNITVIAPHALENIVRQPPDRWMTNARMTHYQSLLLTERVTFAPPAALNPATLLPEETDEPVTHDCHQLLIEETGVRKDLTDIPLTGEVLTWFTDGSSYVVEGKRMAGAAVVDGTRTIWASSLPEGTSAQKAELMALTQALRLAEGKSINIYTDSRYAFATAHVHGAIYKQRGLLTSAGREIKNKEEILSLLEALHLPKRLAIIHCPGHQKAKDPISRGNQMADRVAKQAAQGVNLLAGKRTADGSEFEKRTADGSEFESPKKKAKVE

SEQ ID NO: 6355 - protein, 2183 aa, synthetic construct
MPAAKRVKLDGGDKKYSIGLDIGTNSVGWAVITDEYKVPSKKFKVLGNTDRHSIKKNLIGALLFDSGETAEATRLKRTARRRYTRRKNRICYLQEIFSNEMAKVDDSFFHRLEESFLVEEDKKHERHPIFGNIVDEVAYHEKYPTIYHLRKKLVDSTDKADLRLIYLALAHMIKFRGHFLIEGDLNPDNSDVDKLFIQLVQTYNQLFEENPINASGVDAKAILSARLSKSRRLENLIAQLPGEKKNGLFGNLIALSLGLTPNFKSNFDLAEDAKLQLSKDTYDDDLDNLLAQIGDQYADLFLAAKNLSDAILLSDILRVNTEITKAPLSASMIKRYDEHHQDLTLLKALVRQQLPEKYKEIFFDQSKNGYAGYIDGGASQEEFYKFIKPILEKMDGTEELLVKLNREDLLRKQRTFDNGSIPHQIHLGELHAILRRQEDFYPFLKDNREKIEKILTFRIPYYVGPLARGNSRFAWMTRKSEETITPWNFEEVVDKGASAQSFIERMTNFDKNLPNEKVLPKHSLLYEYFTVYNELTKVKYVTEGMRKPAFLSGEQKKAIVDLLFKTNRKVTVKQLKEDYFKKIECFDSVEISGVEDRFNASLGTYHDLLKIIKDKDFLDNEENEDILEDIVLTLTLFEDREMIEERLKTYAHLFDDKVMKQLKRRRYTGWGRLSRKLINGIRDKQSGKTILDFLKSDGFANRNFMQLIHDDSLTFKEDIQKAQVSGQGDSLHEHIANLAGSPAIKKGILQTVKVVDELVKVMGRHKPENIVIEMARENQTTQKGQKNSRERMKRIEEGIKELGSQILKEHPVENTQLQNEKLYLYYLQNGRDMYVDQELDINRLSDYDVDHIVPQSFLKDDSIDNKVLTRSDKARGKSDNVPSEEVVKKMKNYWRQLLNAKLITQRKFDNLTKAERGGLSELDKAGFIKRQLVETRQITKHVAQILDSRMNTKYDENDKLIREVKVITLKSKLVSDFRKDFQFYKVREINNYHHAHDAYLNAVVGTALIKKYPKLESEFVYGDYKVYDVRKMIAKSEQEIGKATAKYFFYSNIMNFFKTEITLANGEIRKRPLIETNGETGEIVWDKGRDFATVRKVLSMPQVNIVKKTEVQTGGFSKESILPKRNSDKLIARKKDWDPKKYGGFDSPTVAYSVLVVAKVEKGKSKKLKSVKELLGITIMERSSFEKNPIDFLEAKGYKEVKKDLIIKLPKYSLFELENGRKRMLASAGELQKGNELALPSKYVNFLYLASHYEKLKGSPEDNEQKQLFVEQHKHYLDEIIEQISEFSKRVILADANLDKVLSAYNKHRDKPIREQAENIIHLFTLTNLGAPAAFKYFDTTIDRKRYTSTKEVLDATLIHQSITGLYETRIDLSQLGGDGGGSSGSSGSSGSSGSSGSSGGMDPLQLLQPLEAEIKGTKLKAHWNSGATITCVPEAFLEDERPIQTMLIKTIHGEKQQDVYYLTFKVQGRKVEAEVLASPYDYILLNPSDVPWLMKKPLQLTVLVPLHEYQERLLQQTALPKEQKELLQKLFLKYDALWQHWENQVGHRRIKPHNIATGTLAPRPQKQYPINPKAKPSIQIVIDDLLKQGVLIQQNSTMNTPVYPVPKPDGKWRMVLDYREVNKTIPLIAAQNQHSAGILSSIYRGKYKTTLDLTNGFWAHPITPESYWLTAFTWQGKQYCWTRLPQGFLNSPALFNADVVDLLKEIPNVQAYVDDIYISHDDPQEHLEQLEKIFSILLNAGYVVSLKKSEIAQREVEFLGFNITKEGRGLTDTFKQKLLNITPPKDLKQLQSILGLLNFARNFIPNYSELVKPLYTIVAPANGKFISWTEDNSNQLQHIISVLNQADNLEERNPETRLIIKVNSSPSAGYIRYYNEGSKRPIMYVNYIFSKAEAKFTQTEKLLTTMHKGLIKAMDLAMGQEILVYSPIVSMTKIQRTPLPERKALPVRWITWMTYLEDPRIQFHYDKSLPELQQIPNVTEDVIAKTKHPSEFAMVFYTDGSAIKHPDVNKSHSAGMGIAQVQFIPEYKIVHQWSIPLGDHTAQLAEIAAVEFACKKALKISGPVLIVTDSFYVAESANKELPYWKSNGFLNNKKKPLRHVSKWKSIAECLQLKPDIIIMHEKGHQQPMTTLHTEGNNLADKLATQGSYVVHAGKRTADGSEFEKRTADGSEFESPKKKAKVE

SEQ ID NO: 6356 - protein, 2094 aa, synthetic construct
MPAAKRVKLDGGDKKYSIGLDIGTNSVGWAVITDEYKVPSKKFKVLGNTDRHSIKKNLIGALLFDSGETAEATRLKRTARRRYTRRKNRICYLQEIFSNEMAKVDDSFFHRLEESFLVEEDKKHERHPIFGNIVDEVAYHEKYPTIYHLRKKLVDSTDKADLRLIYLALAHMIKFRGHFLIEGDLNPDNSDVDKLFIQLVQTYNQLFEENPINASGVDAKAILSARLSKSRRLENLIAQLPGEKKNGLFGNLIALSLGLTPNFKSNFDLAEDAKLQLSKDTYDDDLDNLLAQIGDQYADLFLAAKNLSDAILLSDILRVNTEITKAPLSASMIKRYDEHHQDLTLLKALVRQQLPEKYKEIFFDQSKNGYAGYIDGGASQEEFYKFIKPILEKMDGTEELLVKLNREDLLRKQRTFDNGSIPHQIHLGELHAILRRQEDFYPFLKDNREKIEKILTFRIPYYVGPLARGNSRFAWMTRKSEETITPWNFEEVVDKGASAQSFIERMTNFDKNLPNEKVLPKHSLLYEYFTVYNELTKVKYVTEGMRKPAFLSGEQKKAIVDLLFKTNRKVTVKQLKEDYFKKIECFDSVEISGVEDRFNASLGTYHDLLKIIKDKDFLDNEENEDILEDIVLTLTLFEDREMIEERLKTYAHLFDDKVMKQLKRRRYTGWGRLSRKLINGIRDKQSGKTILDFLKSDGFANRNFMQLIHDDSLTFKEDIQKAQVSGQGDSLHEHIANLAGSPAIKKGILQTVKVVDELVKVMGRHKPENIVIEMARENQTTQKGQKNSRERMKRIEEGIKELGSQILKEHPVENTQLQNEKLYLYYLQNGRDMYVDQELDINRLSDYDVDHIVPQSFLKDDSIDNKVLTRSDKARGKSDNVPSEEVVKKMKNYWRQLLNAKLITQRKFDNLTKAERGGLSELDKAGFIKRQLVETRQITKHVAQILDSRMNTKYDENDKLIREVKVITLKSKLVSDFRKDFQFYKVREINNYHHAHDAYLNAVVGTALIKKYPKLESEFVYGDYKVYDVRKMIAKSEQEIGKATAKYFFYSNIMNFFKTEITLANGEIRKRPLIETNGETGEIVWDKGRDFATVRKVLSMPQVNIVKKTEVQTGGFSKESILPKRNSDKLIARKKDWDPKKYGGFDSPTVAYSVLVVAKVEKGKSKKLKSVKELLGITIMERSSFEKNPIDFLEAKGYKEVKKDLIIKLPKYSLFELENGRKRMLASAGELQKGNELALPSKYVNFLYLASHYEKLKGSPEDNEQKQLFVEQHKHYLDEIIEQISEFSKRVILADANLDKVLSAYNKHRDKPIREQAENIIHLFTLTNLGAPAAFKYFDTTIDRKRYTSTKEVLDATLIHQSITGLYETRIDLSQLGGDGGGSSGSSGSSGSSGSSGSSGGIPWLMKKPLQLTTLVPLQEYEERLLKQTMLTGSYKEKLQSLFLKYDALWQHWENQVGHRRIKPHHIATGTVNPRPQKQYPINPKAKASIQTVINDLLKQGVLIQQNSIMNTPVYPVPKPDGKWRMVLDYREVNKTIPLIAAQNQHSAGILSSIFRGKYKTTLDLSNGFWAHSITPESYWLTAFTWLGQQYCWTRLPQGFLNSPALFNADVVDLLKEVPNVQVYVDDIYISHDDPREHLEQLEKVFSLLLNAGYVVSLKKSEIAQHEVEFLGFNITKEGRGLTETFKQKLLNITPPRDLKQLQSILGKLNFARNFIPNFSELVKPLYNIIATAPGKYITWTTDNSQQLQNIISMLNSAENLEERNPEVRLIMKVNTSPSAGYIRFYNEFAKRPIMYLNYVYTKAEVKFTNTEKLLTTIHKGLIKALDLGMGQEILVYSPIVSMTKIQKTPLPERKALPIRWITWMSYLEDPRIQFHYDKTLPELQQVPTVTDDIIAKIKHPSEFSMVFYTDGSAIKHPNVNKSHNAGMGIAQVQFKPEFTVINTWSIPLGDHTAQLAEVAAVEFACKKALKIDGPVLIVTDSFYVAESVNKELPYWQSNGFFNNKKKPLKHVSKWKSIADCIQLKPDIIIIHEKGHQPTASTFHTEGNNLADKLATQGSYVVNAGKRTADGSEFEKRTADGSEFESPKKKAKVE

SEQ ID NO: 6357 - protein, 2183 aa, synthetic construct
MPAAKRVKLDGGDKKYSIGLDIGTNSVGWAVITDEYKVPSKKFKVLGNTDRHSIKKNLIGALLFDSGETAEATRLKRTARRRYTRRKNRICYLQEIFSNEMAKVDDSFFHRLEESFLVEEDKKHERHPIFGNIVDEVAYHEKYPTIYHLRKKLVDSTDKADLRLIYLALAHMIKFRGHFLIEGDLNPDNSDVDKLFIQLVQTYNQLFEENPINASGVDAKAILSARLSKSRRLENLIAQLPGEKKNGLFGNLIALSLGLTPNFKSNFDLAEDAKLQLSKDTYDDDLDNLLAQIGDQYADLFLAAKNLSDAILLSDILRVNTEITKAPLSASMIKRYDEHHQDLTLLKALVRQQLPEKYKEIFFDQSKNGYAGYIDGGASQEEFYKFIKPILEKMDGTEELLVKLNREDLLRKQRTFDNGSIPHQIHLGELHAILRRQEDFYPFLKDNREKIEKILTFRIPYYVGPLARGNSRFAWMTRKSEETITPWNFEEVVDKGASAQSFIERMTNFDKNLPNEKVLPKHSLLYEYFTVYNELTKVKYVTEGMRKPAFLSGEQKKAIVDLLFKTNRKVTVKQLKEDYFKKIECFDSVEISGVEDRFNASLGTYHDLLKIIKDKDFLDNEENEDILEDIVLTLTLFEDREMIEERLKTYAHLFDDKVMKQLKRRRYTGWGRLSRKLINGIRDKQSGKTILDFLKSDGFANRNFMQLIHDDSLTFKEDIQKAQVSGQGDSLHEHIANLAGSPAIKKGILQTVKVVDELVKVMGRHKPENIVIEMARENQTTQKGQKNSRERMKRIEEGIKELGSQILKEHPVENTQLQNEKLYLYYLQNGRDMYVDQELDINRLSDYDVDHIVPQSFLKDDSIDNKVLTRSDKARGKSDNVPSEEVVKKMKNYWRQLLNAKLITQRKFDNLTKAERGGLSELDKAGFIKRQLVETRQITKHVAQILDSRMNTKYDENDKLIREVKVITLKSKLVSDFRKDFQFYKVREINNYHHAHDAYLNAVVGTALIKKYPKLESEFVYGDYKVYDVRKMIAKSEQEIGKATAKYFFYSNIMNFFKTEITLANGEIRKRPLIETNGETGEIVWDKGRDFATVRKVLSMPQVNIVKKTEVQTGGFSKESILPKRNSDKLIARKKDWDPKKYGGFDSPTVAYSVLVVAKVEKGKSKKLKSVKELLGITIMERSSFEKNPIDFLEAKGYKEVKKDLIIKLPKYSLFELENGRKRMLASAGELQKGNELALPSKYVNFLYLASHYEKLKGSPEDNEQKQLFVEQHKHYLDEIIEQISEFSKRVILADANLDKVLSAYNKHRDKPIREQAENIIHLFTLTNLGAPAAFKYFDTTIDRKRYTSTKEVLDATLIHQSITGLYETRIDLSQLGGDGGGSSGSSGSSGSSGSSGSSGGMDPLQLLQPLEAEIKGTKLKAHWNSGATITCVPQAFLEEEVPIKNIWIKTIHGEKEQPVYYLTFKIQGRKVEAEVISSPYDYILVSPSDIPWLMKKPLQLTTLVPLQEYEERLLKQTMLTGSYKEKLQSLFLKYDALWQHWENQVGHRRIKPHHIATGTVNPRPQKQYPINPKAKASIQTVINDLLKQGVLIQQNSIMNTPVYPVPKPDGKWRMVLDYREVNKTIPLIAAQNQHSAGILSSIFRGKYKTTLDLSNGFWAHSITPESYWLTAFTWLGQQYCWTRLPQGFLNSPALFNADVVDLLKEVPNVQVYVDDIYISHDDPREHLEQLEKVFSLLLNAGYVVSLKKSEIAQHEVEFLGFNITKEGRGLTETFKQKLLNITPPRDLKQLQSILGLLNFARNFIPNFSELVKPLYNIIATAPGKYITWTTDNSQQLQNIISMLNSAENLEERNPEVRLIMKVNTSPSAGYIRFYNEFAKRPIMYLNYVYTKAEVKFTNTEKLLTTIHKGLIKALDLGMGQEILVYSPIVSMTKIQKTPLPERKALPIRWITWMSYLEDPRIQFHYDKTLPELQQVPTVTDDIIAKIKHPSEFSMVFYTDGSAIKHPNVNKSHNAGMGIAQVQFKPEFTVINTWSIPLGDHTAQLAEVAAVEFACKKALKIDGPVLIVTDSFYVAESVNKELPYWQSNGFFNNKKKPLKHVSKWKSIADCIQLKPDIIIIHEKGHQPTASTFHTEGNNLADKLATQGSYVVNAGKRTADGSEFEKRTADGSEFESPKKKAKVE

SEQ ID NO: 6358 - protein, 2101 aa, synthetic construct
MPAAKRVKLDGGDKKYSIGLDIGTNSVGWAVITDEYKVPSKKFKVLGNTDRHSIKKNLIGALLFDSGETAEATRLKRTARRRYTRRKNRICYLQEIFSNEMAKVDDSFFHRLEESFLVEEDKKHERHPIFGNIVDEVAYHEKYPTIYHLRKKLVDSTDKADLRLIYLALAHMIKFRGHFLIEGDLNPDNSDVDKLFIQLVQTYNQLFEENPINASGVDAKAILSARLSKSRRLENLIAQLPGEKKNGLFGNLIALSLGLTPNFKSNFDLAEDAKLQLSKDTYDDDLDNLLAQIGDQYADLFLAAKNLSDAILLSDILRVNTEITKAPLSASMIKRYDEHHQDLTLLKALVRQQLPEKYKEIFFDQSKNGYAGYIDGGASQEEFYKFIKPILEKMDGTEELLVKLNREDLLRKQRTFDNGSIPHQIHLGELHAILRRQEDFYPFLKDNREKIEKILTFRIPYYVGPLARGNSRFAWMTRKSEETITPWNFEEVVDKGASAQSFIERMTNFDKNLPNEKVLPKHSLLYEYFTVYNELTKVKYVTEGMRKPAFLSGEQKKAIVDLLFKTNRKVTVKQLKEDYFKKIECFDSVEISGVEDRFNASLGTYHDLLKIIKDKDFLDNEENEDILEDIVLTLTLFEDREMIEERLKTYAHLFDDKVMKQLKRRRYTGWGRLSRKLINGIRDKQSGKTILDFLKSDGFANRNFMQLIHDDSLTFKEDIQKAQVSGQGDSLHEHIANLAGSPAIKKGILQTVKVVDELVKVMGRHKPENIVIEMARENQTTQKGQKNSRERMKRIEEGIKELGSQILKEHPVENTQLQNEKLYLYYLQNGRDMYVDQELDINRLSDYDVDHIVPQSFLKDDSIDNKVLTRSDKARGKSDNVPSEEVVKKMKNYWRQLLNAKLITQRKFDNLTKAERGGLSELDKAGFIKRQLVETRQITKHVAQILDSRMNTKYDENDKLIREVKVITLKSKLVSDFRKDFQFYKVREINNYHHAHDAYLNAVVGTALIKKYPKLESEFVYGDYKVYDVRKMIAKSEQEIGKATAKYFFYSNIMNFFKTEITLANGEIRKRPLIETNGETGEIVWDKGRDFATVRKVLSMPQVNIVKKTEVQTGGFSKESILPKRNSDKLIARKKDWDPKKYGGFDSPTVAYSVLVVAKVEKGKSKKLKSVKELLGITIMERSSFEKNPIDFLEAKGYKEVKKDLIIKLPKYSLFELENGRKRMLASAGELQKGNELALPSKYVNFLYLASHYEKLKGSPEDNEQKQLFVEQHKHYLDEIIEQISEFSKRVILADANLDKVLSAYNKHRDKPIREQAENIIHLFTLTNLGAPAAFKYFDTTIDRKRYTSTKEVLDATLIHQSITGLYETRIDLSQLGGDGGGSSGSSGSSGSSGSSGSSGGVLNLEEEYRLHEKPVPSSIDPSWLQLFPTVWAERAGMGLANQVPPVVVELRSGASPVAVRQYPMSKEAREGIRPHIQRFLDLGVLVPCQSPWNTPLLPVKKPGTNDYRPVQDLREINKRVQDIHPTVPNPYNLLSSLPPSHTWYSVLDLKDAFFCLKLHPNSQPLFAFEWRDPEKGNTGQLTWTRLPQGFKNSPTLFDEALHRDLAPFRALNPQVVLLQYVDDLLVAAPTYRDCKEGTQKLLQELSKLGYRVSAKKAQLCQKEVTYLGYLLKEGKRWLTPARKATVMKIPPPTTPRQVREFLGTAGFCRLWIPGFASLAAPLYPLTKESIPFIWTEEHQKAFDRIKEALLSAPALALPDLTKPFTLYVDERAGVARGVLTQTLGPWRRPVAYLSKKLDPVASGWPTCLKAVAAVALLLKDADKLTLGQNVTVIASHSLESIVRQPPDRWMTNARMTHYQSLLLNERVSFAPPAVLNPATLLPVESEATPVHRCSEILAEETGTRRDLKDQPLPGVPAWYTDGSSFIAEGKRRAGAAIVDGKRTVWASSLPEGTSAQKAELVALTQALRLAEGKDINIYTDSRYAFATAHIHGAIYKQRGLLTSAGKDIKNKEEILALLEAIHLPKRVAIIHCPGHQKGNDPVATGNRRADEAAKQAALSTRVLAETTKPAGKRTADGSEFEKRTADGSEFESPKKKAKVE

SEQ ID NO: 6359 - protein, 2103 aa, synthetic construct
MPAAKRVKLDGGDKKYSIGLDIGTNSVGWAVITDEYKVPSKKFKVLGNTDRHSIKKNLIGALLFDSGETAEATRLKRTARRRYTRRKNRICYLQEIFSNEMAKVDDSFFHRLEESFLVEEDKKHERHPIFGNIVDEVAYHEKYPTIYHLRKKLVDSTDKADLRLIYLALAHMIKFRGHFLIEGDLNPDNSDVDKLFIQLVQTYNQLFEENPINASGVDAKAILSARLSKSRRLENLIAQLPGEKKNGLFGNLIALSLGLTPNFKSNFDLAEDAKLQLSKDTYDDDLDNLLAQIGDQYADLFLAAKNLSDAILLSDILRVNTEITKAPLSASMIKRYDEHHQDLTLLKALVRQQLPEKYKEIFFDQSKNGYAGYIDGGASQEEFYKFIKPILEKMDGTEELLVKLNREDLLRKQRTFDNGSIPHQIHLGELHAILRRQEDFYPFLKDNREKIEKILTFRIPYYVGPLARGNSRFAWMTRKSEETITPWNFEEVVDKGASAQSFIERMTNFDKNLPNEKVLPKHSLLYEYFTVYNELTKVKYVTEGMRKPAFLSGEQKKAIVDLLFKTNRKVTVKQLKEDYFKKIECFDSVEISGVEDRFNASLGTYHDLLKIIKDKDFLDNEENEDILEDIVLTLTLFEDREMIEERLKTYAHLFDDKVMKQLKRRRYTGWGRLSRKLINGIRDKQSGKTILDFLKSDGFANRNFMQLIHDDSLTFKEDIQKAQVSGQGDSLHEHIANLAGSPAIKKGILQTVKVVDELVKVMGRHKPENIVIEMARENQTTQKGQKNSRERMKRIEEGIKELGSQILKEHPVENTQLQNEKLYLYYLQNGRDMYVDQELDINRLSDYDVDHIVPQSFLKDDSIDNKVLTRSDKARGKSDNVPSEEVVKKMKNYWRQLLNAKLITQRKFDNLTKAERGGLSELDKAGFIKRQLVETRQITKHVAQILDSRMNTKYDENDKLIREVKVITLKSKLVSDFRKDFQFYKVREINNYHHAHDAYLNAVVGTALIKKYPKLESEFVYGDYKVYDVRKMIAKSEQEIGKATAKYFFYSNIMNFFKTEITLANGEIRKRPLIETNGETGEIVWDKGRDFATVRKVLSMPQVNIVKKTEVQTGGFSKESILPKRNSDKLIARKKDWDPKKYGGFDSPTVAYSVLVVAKVEKGKSKKLKSVKELLGITIMERSSFEKNPIDFLEAKGYKEVKKDLIIKLPKYSLFELENGRKRMLASAGELQKGNELALPSKYVNFLYLASHYEKLKGSPEDNEQKQLFVEQHKHYLDEIIEQISEFSKRVILADANLDKVLSAYNKHRDKPIREQAENIIHLFTLTNLGAPAAFKYFDTTIDRKRYTSTKEVLDATLIHQSITGLYETRIDLSQLGGDGGGSSGSSGSSGSSGSSGSSGGTLNIEDEYRLHETSKEPDVPLGSTWLSDFPQAWAETGGMGLAVRQAPLIIPLKATSTPVSIKQYPMSQEARLGIKPHIQRLLDQGILVPCQSPWNTPLLPVKKPGTNDYRPVQDLREVNKRVEDIHPTVPNPYNLLSGLPPSHQWYTVLDLKDAFFCLRLHPTSQPLFAFEWRDPEMGISGQLTWTRLPQGFKNSPTLFNEALHRDLADFRIQHPDLILLQYVDDLLLAATSEQDCQRGTRALLQTLGNLGYRASAKKAQICQKQVKYLGYLLKEGQRWLTEARKETVMGQPTPKTPRQLREFLGTAGFCRLWIPGFAEMAAPLYPLTKPGTLFNWGPDQQKAYQEIKQALLTAPALGLPDLTKPFELFVDEKQGYAKGVLTQKLGPWRRPVAYLSKKLDPVAAGWPPCLRMVAAIAVLTKDAGKLTMGQPLVILAPHAVEALVKQPPDRWLSNARMTHYQAMLLDTDRVQFGPVVALNPATLLPLPEKEAPHDCLEILAETHGTRPDLTDQPIPDADYTWYTDGSSFLQEGQRRAGAAVTTETEVIWARALPAGTSAQRAELIALTQALKMAEGKKLNVYTDSRYAFATAHVHGEIYRRRGWLTSEGREIKNKNEILALLKALFLPKRLSIIHCPGHQKGNSAEARGNRMADQAAREAAMKAVLETSTLLAGKRTADGSEFEKRTADGSEFESPKKKAKVE

SEQ ID NO: 6360 - protein, 2096 aa, synthetic construct
MPAAKRVKLDGGDKKYSIGLDIGTNSVGWAVITDEYKVPSKKFKVLGNTDRHSIKKNLIGALLFDSGETAEATRLKRTARRRYTRRKNRICYLQEIFSNEMAKVDDSFFHRLEESFLVEEDKKHERHPIFGNIVDEVAYHEKYPTIYHLRKKLVDSTDKADLRLIYLALAHMIKFRGHFLIEGDLNPDNSDVDKLFIQLVQTYNQLFEENPINASGVDAKAILSARLSKSRRLENLIAQLPGEKKNGLFGNLIALSLGLTPNFKSNFDLAEDAKLQLSKDTYDDDLDNLLAQIGDQYADLFLAAKNLSDAILLSDILRVNTEITKAPLSASMIKRYDEHHQDLTLLKALVRQQLPEKYKEIFFDQSKNGYAGYIDGGASQEEFYKFIKPILEKMDGTEELLVKLNREDLLRKQRTFDNGSIPHQIHLGELHAILRRQEDFYPFLKDNREKIEKILTFRIPYYVGPLARGNSRFAWMTRKSEETITPWNFEEVVDKGASAQSFIERMTNFDKNLPNEKVLPKHSLLYEYFTVYNELTKVKYVTEGMRKPAFLSGEQKKAIVDLLFKTNRKVTVKQLKEDYFKKIECFDSVEISGVEDRFNASLGTYHDLLKIIKDKDFLDNEENEDILEDIVLTLTLFEDREMIEERLKTYAHLFDDKVMKQLKRRRYTGWGRLSRKLINGIRDKQSGKTILDFLKSDGFANRNFMQLIHDDSLTFKEDIQKAQVSGQGDSLHEHIANLAGSPAIKKGILQTVKVVDELVKVMGRHKPENIVIEMARENQTTQKGQKNSRERMKRIEEGIKELGSQILKEHPVENTQLQNEKLYLYYLQNGRDMYVDQELDINRLSDYDVDHIVPQSFLKDDSIDNKVLTRSDKARGKSDNVPSEEVVKKMKNYWRQLLNAKLITQRKFDNLTKAERGGLSELDKAGFIKRQLVETRQITKHVAQILDSRMNTKYDENDKLIREVKVITLKSKLVSDFRKDFQFYKVREINNYHHAHDAYLNAVVGTALIKKYPKLESEFVYGDYKVYDVRKMIAKSEQEIGKATAKYFFYSNIMNFFKTEITLANGEIRKRPLIETNGETGEIVWDKGRDFATVRKVLSMPQVNIVKKTEVQTGGFSKESILPKRNSDKLIARKKDWDPKKYGGFDSPTVAYSVLVVAKVEKGKSKKLKSVKELLGITIMERSSFEKNPIDFLEAKGYKEVKKDLIIKLPKYSLFELENGRKRMLASAGELQKGNELALPSKYVNFLYLASHYEKLKGSPEDNEQKQLFVEQHKHYLDEIIEQISEFSKRVILADANLDKVLSAYNKHRDKPIREQAENIIHLFTLTNLGAPAAFKYFDTTIDRKRYTSTKEVLDATLIHQSITGLYETRIDLSQLGGDGGEAAAKGGTVSLQDEHRLFDIPVTTSLPDVWLQDFPQAWAETGGLGRAKCQAPIIIDLKPTAVPVSIKQYPMSLEAHMGIRQHIIKFLELGVLRPCRSPWNTPLLPVKKPGTQDYRPVQDLREINKRTVDIHPTVPNPYNLLSTLKPDYSWYTVLDLKDAFFCLPLAPQSQELFAFEWKDPERGISGQLTWTRLPQGFKNSPTLFNEALHRDLTDFRTQHPEVTLLQYVDDLLLAAPTKKACTQGTRHLLQELGEKGYRASAKKAQICQTKVTYLGYILSEGKRWLTPGRIETVARIPPPRNPREVREFLGTAGFCRLWIPGFAELAAPLYALTKPSTPFTWQTEHQLAFEALKKALLSAPALGLPDTSKPFTLFLDERQGIAKGVLTQKLGPWKRPVAYLSKKLDPVAAGWPPCLRIMAATAMLVKDSAKLTLGQPLTVITPHTLEAIVRQPPDRWITNARLTHYQALLLDTDRVQFGPPVTLNPATLLPVPENQPSPHDCRQVLAETHGTREDLKDQELPDADHTWYTDGSSYLDSGTRRAGAAVVDGHNTIWAQSLPPGTSAQKAELIALTKALELSKGKKANIYTDSRYAFATAHTHGSIYERRGWLTSEGKEIKNKAEIIALLKALFLPQEVAIIHCPGHQKGQDPVAVGNRQADRVARQAAMAEVLTLATEPDNTSHITAGKRTADGSEFEKRTADGSEFESPKKKAKVE

SEQ ID NO: 6361 - protein, 2167 aa, synthetic construct
MPAAKRVKLDGGDKKYSIGLDIGTNSVGWAVITDEYKVPSKKFKVLGNTDRHSIKKNLIGALLFDSGETAEATRLKRTARRRYTRRKNRICYLQEIFSNEMAKVDDSFFHRLEESFLVEEDKKHERHPIFGNIVDEVAYHEKYPTIYHLRKKLVDSTDKADLRLIYLALAHMIKFRGHFLIEGDLNPDNSDVDKLFIQLVQTYNQLFEENPINASGVDAKAILSARLSKSRRLENLIAQLPGEKKNGLFGNLIALSLGLTPNFKSNFDLAEDAKLQLSKDTYDDDLDNLLAQIGDQYADLFLAAKNLSDAILLSDILRVNTEITKAPLSASMIKRYDEHHQDLTLLKALVRQQLPEKYKEIFFDQSKNGYAGYIDGGASQEEFYKFIKPILEKMDGTEELLVKLNREDLLRKQRTFDNGSIPHQIHLGELHAILRRQEDFYPFLKDNREKIEKILTFRIPYYVGPLARGNSRFAWMTRKSEETITPWNFEEVVDKGASAQSFIERMTNFDKNLPNEKVLPKHSLLYEYFTVYNELTKVKYVTEGMRKPAFLSGEQKKAIVDLLFKTNRKVTVKQLKEDYFKKIECFDSVEISGVEDRFNASLGTYHDLLKIIKDKDFLDNEENEDILEDIVLTLTLFEDREMIEERLKTYAHLFDDKVMKQLKRRRYTGWGRLSRKLINGIRDKQSGKTILDFLKSDGFANRNFMQLIHDDSLTFKEDIQKAQVSGQGDSLHEHIANLAGSPAIKKGILQTVKVVDELVKVMGRHKPENIVIEMARENQTTQKGQKNSRERMKRIEEGIKELGSQILKEHPVENTQLQNEKLYLYYLQNGRDMYVDQELDINRLSDYDVDHIVPQSFLKDDSIDNKVLTRSDKARGKSDNVPSEEVVKKMKNYWRQLLNAKLITQRKFDNLTKAERGGLSELDKAGFIKRQLVETRQITKHVAQILDSRMNTKYDENDKLIREVKVITLKSKLVSDFRKDFQFYKVREINNYHHAHDAYLNAVVGTALIKKYPKLESEFVYGDYKVYDVRKMIAKSEQEIGKATAKYFFYSNIMNFFKTEITLANGEIRKRPLIETNGETGEIVWDKGRDFATVRKVLSMPQVNIVKKTEVQTGGFSKESILPKRNSDKLIARKKDWDPKKYGGFDSPTVAYSVLVVAKVEKGKSKKLKSVKELLGITIMERSSFEKNPIDFLEAKGYKEVKKDLIIKLPKYSLFELENGRKRMLASAGELQKGNELALPSKYVNFLYLASHYEKLKGSPEDNEQKQLFVEQHKHYLDEIIEQISEFSKRVILADANLDKVLSAYNKHRDKPIREQAENIIHLFTLTNLGAPAAFKYFDTTIDRKRYTSTKEVLDATLIHQSITGLYETRIDLSQLGGDGGEAAAKGGMDLLKPLTVERKGVKIKGYWNSQADITCVPKDLLQGEEPVRQQNVTTIHGTQEGDVYYVNLKIDGRRINTEVIGTTLDYAIITPGDVPWILKKPLELTIKLDLEEQQGTLLNNSILSKKGKEELKQLFEKYSALWQSWENQVGHRRIRPHKIATGTVKPTPQKQYHINPKAKPDIQIVINDLLKQGVLIQKESTMNTPVYPVPKPNGRWRMVLDYRAVNKVTPLIAVQNQHSYGILGSLFKGRYKTTIDLSNGFWAHPIVPEDYWITAFTWQGKQYCWTVLPQGFLNSPGLFNGDVVDLLQGIPNVEVYVDDVYISHDSEKEHLEYLDILFNRLKEAGYIISLKKSNIANSIVDFLGFQITNEGRGLTDTFKEKLENITAPTTLKQLQSILGLLNFARNFIPDFTELIAPLYALIPKSPKNYVPWQIEHSTTLETLITKLNGAEYLQGRKGDKTLIMKVNASYTTGYIRYYNEGEKKPISYVSIVFSKTELKFTELEKLLTTVHKGLLKALDLSMGQNIHVYSPIVSMQNIQKTPQTAKKALASRWLSWLSYLEDPRIRFFYDPQMPALKDLPAVDTGKDNKKHPSNFQHIFYTDGSAITSPTKEGHLNAGMGIVYFINKDGNLQKQQEWSISLGNHTAQFAEIAAFEFALKKCLPLGGNILVVTDSNYVAKAYNEELDVWASNGFVNNRKKPLKHISKWKSVADLKRLRPDVVVTHEPGHQKLDSSPHAYGNNLADQLATQASFKVHAGKRTADGSEFEKRTADGSEFESPKKKAKVE

SEQ ID NO: 6362 - protein, 2121 aa, synthetic construct
MPAAKRVKLDGGDKKYSIGLDIGTNSVGWAVITDEYKVPSKKFKVLGNTDRHSIKKNLIGALLFDSGETAEATRLKRTARRRYTRRKNRICYLQEIFSNEMAKVDDSFFHRLEESFLVEEDKKHERHPIFGNIVDEVAYHEKYPTIYHLRKKLVDSTDKADLRLIYLALAHMIKFRGHFLIEGDLNPDNSDVDKLFIQLVQTYNQLFEENPINASGVDAKAILSARLSKSRRLENLIAQLPGEKKNGLFGNLIALSLGLTPNFKSNFDLAEDAKLQLSKDTYDDDLDNLLAQIGDQYADLFLAAKNLSDAILLSDILRVNTEITKAPLSASMIKRYDEHHQDLTLLKALVRQQLPEKYKEIFFDQSKNGYAGYIDGGASQEEFYKFIKPILEKMDGTEELLVKLNREDLLRKQRTFDNGSIPHQIHLGELHAILRRQEDFYPFLKDNREKIEKILTFRIPYYVGPLARGNSRFAWMTRKSEETITPWNFEEVVDKGASAQSFIERMTNFDKNLPNEKVLPKHSLLYEYFTVYNELTKVKYVTEGMRKPAFLSGEQKKAIVDLLFKTNRKVTVKQLKEDYFKKIECFDSVEISGVEDRFNASLGTYHDLLKIIKDKDFLDNEENEDILEDIVLTLTLFEDREMIEERLKTYAHLFDDKVMKQLKRRRYTGWGRLSRKLINGIRDKQSGKTILDFLKSDGFANRNFMQLIHDDSLTFKEDIQKAQVSGQGDSLHEHIANLAGSPAIKKGILQTVKVVDELVKVMGRHKPENIVIEMARENQTTQKGQKNSRERMKRIEEGIKELGSQILKEHPVENTQLQNEKLYLYYLQNGRDMYVDQELDINRLSDYDVDHIVPQSFLKDDSIDNKVLTRSDKARGKSDNVPSEEVVKKMKNYWRQLLNAKLITQRKFDNLTKAERGGLSELDKAGFIKRQLVETRQITKHVAQILDSRMNTKYDENDKLIREVKVITLKSKLVSDFRKDFQFYKVREINNYHHAHDAYLNAVVGTALIKKYPKLESEFVYGDYKVYDVRKMIAKSEQEIGKATAKYFFYSNIMNFFKTEITLANGEIRKRPLIETNGETGEIVWDKGRDFATVRKVLSMPQVNIVKKTEVQTGGFSKESILPKRNSDKLIARKKDWDPKKYGGFDSPTVAYSVLVVAKVEKGKSKKLKSVKELLGITIMERSSFEKNPIDFLEAKGYKEVKKDLIIKLPKYSLFELENGRKRMLASAGELQKGNELALPSKYVNFLYLASHYEKLKGSPEDNEQKQLFVEQHKHYLDEIIEQISEFSKRVILADANLDKVLSAYNKHRDKPIREQAENIIHLFTLTNLGAPAAFKYFDTTIDRKRYTSTKEVLDATLIHQSITGLYETRIDLSQLGGDGGEAAAKGGLLGRDLLTKLKAQIQFSTEGPQVTWEDRPAMCLVLNLEEEYRLHEKPVPPSIDPSWLQLFPMVWAEKAGMGLANQVPPVVVELKSDASPVAVRQYPMSKEAREGIRPHIQRFLDLGILVPCQSPWNTPLLPVKKPGTNDYRPVQDLREVNKRVQDIHPTVPNPYNLLSSLPPSHTWYSVLDLKDAFFCLKLHPNSQPLFAFEWRDPEKGNTGQLTWTRLPQGFKNSPTLFNEALHRDLASFRALNPQVVMLQYVDDLLVAAPTYRDCKEGTRRLLQELSKLGYRVSAKKAQLCREEVTYLGYLLKGGKRWLTPARKATVMKIPTPTTPRQVREFLGTAGFCRLWIPGFASLAAPLYPLTRPKVPFTWTEAHQEAFGRIKEALLSAPALALPDLTKPFALYVDEKEGVARGVLTQTLGPWRRPVAYLSKKLDPVASGWPTCLKAIAAVALLLKDADKLTLGQNVLVIAPHNLESIVRQPPDRWMTNARMTHYQSLLLNERVSFAPPAILNPATLLPVESDDTPIHICSEILAEETGTRPDLRDQPLPGVPAWYTDGSSFIMDGRRQAGAAIVDNKRTVWASNLPEGTSAQKAELIALTQALRLAEGKSINIYTDSRYAFATAHVHGAIYKQRGWLTSAGKDIKNKEEILALLEAIHLPKRVAIIHCPGHQRGTDPVATGNRKADEAAKQAAQSTRILTETTKNAGKRTADGSEFEKRTADGSEFESPKKKAKVE

SEQ ID NO: 6363 - protein, 2212 aa, synthetic construct
MPAAKRVKLDGGDKKYSIGLDIGTNSVGWAVITDEYKVPSKKFKVLGNTDRHSIKKNLIGALLFDSGETAEATRLKRTARRRYTRRKNRICYLQEIFSNEMAKVDDSFFHRLEESFLVEEDKKHERHPIFGNIVDEVAYHEKYPTIYHLRKKLVDSTDKADLRLIYLALAHMIKFRGHFLIEGDLNPDNSDVDKLFIQLVQTYNQLFEENPINASGVDAKAILSARLSKSRRLENLIAQLPGEKKNGLFGNLIALSLGLTPNFKSNFDLAEDAKLQLSKDTYDDDLDNLLAQIGDQYADLFLAAKNLSDAILLSDILRVNTEITKAPLSASMIKRYDEHHQDLTLLKALVRQQLPEKYKEIFFDQSKNGYAGYIDGGASQEEFYKFIKPILEKMDGTEELLVKLNREDLLRKQRTFDNGSIPHQIHLGELHAILRRQEDFYPFLKDNREKIEKILTFRIPYYVGPLARGNSRFAWMTRKSEETITPWNFEEVVDKGASAQSFIERMTNFDKNLPNEKVLPKHSLLYEYFTVYNELTKVKYVTEGMRKPAFLSGEQKKAIVDLLFKTNRKVTVKQLKEDYFKKIECFDSVEISGVEDRFNASLGTYHDLLKIIKDKDFLDNEENEDILEDIVLTLTLFEDREMIEERLKTYAHLFDDKVMKQLKRRRYTGWGRLSRKLINGIRDKQSGKTILDFLKSDGFANRNFMQLIHDDSLTFKEDIQKAQVSGQGDSLHEHIANLAGSPAIKKGILQTVKVVDELVKVMGRHKPENIVIEMARENQTTQKGQKNSRERMKRIEEGIKELGSQILKEHPVENTQLQNEKLYLYYLQNGRDMYVDQELDINRLSDYDVDHIVPQSFLKDDSIDNKVLTRSDKARGKSDNVPSEEVVKKMKNYWRQLLNAKLITQRKFDNLTKAERGGLSELDKAGFIKRQLVETRQITKHVAQILDSRMNTKYDENDKLIREVKVITLKSKLVSDFRKDFQFYKVREINNYHHAHDAYLNAVVGTALIKKYPKLESEFVYGDYKVYDVRKMIAKSEQEIGKATAKYFFYSNIMNFFKTEITLANGEIRKRPLIETNGETGEIVWDKGRDFATVRKVLSMPQVNIVKKTEVQTGGFSKESILPKRNSDKLIARKKDWDPKKYGGFDSPTVAYSVLVVAKVEKGKSKKLKSVKELLGITIMERSSFEKNPIDFLEAKGYKEVKKDLIIKLPKYSLFELENGRKRMLASAGELQKGNELALPSKYVNFLYLASHYEKLKGSPEDNEQKQLFVEQHKHYLDEIIEQISEFSKRVILADANLDKVLSAYNKHRDKPIREQAENIIHLFTLTNLGAPAAFKYFDTTIDRKRYTSTKEVLDATLIHQSITGLYETRIDLSQLGGDGGEAAAKGGTLGDQGSRGSDPLPEPRVTLTVEGIPTEFLVNTGAEHSVLTKPMGKMGSKRTVVAGATGSKVYPWTTKRLLKIGQKQVTHSFLVIPECPAPLLGRDLLTKLKAQIQFSTEGPQVTWEDRPAMCLVLNLEEEYRLHEKPVPPSIDPSWLQLFPMVWAEKAGMGLANQVPPVVVELKSDASPVAVRQYPMSKEAREGIRPHIQRFLDLGILVPCQSPWNTPLLPVKKPGTNDYRPVQDLREVNKRVQDIHPTVPNPYNLLSSLPPSHTWYSVLDLKDAFFCLKLHPNSQPLFAFEWRDPEKGNTGQLTWTRLPQGFKNSPTLFNEALHRDLASFRALNPQVVMLQYVDDLLVAAPTYRDCKEGTRRLLQELSKLGYRVSAKKAQLCREEVTYLGYLLKGGKRWLTPARKATVMKIPTPTTPRQVREFLGTAGFCRLWIPGFASLAAPLYPLTRPKVPFTWTEAHQEAFGRIKEALLSAPALALPDLTKPFALYVDEKEGVARGVLTQTLGPWRRPVAYLSKKLDPVASGWPTCLKAIAAVALLLKDADKLTLGQNVLVIAPHNLESIVRQPPDRWMTNARMTHYQSLLLNERVSFAPPAILNPATLLPVESDDTPIHICSEILAEETGTRPDLRDQPLPGVPAWYTDGSSFIMDGRRQAGAAIVDNKRTVWASNLPEGTSAQKAELIALTQALRLAEGKSINIYTDSRYAFATAHVHGAIYKQRGWLTSAGKDIKNKEEILALLEAIHLPKRVAIIHCPGHQRGTDPVATGNRKADEAAKQAAQSTRILTETTKNAGKRTADGSEFEKRTADGSEFESPKKKAKVE

SEQ ID NO: 6364 - protein, 2212 aa, synthetic construct
MPAAKRVKLDGGDKKYSIGLDIGTNSVGWAVITDEYKVPSKKFKVLGNTDRHSIKKNLIGALLFDSGETAEATRLKRTARRRYTRRKNRICYLQEIFSNEMAKVDDSFFHRLEESFLVEEDKKHERHPIFGNIVDEVAYHEKYPTIYHLRKKLVDSTDKADLRLIYLALAHMIKFRGHFLIEGDLNPDNSDVDKLFIQLVQTYNQLFEENPINASGVDAKAILSARLSKSRRLENLIAQLPGEKKNGLFGNLIALSLGLTPNFKSNFDLAEDAKLQLSKDTYDDDLDNLLAQIGDQYADLFLAAKNLSDAILLSDILRVNTEITKAPLSASMIKRYDEHHQDLTLLKALVRQQLPEKYKEIFFDQSKNGYAGYIDGGASQEEFYKFIKPILEKMDGTEELLVKLNREDLLRKQRTFDNGSIPHQIHLGELHAILRRQEDFYPFLKDNREKIEKILTFRIPYYVGPLARGNSRFAWMTRKSEETITPWNFEEVVDKGASAQSFIERMTNFDKNLPNEKVLPKHSLLYEYFTVYNELTKVKYVTEGMRKPAFLSGEQKKAIVDLLFKTNRKVTVKQLKEDYFKKIECFDSVEISGVEDRFNASLGTYHDLLKIIKDKDFLDNEENEDILEDIVLTLTLFEDREMIEERLKTYAHLFDDKVMKQLKRRRYTGWGRLSRKLINGIRDKQSGKTILDFLKSDGFANRNFMQLIHDDSLTFKEDIQKAQVSGQGDSLHEHIANLAGSPAIKKGILQTVKVVDELVKVMGRHKPENIVIEMARENQTTQKGQKNSRERMKRIEEGIKELGSQILKEHPVENTQLQNEKLYLYYLQNGRDMYVDQELDINRLSDYDVDHIVPQSFLKDDSIDNKVLTRSDKARGKSDNVPSEEVVKKMKNYWRQLLNAKLITQRKFDNLTKAERGGLSELDKAGFIKRQLVETRQITKHVAQILDSRMNTKYDENDKLIREVKVITLKSKLVSDFRKDFQFYKVREINNYHHAHDAYLNAVVGTALIKKYPKLESEFVYGDYKVYDVRKMIAKSEQEIGKATAKYFFYSNIMNFFKTEITLANGEIRKRPLIETNGETGEIVWDKGRDFATVRKVLSMPQVNIVKKTEVQTGGFSKESILPKRNSDKLIARKKDWDPKKYGGFDSPTVAYSVLVVAKVEKGKSKKLKSVKELLGITIMERSSFEKNPIDFLEAKGYKEVKKDLIIKLPKYSLFELENGRKRMLASAGELQKGNELALPSKYVNFLYLASHYEKLKGSPEDNEQKQLFVEQHKHYLDEIIEQISEFSKRVILADANLDKVLSAYNKHRDKPIREQAENIIHLFTLTNLGAPAAFKYFDTTIDRKRYTSTKEVLDATLIHQSITGLYETRIDLSQLGGDGGEAAAKGGTLGDQGSRGSDPLPEPRVTLTVEGIPTEFLVNTGAEHSVLTKPMGKMGSKRTVVAGATGSKVYPWTTKRLLKIGQKQVTHSFLVIPECPAPLLGRDLLTKLKAQIQFSTEGPQVTWEDRPAMCLVLNLEEEYRLHEKPVPPSIDPSWLQLFPMVWAEKAGMGLANQVPPVVVELKSDASPVAVRQYPMSKEAREGIRPHIQRFLDLGILVPCQSPWNTPLLPVKKPGTNDYRPVQDLREVNKRVQDIHPTVPNPYNLLSSLPPSHTWYSVLDLKDAFFCLKLHPNSQPLFAFEWRDPEKGNTGQLTWTRLPQGFKNSPTLFNEALHRDLASFRALNPQVVMLQYVDDLLVAAPTYRDCKEGTRRLLQELSKLGYRVSAKKAQLCREEVTYLGYLLKGGKRWLTPARKATVMKIPTPTTPRQVREFLGKAGFCRLFIPGFASLAAPLYPLTRPKVPFTWTEAHQEAFGRIKEALLSAPALALPDLTKPFALYVDEKEGVARGVLTQTLGPWRRPVAYLSKKLDPVASGWPTCLKAIAAVALLLKDADKLTLGQNVLVIAPHNLESIVRQPPDRWMTNARMTHYQSLLLNERVSFAPPAILNPATLLPVESDDTPIHICSEILAEETGTRPDLRDQPLPGVPAWYTDGSSFIMDGRRQAGAAIVDNKRTVWASNLPEGTSAQKAELIALTQALRLAEGKSINIYTDSRYAFATAHVHGAIYKQRGWLTSAGKDIKNKEEILALLEAIHLPKRVAIIHCPGHQRGTDPVATGNRKADEAAKQAAQSTRILTETTKNAGKRTADGSEFEKRTADGSEFESPKKKAKVE

SEQ ID NO: 6365 - protein, 2090 aa, synthetic construct
MPAAKRVKLDGGDKKYSIGLDIGTNSVGWAVITDEYKVPSKKFKVLGNTDRHSIKKNLIGALLFDSGETAEATRLKRTARRRYTRRKNRICYLQEIFSNEMAKVDDSFFHRLEESFLVEEDKKHERHPIFGNIVDEVAYHEKYPTIYHLRKKLVDSTDKADLRLIYLALAHMIKFRGHFLIEGDLNPDNSDVDKLFIQLVQTYNQLFEENPINASGVDAKAILSARLSKSRRLENLIAQLPGEKKNGLFGNLIALSLGLTPNFKSNFDLAEDAKLQLSKDTYDDDLDNLLAQIGDQYADLFLAAKNLSDAILLSDILRVNTEITKAPLSASMIKRYDEHHQDLTLLKALVRQQLPEKYKEIFFDQSKNGYAGYIDGGASQEEFYKFIKPILEKMDGTEELLVKLNREDLLRKQRTFDNGSIPHQIHLGELHAILRRQEDFYPFLKDNREKIEKILTFRIPYYVGPLARGNSRFAWMTRKSEETITPWNFEEVVDKGASAQSFIERMTNFDKNLPNEKVLPKHSLLYEYFTVYNELTKVKYVTEGMRKPAFLSGEQKKAIVDLLFKTNRKVTVKQLKEDYFKKIECFDSVEISGVEDRFNASLGTYHDLLKIIKDKDFLDNEENEDILEDIVLTLTLFEDREMIEERLKTYAHLFDDKVMKQLKRRRYTGWGRLSRKLINGIRDKQSGKTILDFLKSDGFANRNFMQLIHDDSLTFKEDIQKAQVSGQGDSLHEHIANLAGSPAIKKGILQTVKVVDELVKVMGRHKPENIVIEMARENQTTQKGQKNSRERMKRIEEGIKELGSQILKEHPVENTQLQNEKLYLYYLQNGRDMYVDQELDINRLSDYDVDHIVPQSFLKDDSIDNKVLTRSDKARGKSDNVPSEEVVKKMKNYWRQLLNAKLITQRKFDNLTKAERGGLSELDKAGFIKRQLVETRQITKHVAQILDSRMNTKYDENDKLIREVKVITLKSKLVSDFRKDFQFYKVREINNYHHAHDAYLNAVVGTALIKKYPKLESEFVYGDYKVYDVRKMIAKSEQEIGKATAKYFFYSNIMNFFKTEITLANGEIRKRPLIETNGETGEIVWDKGRDFATVRKVLSMPQVNIVKKTEVQTGGFSKESILPKRNSDKLIARKKDWDPKKYGGFDSPTVAYSVLVVAKVEKGKSKKLKSVKELLGITIMERSSFEKNPIDFLEAKGYKEVKKDLIIKLPKYSLFELENGRKRMLASAGELQKGNELALPSKYVNFLYLASHYEKLKGSPEDNEQKQLFVEQHKHYLDEIIEQISEFSKRVILADANLDKVLSAYNKHRDKPIREQAENIIHLFTLTNLGAPAAFKYFDTTIDRKRYTSTKEVLDATLIHQSITGLYETRIDLSQLGGDGGEAAAKGGTLNIEDEHRLHETSKEPDVSLGSTWLSDFPQAWAETGGMGLAVRQAPLIIPLKATSTPVSIKQYPMSQEARLGIKPHIQRLLDQGILVPCQSPWNTPLLPVKKPGTNDYRPVQDLREVNKRVEDIHPTVPNPYNLLSGLPPSHQWYTVLDLKDAFFCLRLHPTSQPLFAFEWRDPEMGISGQLTWTRLPQGFKNSPTLFDEALHRDLADFRIQHPDLILLQYVDDLLLAATSELDCQQGTRALLQTLGNLGYRASAKKAQICQKQVKYLGYLLKEGQRWLTEARKETVMGQPTPKTPRQLREFLGTAGFCRLWIPGFAEMAAPLYPLTKTGTLFNWGPDQQKAYQEIKQALLTAPALGLPDLTKPFELFVDEKQGYAKGVLTQKLGPWRRPVAYLSKKLDPVAAGWPPCLRMVAAIAVLTKDAGKLTMGQPLVILAPHAVEALVKQPPDRWLSNARMTHYQALLLDTDRVQFGPVVALNPATLLPLPEEGLQHNCLDILAEAHGTRPDLTDQPLPDADHTWYTDGSSLLQEGQRKAGAAVTTETEVIWAKALPAGTSAQRAELIALTQALKMAEGKKLNVYTDSRYAFATAHIHGEIYRRRGLLTSEGKEIKNKDEILALLKALFLPKRLSIIHCPGHQKGHSAEARGNRMADQAARKAAITETPDTSTLLAGKRTADGSEFEKRTADGSEFESPKKKAKVE

SEQ ID NO: 6366 - protein, 2082 aa, synthetic construct
MPAAKRVKLDGGDKKYSIGLDIGTNSVGWAVITDEYKVPSKKFKVLGNTDRHSIKKNLIGALLFDSGETAEATRLKRTARRRYTRRKNRICYLQEIFSNEMAKVDDSFFHRLEESFLVEEDKKHERHPIFGNIVDEVAYHEKYPTIYHLRKKLVDSTDKADLRLIYLALAHMIKFRGHFLIEGDLNPDNSDVDKLFIQLVQTYNQLFEENPINASGVDAKAILSARLSKSRRLENLIAQLPGEKKNGLFGNLIALSLGLTPNFKSNFDLAEDAKLQLSKDTYDDDLDNLLAQIGDQYADLFLAAKNLSDAILLSDILRVNTEITKAPLSASMIKRYDEHHQDLTLLKALVRQQLPEKYKEIFFDQSKNGYAGYIDGGASQEEFYKFIKPILEKMDGTEELLVKLNREDLLRKQRTFDNGSIPHQIHLGELHAILRRQEDFYPFLKDNREKIEKILTFRIPYYVGPLARGNSRFAWMTRKSEETITPWNFEEVVDKGASAQSFIERMTNFDKNLPNEKVLPKHSLLYEYFTVYNELTKVKYVTEGMRKPAFLSGEQKKAIVDLLFKTNRKVTVKQLKEDYFKKIECFDSVEISGVEDRFNASLGTYHDLLKIIKDKDFLDNEENEDILEDIVLTLTLFEDREMIEERLKTYAHLFDDKVMKQLKRRRYTGWGRLSRKLINGIRDKQSGKTILDFLKSDGFANRNFMQLIHDDSLTFKEDIQKAQVSGQGDSLHEHIANLAGSPAIKKGILQTVKVVDELVKVMGRHKPENIVIEMARENQTTQKGQKNSRERMKRIEEGIKELGSQILKEHPVENTQLQNEKLYLYYLQNGRDMYVDQELDINRLSDYDVDHIVPQSFLKDDSIDNKVLTRSDKARGKSDNVPSEEVVKKMKNYWRQLLNAKLITQRKFDNLTKAERGGLSELDKAGFIKRQLVETRQITKHVAQILDSRMNTKYDENDKLIREVKVITLKSKLVSDFRKDFQFYKVREINNYHHAHDAYLNAVVGTALIKKYPKLESEFVYGDYKVYDVRKMIAKSEQEIGKATAKYFFYSNIMNFFKTEITLANGEIRKRPLIETNGETGEIVWDKGRDFATVRKVLSMPQVNIVKKTEVQTGGFSKESILPKRNSDKLIARKKDWDPKKYGGFDSPTVAYSVLVVAKVEKGKSKKLKSVKELLGITIMERSSFEKNPIDFLEAKGYKEVKKDLIIKLPKYSLFELENGRKRMLASAGELQKGNELALPSKYVNFLYLASHYEKLKGSPEDNEQKQLFVEQHKHYLDEIIEQISEFSKRVILADANLDKVLSAYNKHRDKPIREQAENIIHLFTLTNLGAPAAFKYFDTTIDRKRYTSTKEVLDATLIHQSITGLYETRIDLSQLGGDGGEAAAKGGLDDEYRLYSPLVKPDQNIQFWLEQFPQAWAETAGMGLAKQVPPQVIQLKASATPVSVRQYPLSKEAQEGIRPHVQRLIQQGILVPVQSPWNTPLLPVRKPGTNDYRPVQDLREVNKRVQDIHPTVPNPYNLLCALPPQRSWYTVLDLKDAFFCLRLHPTSQPLFAFEWRDPGTGRTGQLTWTRLPQGFKNSPTIFNEALHRDLANFRIQHPQVTLLQYVDDLLLAGATKQDCLEGTKALLLELSDLGYRASAKKAQICRREVTYLGYSLRDGQRWLTEARKKTVVQIPAPTTAKQVREFLGKAGFCRLFIPGFATLAAPLYPLTKPKGEFSWAPEHQKAFDAIKKALLSAPALALPDVTKPFTLYVDERKGVARGVLTQTLGPWRRPVAYLSKKLDPVASGWPVCLKAIAAVAILVKDADKLTLGQNITVIAPHALENIVRQPPDRWMTNARMTHYQSLLLTERVTFAPPAALNPATLLPEETDEPVTHDCHQLLIEETGVRKDLTDIPLTGEVLTWFTDGSSYVVEGKRMAGAAVVDGTRTIWASSLPEGTSAQKAELMALTQALRLAEGKSINIYTDSRYAFATAHVHGAIYKQRGWLTSAGREIKNKEEILSLLEALHLPKRLAIIHCPGHQKAKDPISRGNQMADRVAKQAAQGVNLLPAGKRTADGSEFEKRTADGSEFESPKKKAKVE

SEQ ID NO: 6367 - protein, 2084 aa, synthetic construct
MPAAKRVKLDGGDKKYSIGLDIGTNSVGWAVITDEYKVPSKKFKVLGNTDRHSIKKNLIGALLFDSGETAEATRLKRTARRRYTRRKNRICYLQEIFSNEMAKVDDSFFHRLEESFLVEEDKKHERHPIFGNIVDEVAYHEKYPTIYHLRKKLVDSTDKADLRLIYLALAHMIKFRGHFLIEGDLNPDNSDVDKLFIQLVQTYNQLFEENPINASGVDAKAILSARLSKSRRLENLIAQLPGEKKNGLFGNLIALSLGLTPNFKSNFDLAEDAKLQLSKDTYDDDLDNLLAQIGDQYADLFLAAKNLSDAILLSDILRVNTEITKAPLSASMIKRYDEHHQDLTLLKALVRQQLPEKYKEIFFDQSKNGYAGYIDGGASQEEFYKFIKPILEKMDGTEELLVKLNREDLLRKQRTFDNGSIPHQIHLGELHAILRRQEDFYPFLKDNREKIEKILTFRIPYYVGPLARGNSRFAWMTRKSEETITPWNFEEVVDKGASAQSFIERMTNFDKNLPNEKVLPKHSLLYEYFTVYNELTKVKYVTEGMRKPAFLSGEQKKAIVDLLFKTNRKVTVKQLKEDYFKKIECFDSVEISGVEDRFNASLGTYHDLLKIIKDKDFLDNEENEDILEDIVLTLTLFEDREMIEERLKTYAHLFDDKVMKQLKRRRYTGWGRLSRKLINGIRDKQSGKTILDFLKSDGFANRNFMQLIHDDSLTFKEDIQKAQVSGQGDSLHEHIANLAGSPAIKKGILQTVKVVDELVKVMGRHKPENIVIEMARENQTTQKGQKNSRERMKRIEEGIKELGSQILKEHPVENTQLQNEKLYLYYLQNGRDMYVDQELDINRLSDYDVDHIVPQSFLKDDSIDNKVLTRSDKARGKSDNVPSEEVVKKMKNYWRQLLNAKLITQRKFDNLTKAERGGLSELDKAGFIKRQLVETRQITKHVAQILDSRMNTKYDENDKLIREVKVITLKSKLVSDFRKDFQFYKVREINNYHHAHDAYLNAVVGTALIKKYPKLESEFVYGDYKVYDVRKMIAKSEQEIGKATAKYFFYSNIMNFFKTEITLANGEIRKRPLIETNGETGEIVWDKGRDFATVRKVLSMPQVNIVKKTEVQTGGFSKESILPKRNSDKLIARKKDWDPKKYGGFDSPTVAYSVLVVAKVEKGKSKKLKSVKELLGITIMERSSFEKNPIDFLEAKGYKEVKKDLIIKLPKYSLFELENGRKRMLASAGELQKGNELALPSKYVNFLYLASHYEKLKGSPEDNEQKQLFVEQHKHYLDEIIEQISEFSKRVILADANLDKVLSAYNKHRDKPIREQAENIIHLFTLTNLGAPAAFKYFDTTIDRKRYTSTKEVLDATLIHQSITGLYETRIDLSQLGGDGGEAAAKGGTLQLDDEYRLYSPLVKPDQNIQFWLEQFPQAWAETAGMGLAKQVPPQVIQLKASATPVSVRQYPLSKEAQEGIRPHVQRLIQQGILVPVQSPWNTPLLPVRKPGTNDYRPVQDLREVNKRVQDIHPTVPNPYNLLCALPPQRSWYTVLDLKDAFFCLRLHPTSQPLFAFEWRDPGTGRTGQLTWTRLPQGFKNSPTIFDEALHRDLANFRIQHPQVTLLQYVDDLLLAGATKQDCLEGTKALLLELSDLGYRASAKKAQICRREVTYLGYSLRDGQRWLTEARKKTVVQIPAPTTAKQVREFLGTAGFCRLWIPGFATLAAPLYPLTKEKGEFSWAPEHQKAFDAIKKALLSAPALALPDVTKPFTLYVDERKGVARGVLTQTLGPWRRPVAYLSKKLDPVASGWPVCLKAIAAVAILVKDADKLTLGQNITVIAPHALENIVRQPPDRWMTNARMTHYQSLLLTERVTFAPPAALNPATLLPEETDEPVTHDCHQLLIEETGVRKDLTDIPLTGEVLTWFTDGSSYVVEGKRMAGAAVVDGTRTIWASSLPEGTSAQKAELMALTQALRLAEGKSINIYTDSRYAFATAHVHGAIYKQRGLLTSAGREIKNKEEILSLLEALHLPKRLAIIHCPGHQKAKDPISRGNQMADRVAKQAAQGVNLLAGKRTADGSEFEKRTADGSEFESPKKKAKVE

SEQ ID NO: 6368 - protein, 2082 aa, synthetic construct; identical to SEQ ID NO: 6366

SEQ ID NO: 6369 - protein, 2081 aa, synthetic construct
MPAAKRVKLDGGDKKYSIGLDIGTNSVGWAVITDEYKVPSKKFKVLGNTDRHSIKKNLIGALLFDSGETAEATRLKRTARRRYTRRKNRICYLQEIFSNEMAKVDDSFFHRLEESFLVEEDKKHERHPIFGNIVDEVAYHEKYPTIYHLRKKLVDSTDKADLRLIYLALAHMIKFRGHFLIEGDLNPDNSDVDKLFIQLVQTYNQLFEENPINASGVDAKAILSARLSKSRRLENLIAQLPGEKKNGLFGNLIALSLGLTPNFKSNFDLAEDAKLQLSKDTYDDDLDNLLAQIGDQYADLFLAAKNLSDAILLSDILRVNTEITKAPLSASMIKRYDEHHQDLTLLKALVRQQLPEKYKEIFFDQSKNGYAGYIDGGASQEEFYKFIKPILEKMDGTEELLVKLNREDLLRKQRTFDNGSIPHQIHLGELHAILRRQEDFYPFLKDNREKIEKILTFRIPYYVGPLARGNSRFAWMTRKSEETITPWNFEEVVDKGASAQSFIERMTNFDKNLPNEKVLPKHSLLYEYFTVYNELTKVKYVTEGMRKPAFLSGEQKKAIVDLLFKTNRKVTVKQLKEDYFKKIECFDSVEISGVEDRFNASLGTYHDLLKIIKDKDFLDNEENEDILEDIVLTLTLFEDREMIEERLKTYAHLFDDKVMKQLKRRRYTGWGRLSRKLINGIRDKQSGKTILDFLKSDGFANRNFMQLIHDDSLTFKEDIQKAQVSGQGDSLHEHIANLAGSPAIKKGILQTVKVVDELVKVMGRHKPENIVIEMARENQTTQKGQKNSRERMKRIEEGIKELGSQILKEHPVENTQLQNEKLYLYYLQNGRDMYVDQELDINRLSDYDVDHIVPQSFLKDDSIDNKVLTRSDKARGKSDNVPSEEVVKKMKNYWRQLLNAKLITQRKFDNLTKAERGGLSELDKAGFIKRQLVETRQITKHVAQILDSRMNTKYDENDKLIREVKVITLKSKLVSDFRKDFQFYKVREINNYHHAHDAYLNAVVGTALIKKYPKLESEFVYGDYKVYDVRKMIAKSEQEIGKATAKYFFYSNIMNFFKTEITLANGEIRKRPLIETNGETGEIVWDKGRDFATVRKVLSMPQVNIVKKTEVQTGGFSKESILPKRNSDKLIARKKDWDPKKYGGFDSPTVAYSVLVVAKVEKGKSKKLKSVKELLGITIMERSSFEKNPIDFLEAKGYKEVKKDLIIKLPKYSLFELENGRKRMLASAGELQKGNELALPSKYVNFLYLASHYEKLKGSPEDNEQKQLFVEQHKHYLDEIIEQISEFSKRVILADANLDKVLSAYNKHRDKPIREQAENIIHLFTLTNLGAPAAFKYFDTTIDRKRYTSTKEVLDATLIHQSITGLYETRIDLSQLGGDGGEAAAKGGIPWLMKKPLQLTTLVPLQEYEERLLKQTMLTGSYKEKLQSLFLKYDALWQHWENQVGHRRIKPHHIATGTVNPRPQKQYPINPKAKASIQTVINDLLKQGVLIQQNSIMNTPVYPVPKPDGKWRMVLDYREVNKTIPLIAAQNQHSAGILSSIFRGKYKTTLDLSNGFWAHSITPESYWLTAFTWLGQQYCWTRLPQGFLNSPALFNADVVDLLKEVPNVQVYVDDIYISHDDPREHLEQLEKVFSLLLNAGYVVSLKKSEIAQHEVEFLGFNITKEGRGLTETFKQKLLNITPPRDLKQLQSILGLLNFARNFIPNFSELVKPLYNIIATAPGKYITWTTDNSQQLQNIISMLNSAENLEERNPEVRLIMKVNTSPSAGYIRFYNEFAKRPIMYLNYVYTKAEVKFTNTEKLLTTIHKGLIKALDLGMGQEILVYSPIVSMTKIQKTPLPERKALPIRWITWMSYLEDPRIQFHYDKTLPELQQVPTVTDDIIAKIKHPSEFSMVFYTDGSAIKHPNVNKSHNAGMGIAQVQFKPEFTVINTWSIPLGDHTAQLAEVAAVEFACKKALKIDGPVLIVTDSFYVAESVNKELPYWQSNGFFNNKKKPLKHVSKWKSIADCIQLKPDIIIIHEKGHQPTASTFHTEGNNLADKLATQGSYVVNAGKRTADGSEFEKRTADGSEFESPKKKAKVE

SEQ ID NO: 6370 - protein, 2097 aa, synthetic construct
MPAAKRVKLDGGDKKYSIGLDIGTNSVGWAVITDEYKVPSKKFKVLGNTDRHSIKKNLIGALLFDSGETAEATRLKRTARRRYTRRKNRICYLQEIFSNEMAKVDDSFFHRLEESFLVEEDKKHERHPIFGNIVDEVAYHEKYPTIYHLRKKLVDSTDKADLRLIYLALAHMIKFRGHFLIEGDLNPDNSDVDKLFIQLVQTYNQLFEENPINASGVDAKAILSARLSKSRRLENLIAQLPGEKKNGLFGNLIALSLGLTPNFKSNFDLAEDAKLQLSKDTYDDDLDNLLAQIGDQYADLFLAAKNLSDAILLSDILRVNTEITKAPLSASMIKRYDEHHQDLTLLKALVRQQLPEKYKEIFFDQSKNGYAGYIDGGASQEEFYKFIKPILEKMDGTEELLVKLNREDLLRKQRTFDNGSIPHQIHLGELHAILRRQEDFYPFLKDNREKIEKILTFRIPYYVGPLARGNSRFAWMTRKSEETITPWNFEEVVDKGASAQSFIERMTNFDKNLPNEKVLPKHSLLYEYFTVYNELTKVKYVTEGMRKPAFLSGEQKKAIVDLLFKTNRKVTVKQLKEDYFKKIECFDSVEISGVEDRFNASLGTYHDLLKIIKDKDFLDNEENEDILEDIVLTLTLFEDREMIEERLKTYAHLFDDKVMKQLKRRRYTGWGRLSRKLINGIRDKQSGKTILDFLKSDGFANRNFMQLIHDDSLTFKEDIQKAQVSGQGDSLHEHIANLAGSPAIKKGILQTVKVVDELVKVMGRHKPENIVIEMARENQTTQKGQKNSRERMKRIEEGIKELGSQILKEHPVENTQLQNEKLYLYYLQNGRDMYVDQELDINRLSDYDVDHIVPQSFLKDDSIDNKVLTRSDKARGKSDNVPSEEVVKKMKNYWRQLLNAKLITQRKFDNLTKAERGGLSELDKAGFIKRQLVETRQITKHVAQILDSRMNTKYDENDKLIREVKVITLKSKLVSDFRKDFQFYKVREINNYHHAHDAYLNAVVGTALIKKYPKLESEFVYGDYKVYDVRKMIAKSEQEIGKATAKYFFYSNIMNFFKTEITLANGEIRKRPLIETNGETGEIVWDKGRDFATVRKVLSMPQVNIVKKTEVQTGGFSKESILPKRNSDKLIARKKDWDPKKYGGFDSPTVAYSVLVVAKVEKGKSKKLKSVKELLGITIMERSSFEKNPIDFLEAKGYKEVKKDLIIKLPKYSLFELENGRKRMLASAGELQKGNELALPSKYVNFLYLASHYEKLKGSPEDNEQKQLFVEQHKHYLDEIIEQISEFSKRVILADANLDKVLSAYNKHRDKPIREQAENIIHLFTLTNLGAPAAFKYFDTTIDRKRYTSTKEVLDATLIHQSITGLYETRIDLSQLGGDGGEAAAKEAAAKGGTAPLEEEYRLFLEAPIQNVTLLEQWKREIPKVWAEINPPGLASTQAPIHVQLLSTALPVRVRQYPITLEAKRSLRETIRKFRAAGILRPVHSPWNTPLLPVRKSGTSEYRMVQDLREVNKRVETIHPTVPNPYTLLSLLPPDRIWYSVLDLKDAFFCIPLAPESQLIFAFEWADAEEGESGQLTWTRLPQGFKNSPTLFNEALNRDLQGFRLDHPSVSLLQYVDDLLIAADTQAACLSATRDLLMTLAELGYRVSGKKAQLCQEEVTYLGFKIHKGSRSLSNSRTQAILQIPVPKTKRQVREFLGKIGYCRLFIPGFAELAQPLYAATRPGNDPLVWGEKEEEAFQSLKLALTQPPALALPSLDKPFQLFVEETSGAAKGVLTQALGPWKRPVAYLSKRLDPVAAGWPRCLRAIAAAALLTREASKLTFGQDIEITSSHNLESLLRSPPDKWLTNARITQYQVLLLDPPRVRFKQTAALNPATLLPETDDTLPIHHCLDTLDSLTSTRPDLTDQPLAQAEATLFTDGSSYIRDGKRYAGAAVVTLDSVIWAEPLPIGTSAQKAELIALTKALEWSKDKSVNIYTDSRYAFATLHVHGMIYRERGWLTAGGKAIKNAPEILALLTAVWLPKRVAVMHCKGHQKDDAPTSTGNRRADEVAREVAIRPLSTQATISAGKRTADGSEFEKRTADGSEFESPKKKAKVE

SEQ ID NO: 6371 - protein, 2172 aa, synthetic construct
MPAAKRVKLDGGDKKYSIGLDIGTNSVGWAVITDEYKVPSKKFKVLGNTDRHSIKKNLIGALLFDSGETAEATRLKRTARRRYTRRKNRICYLQEIFSNEMAKVDDSFFHRLEESFLVEEDKKHERHPIFGNIVDEVAYHEKYPTIYHLRKKLVDSTDKADLRLIYLALAHMIKFRGHFLIEGDLNPDNSDVDKLFIQLVQTYNQLFEENPINASGVDAKAILSARLSKSRRLENLIAQLPGEKKNGLFGNLIALSLGLTPNFKSNFDLAEDAKLQLSKDTYDDDLDNLLAQIGDQYADLFLAAKNLSDAILLSDILRVNTEITKAPLSASMIKRYDEHHQDLTLLKALVRQQLPEKYKEIFFDQSKNGYAGYIDGGASQEEFYKFIKPILEKMDGTEELLVKLNREDLLRKQRTFDNGSIPHQIHLGELHAILRRQEDFYPFLKDNREKIEKILTFRIPYYVGPLARGNSRFAWMTRKSEETITPWNFEEVVDKGASAQSFIERMTNFDKNLPNEKVLPKHSLLYEYFTVYNELTKVKYVTEGMRKPAFLSGEQKKAIVDLLFKTNRKVTVKQLKEDYFKKIECFDSVEISGVEDRFNASLGTYHDLLKIIKDKDFLDNEENEDILEDIVLTLTLFEDREMIEERLKTYAHLFDDKVMKQLKRRRYTGWGRLSRKLINGIRDKQSGKTILDFLKSDGFANRNFMQLIHDDSLTFKEDIQKAQVSGQGDSLHEHIANLAGSPAIKKGILQTVKVVDELVKVMGRHKPENIVIEMARENQTTQKGQKNSRERMKRIEEGIKELGSQILKEHPVENTQLQNEKLYLYYLQNGRDMYVDQELDINRLSDYDVDHIVPQSFLKDDSIDNKVLTRSDKARGKSDNVPSEEVVKKMKNYWRQLLNAKLITQRKFDNLTKAERGGLSELDKAGFIKRQLVETRQITKHVAQILDSRMNTKYDENDKLIREVKVITLKSKLVSDFRKDFQFYKVREINNYHHAHDAYLNAVVGTALIKKYPKLESEFVYGDYKVYDVRKMIAKSEQEIGKATAKYFFYSNIMNFFKTEITLANGEIRKRPLIETNGETGEIVWDKGRDFATVRKVLSMPQVNIVKKTEVQTGGFSKESILPKRNSDKLIARKKDWDPKKYGGFDSPTVAYSVLVVAKVEKGKSKKLKSVKELLGITIMERSSFEKNPIDFLEAKGYKEVKKDLIIKLPKYSLFELENGRKRMLASAGELQKGNELALPSKYVNFLYLASHYEKLKGSPEDNEQKQLFVEQHKHYLDEIIEQISEFSKRVILADANLDKVLSAYNKHRDKPIREQAENIIHLFTLTNLGAPAAFKYFDTTIDRKRYTSTKEVLDATLIHQSITGLYETRIDLSQLGGDGGEAAAKEAAAKGGMDLLKPLTVERKGVKIKGYWNSQADITCVPKDLLQGEEPVRQQNVTTIHGTQEGDVYYVNLKIDGRRINTEVIGTTLDYAIITPGDVPWILKKPLELTIKLDLEEQQGTLLNNSILSKKGKEELKQLFEKYSALWQSWENQVGHRRIRPHKIATGTVKPTPQKQYHINPKAKPDIQIVINDLLKQGVLIQKESTMNTPVYPVPKPNGRWRMVLDYRAVNKVTPLIAVQNQHSYGILGSLFKGRYKTTIDLSNGFWAHPIVPEDYWITAFTWQGKQYCWTVLPQGFLNSPGLFTGDVVDLLQGIPNVEVYVDDVYISHDSEKEHLEYLDILFNRLKEAGYIISLKKSNIANSIVDFLGFQITNEGRGLTDTFKEKLENITAPTTLKQLQSILGLLNFARNFIPDFTELIAPLYALIPKSTKNYVPWQIEHSTTLETLITKLNGAEYLQGRKGDKTLIMKVNASYTTGYIRYYNEGEKKPISYVSIVFSKTELKFTELEKLLTTVHKGLLKALDLSMGQNIHVYSPIVSMQNIQKTPQTAKKALASRWLSWLSYLEDPRIRFFYDPQMPALKDLPAVDTGKDNKKHPSNFQHIFYTDGSAITSPTKEGHLNAGMGIVYFINKDGNLQKQQEWSISLGNHTAQFAEIAAFEFALKKCLPLGGNILVVTDSNYVAKAYNEELDVWASNGFVNNRKKPLKHISKWKSVADLKRLRPDVVVTHEPGHQKLDSSPHAYGNNLADQLATQASFKVHAGKRTADGSEFEKRTADGSEFESPKKKAKVE

SEQ ID NO: 6372 - protein, 2086 aa, synthetic construct
MPAAKRVKLDGGDKKYSIGLDIGTNSVGWAVITDEYKVPSKKFKVLGNTDRHSIKKNLIGALLFDSGETAEATRLKRTARRRYTRRKNRICYLQEIFSNEMAKVDDSFFHRLEESFLVEEDKKHERHPIFGNIVDEVAYHEKYPTIYHLRKKLVDSTDKADLRLIYLALAHMIKFRGHFLIEGDLNPDNSDVDKLFIQLVQTYNQLFEENPINASGVDAKAILSARLSKSRRLENLIAQLPGEKKNGLFGNLIALSLGLTPNFKSNFDLAEDAKLQLSKDTYDDDLDNLLAQIGDQYADLFLAAKNLSDAILLSDILRVNTEITKAPLSASMIKRYDEHHQDLTLLKALVRQQLPEKYKEIFFDQSKNGYAGYIDGGASQEEFYKFIKPILEKMDGTEELLVKLNREDLLRKQRTFDNGSIPHQIHLGELHAILRRQEDFYPFLKDNREKIEKILTFRIPYYVGPLARGNSRFAWMTRKSEETITPWNFEEVVDKGASAQSFIERMTNFDKNLPNEKVLPKHSLLYEYFTVYNELTKVKYVTEGMRKPAFLSGEQKKAIVDLLFKTNRKVTVKQLKEDYFKKIECFDSVEISGVEDRFNASLGTYHDLLKIIKDKDFLDNEENEDILEDIVLTLTLFEDREMIEERLKTYAHLFDDKVMKQLKRRRYTGWGRLSRKLINGIRDKQSGKTILDFLKSDGFANRNFMQLIHDDSLTFKEDIQKAQVSGQGDSLHEHIANLAGSPAIKKGILQTVKVVDELVKVMGRHKPENIVIEMARENQTTQKGQKNSRERMKRIEEGIKELGSQILKEHPVENTQLQNEKLYLYYLQNGRDMYVDQELDINRLSDYDVDHIVPQSFLKDDSIDNKVLTRSDKARGKSDNVPSEEVVKKMKNYWRQLLNAKLITQRKFDNLTKAERGGLSELDKAGFIKRQLVETRQITKHVAQILDSRMNTKYDENDKLIREVKVITLKSKLVSDFRKDFQFYKVREINNYHHAHDAYLNAVVGTALIKKYPKLESEFVYGDYKVYDVRKMIAKSEQEIGKATAKYFFYSNIMNFFKTEITLANGEIRKRPLIETNGETGEIVWDKGRDFATVRKVLSMPQVNIVKKTEVQTGGFSKESILPKRNSDKLIARKKDWDPKKYGGFDSPTVAYSVLVVAKVEKGKSKKLKSVKELLGITIMERSSFEKNPIDFLEAKGYKEVKKDLIIKLPKYSLFELENGRKRMLASAGELQKGNELALPSKYVNFLYLASHYEKLKGSPEDNEQKQLFVEQHKHYLDEIIEQISEFSKRVILADANLDKVLSAYNKHRDKPIREQAENIIHLFTLTNLGAPAAFKYFDTTIDRKRYTSTKEVLDATLIHQSITGLYETRIDLSQLGGDGGEAAAKEAAAKGGVPWILKKPLELTIKLDLEEQQGTLLNNSILSKKGKEELKQLFEKYSALWQSWENQVGHRRIRPHKIATGTVKPTPQKQYHINPKAKPDIQIVINDLLKQGVLIQKESTMNTPVYPVPKPNGRWRMVLDYRAVNKVTPLIAVQNQHSYGILGSLFKGRYKTTIDLSNGFWAHPIVPEDYWITAFTWQGKQYCWTVLPQGFLNSPGLFTGDVVDLLQGIPNVEVYVDDVYISHDSEKEHLEYLDILFNRLKEAGYIISLKKSNIANSIVDFLGFQITNEGRGLTDTFKEKLENITAPTTLKQLQSILGLLNFARNFIPDFTELIAPLYALIPKSTKNYVPWQIEHSTTLETLITKLNGAEYLQGRKGDKTLIMKVNASYTTGYIRYYNEGEKKPISYVSIVFSKTELKFTELEKLLTTVHKGLLKALDLSMGQNIHVYSPIVSMQNIQKTPQTAKKALASRWLSWLSYLEDPRIRFFYDPQMPALKDLPAVDTGKDNKKHPSNFQHIFYTDGSAITSPTKEGHLNAGMGIVYFINKDGNLQKQQEWSISLGNHTAQFAEIAAFEFALKKCLPLGGNILVVTDSNYVAKAYNEELDVWASNGFVNNRKKPLKHISKWKSVADLKRLRPDVVVTHEPGHQKLDSSPHAYGNNLADQLATQASFKVHAGKRTADGSEFEKRTADGSEFESPKKKAKVE

SEQ ID NO: 6373 - protein, 2172 aa, synthetic construct
MPAAKRVKLDGGDKKYSIGLDIGTNSVGWAVITDEYKVPSKKFKVLGNTDRHSIKKNLIGALLFDSGETAEATRLKRTARRRYTRRKNRICYLQEIFSNEMAKVDDSFFHRLEESFLVEEDKKHERHPIFGNIVDEVAYHEKYPTIYHLRKKLVDSTDKADLRLIYLALAHMIKFRGHFLIEGDLNPDNSDVDKLFIQLVQTYNQLFEENPINASGVDAKAILSARLSKSRRLENLIAQLPGEKKNGLFGNLIALSLGLTPNFKSNFDLAEDAKLQLSKDTYDDDLDNLLAQIGDQYADLFLAAKNLSDAILLSDILRVNTEITKAPLSASMIKRYDEHHQDLTLLKALVRQQLPEKYKEIFFDQSKNGYAGYIDGGASQEEFYKFIKPILEKMDGTEELLVKLNREDLLRKQRTFDNGSIPHQIHLGELHAILRRQEDFYPFLKDNREKIEKILTFRIPYYVGPLARGNSRFAWMTRKSEETITPWNFEEVVDKGASAQSFIERMTNFDKNLPNEKVLPKHSLLYEYFTVYNELTKVKYVTEGMRKPAFLSGEQKKAIVDLLFKTNRKVTVKQLKEDYFKKIECFDSVEISGVEDRFNASLGTYHDLLKIIKDKDFLDNEENEDILEDIVLTLTLFEDREMIEERLKTYAHLFDDKVMKQLKRRRYTGWGRLSRKLINGIRDKQSGKTILDFLKSDGFANRNFMQLIHDDSLTFKEDIQKAQVSGQGDSLHEHIANLAGSPAIKKGILQTVKVVDELVKVMGRHKPENIVIEMARENQTTQKGQKNSRERMKRIEEGIKELGSQILKEHPVENTQLQNEKLYLYYLQNGRDMYVDQELDINRLSDYDVDHIVPQSFLKDDSIDNKVLTRSDKARGKSDNVPSEEVVKKMKNYWRQLLNAKLITQRKFDNLTKAERGGLSELDKAGFIKRQLVETRQITKHVAQILDSRMNTKYDENDKLIREVKVITLKSKLVSDFRKDFQFYKVREINNYHHAHDAYLNAVVGTALIKKYPKLESEFVYGDYKVYDVRKMIAKSEQEIGKATAKYFFYSNIMNFFKTEITLANGEIRKRPLIETNGETGEIVWDKGRDFATVRKVLSMPQVNIVKKTEVQTGGFSKESILPKRNSDKLIARKKDWDPKKYGGFDSPTVAYSVLVVAKVEKGKSKKLKSVKELLGITIMERSSFEKNPIDFLEAKGYKEVKKDLIIKLPKYSLFELENGRKRMLASAGELQKGNELALPSKYVNFLYLASHYEKLKGSPEDNEQKQLFVEQHKHYLDEIIEQISEFSKRVILADANLDKVLSAYNKHRDKPIREQAENIIHLFTLTNLGAPAAFKYFDTTIDRKRYTSTKEVLDATLIHQSITGLYETRIDLSQLGGDGGEAAAKEAAAKGGMDLLKPLTVERKGVKIKGYWNSQADITCVPKDLLQGEEPVRQQNVTTIHGTQEGDVYYVNLKIDGRRINTEVIGTTLDYAIITPGDVPWILKKPLELTIKLDLEEQQGTLLNNSILSKKGKEELKQLFEKYSALWQSWENQVGHRRIRPHKIATGTVKPTPQKQYHINPKAKPDIQIVINDLLKQGVLIQKESTMNTPVYPVPKPNGRWRMVLDYRAVNKVTPLIAVQNQHSYGILGSLFKGRYKTTIDLSNGFWAHPIVPEDYWITAFTWQGKQYCWTVLPQGFLNSPGLFNGDVVDLLQGIPNVEVYVDDVYISHDSEKEHLEYLDILFNRLKEAGYIISLKKSNIANSIVDFLGFQITNEGRGLTDTFKEKLENITAPTTLKQLQSILGLLNFARNFIPDFTELIAPLYALIPKSPKNYVPWQIEHSTTLETLITKLNGAEYLQGRKGDKTLIMKVNASYTTGYIRYYNEGEKKPISYVSIVFSKTELKFTELEKLLTTVHKGLLKALDLSMGQNIHVYSPIVSMQNIQKTPQTAKKALASRWLSWLSYLEDPRIRFFYDPQMPALKDLPAVDTGKDNKKHPSNFQHIFYTDGSAITSPTKEGHLNAGMGIVYFINKDGNLQKQQEWSISLGNHTAQFAEIAAFEFALKKCLPLGGNILVVTDSNYVAKAYNEELDVWASNGFVNNRKKPLKHISKWKSVADLKRLRPDVVVTHEPGHQKLDSSPHAYGNNLADQLATQASFKVHAGKRTADGSEFEKRTADGSEFESPKKKAKVE

SEQ ID NO: 6374 - protein, 2093 aa, synthetic construct
MPAAKRVKLDGGDKKYSIGLDIGTNSVGWAVITDEYKVPSKKFKVLGNTDRHSIKKNLIGALLFDSGETAEATRLKRTARRRYTRRKNRICYLQEIFSNEMAKVDDSFFHRLEESFLVEEDKKHERHPIFGNIVDEVAYHEKYPTIYHLRKKLVDSTDKADLRLIYLALAHMIKFRGHFLIEGDLNPDNSDVDKLFIQLVQTYNQLFEENPINASGVDAKAILSARLSKSRRLENLIAQLPGEKKNGLFGNLIALSLGLTPNFKSNFDLAEDAKLQLSKDTYDDDLDNLLAQIGDQYADLFLAAKNLSDAILLSDILRVNTEITKAPLSASMIKRYDEHHQDLTLLKALVRQQLPEKYKEIFFDQSKNGYAGYIDGGASQEEFYKFIKPILEKMDGTEELLVKLNREDLLRKQRTFDNGSIPHQIHLGELHAILRRQEDFYPFLKDNREKIEKILTFRIPYYVGPLARGNSRFAWMTRKSEETITPWNFEEVVDKGASAQSFIERMTNFDKNLPNEKVLPKHSLLYEYFTVYNELTKVKYVTEGMRKPAFLSGEQKKAIVDLLFKTNRKVTVKQLKEDYFKKIECFDSVEISGVEDRFNASLGTYHDLLKIIKDKDFLDNEENEDILEDIVLTLTLFEDREMIEERLKTYAHLFDDKVMKQLKRRRYTGWGRLSRKLINGIRDKQSGKTILDFLKSDGFANRNFMQLIHDDSLTFKEDIQKAQVSGQGDSLHEHIANLAGSPAIKKGILQTVKVVDELVKVMGRHKPENIVIEMARENQTTQKGQKNSRERMKRIEEGIKELGSQILKEHPVENTQLQNEKLYLYYLQNGRDMYVDQELDINRLSDYDVDHIVPQSFLKDDSIDNKVLTRSDKARGKSDNVPSEEVVKKMKNYWRQLLNAKLITQRKFDNLTKAERGGLSELDKAGFIKRQLVETRQITKHVAQILDSRMNTKYDENDKLIREVKVITLKSKLVSDFRKDFQFYKVREINNYHHAHDAYLNAVVGTALIKKYPKLESEFVYGDYKVYDVRKMIAKSEQEIGKATAKYFFYSNIMNFFKTEITLANGEIRKRPLIETNGETGEIVWDKGRDFATVRKVLSMPQVNIVKKTEVQTGGFSKESILPKRNSDKLIARKKDWDPKKYGGFDSPTVAYSVLVVAKVEKGKSKKLKSVKELLGITIMERSSFEKNPIDFLEAKGYKEVKKDLIIKLPKYSLFELENGRKRMLASAGELQKGNELALPSKYVNFLYLASHYEKLKGSPEDNEQKQLFVEQHKHYLDEIIEQISEFSKRVILADANLDKVLSAYNKHRDKPIREQAENIIHLFTLTNLGAPAAFKYFDTTIDRKRYTSTKEVLDATLIHQSITGLYETRIDLSQLGGDGGEAAAKEAAAKGGVLNLEEEYRLHEKPVPSSIDPSWLQLFPTVWAERAGMGLANQVPPVVVELRSGASPVAVRQYPMSKEAREGIRPHIQKFLDLGVLVPCRSPWNTPLLPVKKPGTNDYRPVQDLREINKRVQDIHPTVPNPYNLLSSLPPSYTWYSVLDLKDAFFCLRLHPNSQPLFAFEWKDPEKGNTGQLTWTRLPQGFKNSPTLFNEALHRDLAPFRALNPQVVLLQYVDDLLVAAPTYEDCKKGTQKLLQELSKLGYRVSAKKAQLCQREVTYLGYLLKEGKRWLTPARKATVMKIPVPTTPRQVREFLGKAGFCRLFIPGFASLAAPLYPLTKPSIPFIWTEEHQQAFDHIKKALLSAPALALPDLTKPFTLYIDERAGVARGVLTQTLGPWRRPVAYLSKKLDPVASGWPTCLKAVAAVALLLKDADKLTLGQNVTVIASHSLESIVRQPPDRWMTNARMTHYQSLLLNERVSFAPPAVLNPATLLPVESEATPVHRCSEILAEETGTRRDLEDQPLPGVPTWYTDGSSFITEGKRRAGAPIVDGKRTVWASSLPEGTSAQKAELVALTQALRLAEGKNINIYTDSRYAFATAHIHGAIYKQRGWLTSAGKDIKNKEEILALLEAIHLPRRVAIIHCPGHQRGSNPVATGNRRADEAAKQAALSTRVLAGTTKPAGKRTADGSEFEKRTADGSEFESPKKKAKVE

SEQ ID NO: 6375 - protein, 2126 aa, synthetic construct
MPAAKRVKLDGGDKKYSIGLDIGTNSVGWAVITDEYKVPSKKFKVLGNTDRHSIKKNLIGALLFDSGETAEATRLKRTARRRYTRRKNRICYLQEIFSNEMAKVDDSFFHRLEESFLVEEDKKHERHPIFGNIVDEVAYHEKYPTIYHLRKKLVDSTDKADLRLIYLALAHMIKFRGHFLIEGDLNPDNSDVDKLFIQLVQTYNQLFEENPINASGVDAKAILSARLSKSRRLENLIAQLPGEKKNGLFGNLIALSLGLTPNFKSNFDLAEDAKLQLSKDTYDDDLDNLLAQIGDQYADLFLAAKNLSDAILLSDILRVNTEITKAPLSASMIKRYDEHHQDLTLLKALVRQQLPEKYKEIFFDQSKNGYAGYIDGGASQEEFYKFIKPILEKMDGTEELLVKLNREDLLRKQRTFDNGSIPHQIHLGELHAILRRQEDFYPFLKDNREKIEKILTFRIPYYVGPLARGNSRFAWMTRKSEETITPWNFEEVVDKGASAQSFIERMTNFDKNLPNEKVLPKHSLLYEYFTVYNELTKVKYVTEGMRKPAFLSGEQKKAIVDLLFKTNRKVTVKQLKEDYFKKIECFDSVEISGVEDRFNASLGTYHDLLKIIKDKDFLDNEENEDILEDIVLTLTLFEDREMIEERLKTYAHLFDDKVMKQLKRRRYTGWGRLSRKLINGIRDKQSGKTILDFLKSDGFANRNFMQLIHDDSLTFKEDIQKAQVSGQGDSLHEHIANLAGSPAIKKGILQTVKVVDELVKVMGRHKPENIVIEMARENQTTQKGQKNSRERMKRIEEGIKELGSQILKEHPVENTQLQNEKLYLYYLQNGRDMYVDQELDINRLSDYDVDHIVPQSFLKDDSIDNKVLTRSDKARGKSDNVPSEEVVKKMKNYWRQLLNAKLITQRKFDNLTKAERGGLSELDKAGFIKRQLVETRQITKHVAQILDSRMNTKYDENDKLIREVKVITLKSKLVSDFRKDFQFYKVREINNYHHAHDAYLNAVVGTALIKKYPKLESEFVYGDYKVYDVRKMIAKSEQEIGKATAKYFFYSNIMNFFKTEITLANGEIRKRPLIETNGETGEIVWDKGRDFATVRKVLSMPQVNIVKKTEVQTGGFSKESILPKRNSDKLIARKKDWDPKKYGGFDSPTVAYSVLVVAKVEKGKSKKLKSVKELLGITIMERSSFEKNPIDFLEAKGYKEVKKDLIIKLPKYSLFELENGRKRMLASAGELQKGNELALPSKYVNFLYLASHYEKLKGSPEDNEQKQLFVEQHKHYLDEIIEQISEFSKRVILADANLDKVLSAYNKHRDKPIREQAENIIHLFTLTNLGAPAAFKYFDTTIDRKRYTSTKEVLDATLIHQSITGLYETRIDLSQLGGDGGEAAAKEAAAKGGLLGRDLLTKLKAQIQFSTEGPQVTWEDRPAMCLVLNLEEEYRLHEKPVPPSIDPSWLQLFPMVWAEKAGMGLANQVPPVVVELKSDASPVAVRQYPMSKEAREGIRPHIQRFLDLGILVPCQSPWNTPLLPVKKPGTNDYRPVQDLREVNKRVQDIHPTVPNPYNLLSSLPPSHTWYSVLDLKDAFFCLKLHPNSQPLFAFEWRDPEKGNTGQLTWTRLPQGFKNSPTLFNEALHRDLASFRALNPQVVMLQYVDDLLVAAPTYRDCKEGTRRLLQELSKLGYRVSAKKAQLCREEVTYLGYLLKGGKRWLTPARKATVMKIPTPTTPRQVREFLGTAGFCRLWIPGFASLAAPLYPLTRPKVPFTWTEAHQEAFGRIKEALLSAPALALPDLTKPFALYVDEKEGVARGVLTQTLGPWRRPVAYLSKKLDPVASGWPTCLKAIAAVALLLKDADKLTLGQNVLVIAPHNLESIVRQPPDRWMTNARMTHYQSLLLNERVSFAPPAILNPATLLPVESDDTPIHICSEILAEETGTRPDLRDQPLPGVPAWYTDGSSFIMDGRRQAGAAIVDNKRTVWASNLPEGTSAQKAELIALTQALRLAEGKSINIYTDSRYAFATAHVHGAIYKQRGWLTSAGKDIKNKEEILALLEAIHLPKRVAIIHCPGHQRGTDPVATGNRKADEAAKQAAQSTRILTETTKNAGKRTADGSEFEKRTADGSEFESPKKKAKVE

SEQ ID NO: 6376 - protein, 2126 aa, synthetic construct
MPAAKRVKLDGGDKKYSIGLDIGTNSVGWAVITDEYKVPSKKFKVLGNTDRHSIKKNLIGALLFDSGETAEATRLKRTARRRYTRRKNRICYLQEIFSNEMAKVDDSFFHRLEESFLVEEDKKHERHPIFGNIVDEVAYHEKYPTIYHLRKKLVDSTDKADLRLIYLALAHMIKFRGHFLIEGDLNPDNSDVDKLFIQLVQTYNQLFEENPINASGVDAKAILSARLSKSRRLENLIAQLPGEKKNGLFGNLIALSLGLTPNFKSNFDLAEDAKLQLSKDTYDDDLDNLLAQIGDQYADLFLAAKNLSDAILLSDILRVNTEITKAPLSASMIKRYDEHHQDLTLLKALVRQQLPEKYKEIFFDQSKNGYAGYIDGGASQEEFYKFIKPILEKMDGTEELLVKLNREDLLRKQRTFDNGSIPHQIHLGELHAILRRQEDFYPFLKDNREKIEKILTFRIPYYVGPLARGNSRFAWMTRKSEETITPWNFEEVVDKGASAQSFIERMTNFDKNLPNEKVLPKHSLLYEYFTVYNELTKVKYVTEGMRKPAFLSGEQKKAIVDLLFKTNRKVTVKQLKEDYFKKIECFDSVEISGVEDRFNASLGTYHDLLKIIKDKDFLDNEENEDILEDIVLTLTLFEDREMIEERLKTYAHLFDDKVMKQLKRRRYTGWGRLSRKLINGIRDKQSGKTILDFLKSDGFANRNFMQLIHDDSLTFKEDIQKAQVSGQGDSLHEHIANLAGSPAIKKGILQTVKVVDELVKVMGRHKPENIVIEMARENQTTQKGQKNSRERMKRIEEGIKELGSQILKEHPVENTQLQNEKLYLYYLQNGRDMYVDQELDINRLSDYDVDHIVPQSFLKDDSIDNKVLTRSDKARGKSDNVPSEEVVKKMKNYWRQLLNAKLITQRKFDNLTKAERGGLSELDKAGFIKRQLVETRQITKHVAQILDSRMNTKYDENDKLIREVKVITLKSKLVSDFRKDFQFYKVREINNYHHAHDAYLNAVVGTALIKKYPKLESEFVYGDYKVYDVRKMIAKSEQEIGKATAKYFFYSNIMNFFKTEITLANGEIRKRPLIETNGETGEIVWDKGRDFATVRKVLSMPQVNIVKKTEVQTGGFSKESILPKRNSDKLIARKKDWDPKKYGGFDSPTVAYSVLVVAKVEKGKSKKLKSVKELLGITIMERSSFEKNPIDFLEAKGYKEVKKDLIIKLPKYSLFELENGRKRMLASAGELQKGNELALPSKYVNFLYLASHYEKLKGSPEDNEQKQLFVEQHKHYLDEIIEQISEFSKRVILADANLDKVLSAYNKHRDKPIREQAENIIHLFTLTNLGAPAAFKYFDTTIDRKRYTSTKEVLDATLIHQSITGLYETRIDLSQLGGDGGEAAAKEAAAKGGLLGRDLLTKLKAQIQFSTEGPQVTWEDRPAMCLVLNLEEEYRLHEKPVPPSIDPSWLQLFPMVWAEKAGMGLANQVPPVVVELKSDASPVAVRQYPMSKEAREGIRPHIQRFLDLGILVPCQSPWNTPLLPVKKPGTNDYRPVQDLREVNKRVQDIHPTVPNPYNLLSSLPPSHTWYSVLDLKDAFFCLKLHPNSQPLFAFEWRDPEKGNTGQLTWTRLPQGFKNSPTLFNEALHRDLASFRALNPQVVMLQYVDDLLVAAPTYRDCKEGTRRLLQELSKLGYRVSAKKAQLCREEVTYLGYLLKGGKRWLTPARKATVMKIPTPTTPRQVREFLGKAGFCRLFIPGFASLAAPLYPLTRPKVPFTWTEAHQEAFGRIKEALLSAPALALPDLTKPFALYVDEKEGVARGVLTQTLGPWRRPVAYLSKKLDPVASGWPTCLKAIAAVALLLKDADKLTLGQNVLVIAPHNLESIVRQPPDRWMTNARMTHYQSLLLNERVSFAPPAILNPATLLPVESDDTPIHICSEILAEETGTRPDLRDQPLPGVPAWYTDGSSFIMDGRRQAGAAIVDNKRTVWASNLPEGTSAQKAELIALTQALRLAEGKSINIYTDSRYAFATAHVHGAIYKQRGWLTSAGKDIKNKEEILALLEAIHLPKRVAIIHCPGHQRGTDPVATGNRKADEAAKQAAQSTRILTETTKNAGKRTADGSEFEKRTADGSEFESPKKKAKVE

SEQ ID NO: 6377 - protein, 2095 aa, synthetic construct
MPAAKRVKLDGGDKKYSIGLDIGTNSVGWAVITDEYKVPSKKFKVLGNTDRHSIKKNLIGALLFDSGETAEATRLKRTARRRYTRRKNRICYLQEIFSNEMAKVDDSFFHRLEESFLVEEDKKHERHPIFGNIVDEVAYHEKYPTIYHLRKKLVDSTDKADLRLIYLALAHMIKFRGHFLIEGDLNPDNSDVDKLFIQLVQTYNQLFEENPINASGVDAKAILSARLSKSRRLENLIAQLPGEKKNGLFGNLIALSLGLTPNFKSNFDLAEDAKLQLSKDTYDDDLDNLLAQIGDQYADLFLAAKNLSDAILLSDILRVNTEITKAPLSASMIKRYDEHHQDLTLLKALVRQQLPEKYKEIFFDQSKNGYAGYIDGGASQEEFYKFIKPILEKMDGTEELLVKLNREDLLRKQRTFDNGSIPHQIHLGELHAILRRQEDFYPFLKDNREKIEKILTFRIPYYVGPLARGNSRFAWMTRKSEETITPWNFEEVVDKGASAQSFIERMTNFDKNLPNEKVLPKHSLLYEYFTVYNELTKVKYVTEGMRKPAFLSGEQKKAIVDLLFKTNRKVTVKQLKEDYFKKIECFDSVEISGVEDRFNASLGTYHDLLKIIKDKDFLDNEENEDILEDIVLTLTLFEDREMIEERLKTYAHLFDDKVMKQLKRRRYTGWGRLSRKLINGIRDKQSGKTILDFLKSDGFANRNFMQLIHDDSLTFKEDIQKAQVSGQGDSLHEHIANLAGSPAIKKGILQTVKVVDELVKVMGRHKPENIVIEMARENQTTQKGQKNSRERMKRIEEGIKELGSQILKEHPVENTQLQNEKLYLYYLQNGRDMYVDQELDINRLSDYDVDHIVPQSFLKDDSIDNKVLTRSDKARGKSDNVPSEEVVKKMKNYWRQLLNAKLITQRKFDNLTKAERGGLSELDKAGFIKRQLVETRQITKHVAQILDSRMNTKYDENDKLIREVKVITLKSKLVSDFRKDFQFYKVREINNYHHAHDAYLNAVVGTALIKKYPKLESEFVYGDYKVYDVRKMIAKSEQEIGKATAKYFFYSNIMNFFKTEITLANGEIRKRPLIETNGETGEIVWDKGRDFATVRKVLSMPQVNIVKKTEVQTGGFSKESILPKRNSDKLIARKKDWDPKKYGGFDSPTVAYSVLVVAKVEKGKSKKLKSVKELLGITIMERSSFEKNPIDFLEAKGYKEVKKDLIIKLPKYSLFELENGRKRMLASAGELQKGNELALPSKYVNFLYLASHYEKLKGSPEDNEQKQLFVEQHKHYLDEIIEQISEFSKRVILADANLDKVLSAYNKHRDKPIREQAENIIHLFTLTNLGAPAAFKYFDTTIDRKRYTSTKEVLDATLIHQSITGLYETRIDLSQLGGDGGEAAAKEAAAKGGTLNLEDEYRLYETSAEPEVSPGSTWLSDFPQAWAETGGMGLAVRQAPLIIPLKATSTPVSIKQYPMSQEAKLGIKPHIQRLLDQGILVPCQSPWNTPLLPVKKPGTNDYRPVQDLREVNKRVEDIHPTVPNPYNLLSGLPPSHRWYTVLDLKDAFFCLRLHPTSQPLFAFEWRDPGMGISGQLTWTRLPQGFKNSPTLFNEALHRDLADFRIQHPDLILLQYVDDILLAATSELDCQQGTRALLLTLGNLGYRASAKKAQLCQKQVKYLGYLLKEGQRWLTEARKETVMGQPTPKTPRQLREFLGKAGFCRLFIPGFAEMAAPLYPLTKPGTLFNWGPDQQKAYQEIKQALLTAPALGLPDLTKPFELFVDEKQGYAKGVLTQKLGPWRRPVAYLSKKLDPVAAGWPPCLRMVAAIAVLRKDAGKLTMGQPLVILAPHAVEALVKQPPDRWLSNARMTHYQAMLLDTDRVQFGPVVALNPATLLPLPEEGAPHDCLEILAETHGTRPDLTDQPIPDADHTWYTDGSSFLQEGQRKAGAAVTTETEVIWARALPAGTSAQRAELIALTQALKMAEGKRLNVYTDSRYAFATAHIHGEIYRRRGWLTSEGREIKNKSEILALLKALFLPKRLSIIHCLGHQKGDSAEARGNRLADQAAREAAIKTPPDTSTLLAGKRTADGSEFEKRTADGSEFESPKKKAKVE

SEQ ID NO: 6378 - protein, 2095 aa, synthetic construct
MPAAKRVKLDGGDKKYSIGLDIGTNSVGWAVITDEYKVPSKKFKVLGNTDRHSIKKNLIGALLFDSGETAEATRLKRTARRRYTRRKNRICYLQEIFSNEMAKVDDSFFHRLEESFLVEEDKKHERHPIFGNIVDEVAYHEKYPTIYHLRKKLVDSTDKADLRLIYLALAHMIKFRGHFLIEGDLNPDNSDVDKLFIQLVQTYNQLFEENPINASGVDAKAILSARLSKSRRLENLIAQLPGEKKNGLFGNLIALSLGLTPNFKSNFDLAEDAKLQLSKDTYDDDLDNLLAQIGDQYADLFLAAKNLSDAILLSDILRVNTEITKAPLSASMIKRYDEHHQDLTLLKALVRQQLPEKYKEIFFDQSKNGYAGYIDGGASQEEFYKFIKPILEKMDGTEELLVKLNREDLLRKQRTFDNGSIPHQIHLGELHAILRRQEDFYPFLKDNREKIEKILTFRIPYYVGPLARGNSRFAWMTRKSEETITPWNFEEVVDKGASAQSFIERMTNFDKNLPNEKVLPKHSLLYEYFTVYNELTKVKYVTEGMRKPAFLSGEQKKAIVDLLFKTNRKVTVKQLKEDYFKKIECFDSVEISGVEDRFNASLGTYHDLLKIIKDKDFLDNEENEDILEDIVLTLTLFEDREMIEERLKTYAHLFDDKVMKQLKRRRYTGWGRLSRKLINGIRDKQSGKTILDFLKSDGFANRNFMQLIHDDSLTFKEDIQKAQVSGQGDSLHEHIANLAGSPAIKKGILQTVKVVDELVKVMGRHKPENIVIEMARENQTTQKGQKNSRERMKRIEEGIKELGSQILKEHPVENTQLQNEKLYLYYLQNGRDMYVDQELDINRLSDYDVDHIVPQSFLKDDSIDNKVLTRSDKARGKSDNVPSEEVVKKMKNYWRQLLNAKLITQRKFDNLTKAERGGLSELDKAGFIKRQLVETRQITKHVAQILDSRMNTKYDENDKLIREVKVITLKSKLVSDFRKDFQFYKVREINNYHHAHDAYLNAVVGTALIKKYPKLESEFVYGDYKVYDVRKMIAKSEQEIGKATAKYFFYSNIMNFFKTEITLANGEIRKRPLIETNGETGEIVWDKGRDFATVRKVLSMPQVNIVKKTEVQTGGFSKESILPKRNSDKLIARKKDWDPKKYGGFDSPTVAYSVLVVAKVEKGKSKKLKSVKELLGITIMERSSFEKNPIDFLEAKGYKEVKKDLIIKLPKYSLFELENGRKRMLASAGELQKGNELALPSKYVNFLYLASHYEKLKGSPEDNEQKQLFVEQHKHYLDEIIEQISEFSKRVILADANLDKVLSAYNKHRDKPIREQAENIIHLFTLTNLGAPAAFKYFDTTIDRKRYTSTKEVLDATLIHQSITGLYETRIDLSQLGGDGGEAAAKEAAAKGGTLGIEDEYRLHETSTEPDVSLGSTWLSDFPQAWAETGGMGLAVRQAPLIIPLKATSTPVSIQQYPMSHEARLGIKPHIQRLLDQGILVPCQSPWNTPLLPVKKPGTNDYRPVQDLREVNKRVEDIHPTVPNPYNLLSGLPPSHQWYTVLDLKDAFFCLRLHPTSQPLFAFEWRDPGMGISGQLTWTRLPQGFKNSPTLFNEALHRDLADFRIQHPDLILLQYVDDILLAATSELDCQQGTRALLQTLGDLGYRASAKKAQICQKQVKYLGYLLREGQRWLTEARKETVMGQPVPKTPRQLREFLGTAGFCRLWIPGFAEMAAPLYPLTKPGTLFSWGPDQQKAYQEIKQALLTAPALGLPDLTKPFELFVDEKQGYAKGVLTQKLGPWRRPVAYLSKKLDPVAAGWPPCLRMVAAIAVLTKDAGKLTMGQPLVILAPHAVEALVKQPPDRWLSNARMTHYQAMLLDTDRVQFGPVVALNPATLLPLPEEGAPHDCLEILAETHGTRPDLTDQPIPDADHTWYTDGSSFLQEGQRKAGAAVTTETEVIWAGALPAGTSAQRAELIALTQALKMAEGKRLNVYTDSRYAFATAHIHGEIYRRRGWLTSEGREIKNKSEILALLKALFLPKRLSIIHCLGHQKGDSAEARGNRLADQAAREAAIKTPPDTSTLLAGKRTADGSEFEKRTADGSEFESPKKKAKVE

SEQ ID NO: 6379 - protein, 2087 aa, synthetic construct
MPAAKRVKLDGGDKKYSIGLDIGTNSVGWAVITDEYKVPSKKFKVLGNTDRHSIKKNLIGALLFDSGETAEATRLKRTARRRYTRRKNRICYLQEIFSNEMAKVDDSFFHRLEESFLVEEDKKHERHPIFGNIVDEVAYHEKYPTIYHLRKKLVDSTDKADLRLIYLALAHMIKFRGHFLIEGDLNPDNSDVDKLFIQLVQTYNQLFEENPINASGVDAKAILSARLSKSRRLENLIAQLPGEKKNGLFGNLIALSLGLTPNFKSNFDLAEDAKLQLSKDTYDDDLDNLLAQIGDQYADLFLAAKNLSDAILLSDILRVNTEITKAPLSASMIKRYDEHHQDLTLLKALVRQQLPEKYKEIFFDQSKNGYAGYIDGGASQEEFYKFIKPILEKMDGTEELLVKLNREDLLRKQRTFDNGSIPHQIHLGELHAILRRQEDFYPFLKDNREKIEKILTFRIPYYVGPLARGNSRFAWMTRKSEETITPWNFEEVVDKGASAQSFIERMTNFDKNLPNEKVLPKHSLLYEYFTVYNELTKVKYVTEGMRKPAFLSGEQKKAIVDLLFKTNRKVTVKQLKEDYFKKIECFDSVEISGVEDRFNASLGTYHDLLKIIKDKDFLDNEENEDILEDIVLTLTLFEDREMIEERLKTYAHLFDDKVMKQLKRRRYTGWGRLSRKLINGIRDKQSGKTILDFLKSDGFANRNFMQLIHDDSLTFKEDIQKAQVSGQGDSLHEHIANLAGSPAIKKGILQTVKVVDELVKVMGRHKPENIVIEMARENQTTQKGQKNSRERMKRIEEGIKELGSQILKEHPVENTQLQNEKLYLYYLQNGRDMYVDQELDINRLSDYDVDHIVPQSFLKDDSIDNKVLTRSDKARGKSDNVPSEEVVKKMKNYWRQLLNAKLITQRKFDNLTKAERGGLSELDKAGFIKRQLVETRQITKHVAQILDSRMNTKYDENDKLIREVKVITLKSKLVSDFRKDFQFYKVREINNYHHAHDAYLNAVVGTALIKKYPKLESEFVYGDYKVYDVRKMIAKSEQEIGKATAKYFFYSNIMNFFKTEITLANGEIRKRPLIETNGETGEIVWDKGRDFATVRKVLSMPQVNIVKKTEVQTGGFSKESILPKRNSDKLIARKKDWDPKKYGGFDSPTVAYSVLVVAKVEKGKSKKLKSVKELLGITIMERSSFEKNPIDFLEAKGYKEVKKDLIIKLPKYSLFELENGRKRMLASAGELQKGNELALPSKYVNFLYLASHYEKLKGSPEDNEQKQLFVEQHKHYLDEIIEQISEFSKRVILADANLDKVLSAYNKHRDKPIREQAENIIHLFTLTNLGAPAAFKYFDTTIDRKRYTSTKEVLDATLIHQSITGLYETRIDLSQLGGDGGEAAAKEAAAKGGLDDEYRLYSPLVKPDQNIQFWLEQFPQAWAETAGMGLAKQVPPQVIQLKASATPVSVRQYPLSKEAQEGIRPHVQRLIQQGILVPVQSPWNTPLLPVRKPGTNDYRPVQDLREVNKRVQDIHPTVPNPYNLLCALPPQRSWYTVLDLKDAFFCLRLHPTSQPLFAFEWRDPGTGRTGQLTWTRLPQGFKNSPTIFNEALHRDLANFRIQHPQVTLLQYVDDLLLAGATKQDCLEGTKALLLELSDLGYRASAKKAQICRREVTYLGYSLRDGQRWLTEARKKTVVQIPAPTTAKQVREFLGKAGFCRLFIPGFATLAAPLYPLTKPKGEFSWAPEHQKAFDAIKKALLSAPALALPDVTKPFTLYVDERKGVARGVLTQTLGPWRRPVAYLSKKLDPVASGWPVCLKAIAAVAILVKDADKLTLGQNITVIAPHALENIVRQPPDRWMTNARMTHYQSLLLTERVTFAPPAALNPATLLPEETDEPVTHDCHQLLIEETGVRKDLTDIPLTGEVLTWFTDGSSYVVEGKRMAGAAVVDGTRTIWASSLPEGTSAQKAELMALTQALRLAEGKSINIYTDSRYAFATAHVHGAIYKQRGWLTSAGREIKNKEEILSLLEALHLPKRLAIIHCPGHQKAKDPISRGNQMADRVAKQAAQGVNLLPAGKRTADGSEFEKRTADGSEFESPKKKAKVE

SEQ ID NO: 6380 - protein, 2089 aa, synthetic construct
MPAAKRVKLDGGDKKYSIGLDIGTNSVGWAVITDEYKVPSKKFKVLGNTDRHSIKKNLIGALLFDSGETAEATRLKRTARRRYTRRKNRICYLQEIFSNEMAKVDDSFFHRLEESFLVEEDKKHERHPIFGNIVDEVAYHEKYPTIYHLRKKLVDSTDKADLRLIYLALAHMIKFRGHFLIEGDLNPDNSDVDKLFIQLVQTYNQLFEENPINASGVDAKAILSARLSKSRRLENLIAQLPGEKKNGLFGNLIALSLGLTPNFKSNFDLAEDAKLQLSKDTYDDDLDNLLAQIGDQYADLFLAAKNLSDAILLSDILRVNTEITKAPLSASMIKRYDEHHQDLTLLKALVRQQLPEKYKEIFFDQSKNGYAGYIDGGASQEEFYKFIKPILEKMDGTEELLVKLNREDLLRKQRTFDNGSIPHQIHLGELHAILRRQEDFYPFLKDNREKIEKILTFRIPYYVGPLARGNSRFAWMTRKSEETITPWNFEEVVDKGASAQSFIERMTNFDKNLPNEKVLPKHSLLYEYFTVYNELTKVKYVTEGMRKPAFLSGEQKKAIVDLLFKTNRKVTVKQLKEDYFKKIECFDSVEISGVEDRFNASLGTYHDLLKIIKDKDFLDNEENEDILEDIVLTLTLFEDREMIEERLKTYAHLFDDKVMKQLKRRRYTGWGRLSRKLINGIRDKQSGKTILDFLKSDGFANRNFMQLIHDDSLTFKEDIQKAQVSGQGDSLHEHIANLAGSPAIKKGILQTVKVVDELVKVMGRHKPENIVIEMARENQTTQKGQKNSRERMKRIEEGIKELGSQILKEHPVENTQLQNEKLYLYYLQNGRDMYVDQELDINRLSDYDVDHIVPQSFLKDDSIDNKVLTRSDKARGKSDNVPSEEVVKKMKNYWRQLLNAKLITQRKFDNLTKAERGGLSELDKAGFIKRQLVETRQITKHVAQILDSRMNTKYDENDKLIREVKVITLKSKLVSDFRKDFQFYKVREINNYHHAHDAYLNAVVGTALIKKYPKLESEFVYGDYKVYDVRKMIAKSEQEIGKATAKYFFYSNIMNFFKTEITLANGEIRKRPLIETNGETGEIVWDKGRDFATVRKVLSMPQVNIVKKTEVQTGGFSKESILPKRNSDKLIARKKDWDPKKYGGFDSPTVAYSVLVVAKVEKGKSKKLKSVKELLGITIMERSSFEKNPIDFLEAKGYKEVKKDLIIKLPKYSLFELENGRKRMLASAGELQKGNELALPSKYVNFLYLASHYEKLKGSPEDNEQKQLFVEQHKHYLDEIIEQISEFSKRVILADANLDKVLSAYNKHRDKPIREQAENIIHLFTLTNLGAPAAFKYFDTTIDRKRYTSTKEVLDATLIHQSITGLYETRIDLSQLGGDGGEAAAKEAAAKGGTLQLDDEYRLYSPLVKPDQNIQFWLEQFPQAWAETAGMGLAKQVPPQVIQLKASATPVSVRQYPLSKEAQEGIRPHVQRLIQQGILVPVQSPWNTPLLPVRKPGTNDYRPVQDLREVNKRVQDIHPTVPNPYNLLCALPPQRSWYTVLDLKDAFFCLRLHPTSQPLFAFEWRDPGTGRTGQLTWTRLPQGFKNSPTIFDEALHRDLANFRIQHPQVTLLQYVDDLLLAGATKQDCLEGTKALLLELSDLGYRASAKKAQICRREVTYLGYSLRDGQRWLTEARKKTVVQIPAPTTAKQVREFLGTAGFCRLWIPGFATLAAPLYPLTKEKGEFSWAPEHQKAFDAIKKALLSAPALALPDVTKPFTLYVDERKGVARGVLTQTLGPWRRPVAYLSKKLDPVASGWPVCLKAIAAVAILVKDADKLTLGQNITVIAPHALENIVRQPPDRWMTNARMTHYQSLLLTERVTFAPPAALNPATLLPEETDEPVTHDCHQLLIEETGVRKDLTDIPLTGEVLTWFTDGSSYVVEGKRMAGAAVVDGTRTIWASSLPEGTSAQKAELMALTQALRLAEGKSINIYTDSRYAFATAHVHGAIYKQRGLLTSAGREIKNKEEILSLLEALHLPKRLAIIHCPGHQKAKDPISRGNQMADRVAKQAAQGVNLLAGKRTADGSEFEKRTADGSEFESPKKKAKVE

SEQ ID NO: 6381 - protein, 2087 aa, synthetic construct; identical to SEQ ID NO: 6379

SEQ ID NO: 6382 - protein, 2175 aa, synthetic construct
MPAAKRVKLDGGDKKYSIGLDIGTNSVGWAVITDEYKVPSKKFKVLGNTDRHSIKKNLIGALLFDSGETAEATRLKRTARRRYTRRKNRICYLQEIFSNEMAKVDDSFFHRLEESFLVEEDKKHERHPIFGNIVDEVAYHEKYPTIYHLRKKLVDSTDKADLRLIYLALAHMIKFRGHFLIEGDLNPDNSDVDKLFIQLVQTYNQLFEENPINASGVDAKAILSARLSKSRRLENLIAQLPGEKKNGLFGNLIALSLGLTPNFKSNFDLAEDAKLQLSKDTYDDDLDNLLAQIGDQYADLFLAAKNLSDAILLSDILRVNTEITKAPLSASMIKRYDEHHQDLTLLKALVRQQLPEKYKEIFFDQSKNGYAGYIDGGASQEEFYKFIKPILEKMDGTEELLVKLNREDLLRKQRTFDNGSIPHQIHLGELHAILRRQEDFYPFLKDNREKIEKILTFRIPYYVGPLARGNSRFAWMTRKSEETITPWNFEEVVDKGASAQSFIERMTNFDKNLPNEKVLPKHSLLYEYFTVYNELTKVKYVTEGMRKPAFLSGEQKKAIVDLLFKTNRKVTVKQLKEDYFKKIECFDSVEISGVEDRFNASLGTYHDLLKIIKDKDFLDNEENEDILEDIVLTLTLFEDREMIEERLKTYAHLFDDKVMKQLKRRRYTGWGRLSRKLINGIRDKQSGKTILDFLKSDGFANRNFMQLIHDDSLTFKEDIQKAQVSGQGDSLHEHIANLAGSPAIKKGILQTVKVVDELVKVMGRHKPENIVIEMARENQTTQKGQKNSRERMKRIEEGIKELGSQILKEHPVENTQLQNEKLYLYYLQNGRDMYVDQELDINRLSDYDVDHIVPQSFLKDDSIDNKVLTRSDKARGKSDNVPSEEVVKKMKNYWRQLLNAKLITQRKFDNLTKAERGGLSELDKAGFIKRQLVETRQITKHVAQILDSRMNTKYDENDKLIREVKVITLKSKLVSDFRKDFQFYKVREINNYHHAHDAYLNAVVGTALIKKYPKLESEFVYGDYKVYDVRKMIAKSEQEIGKATAKYFFYSNIMNFFKTEITLANGEIRKRPLIETNGETGEIVWDKGRDFATVRKVLSMPQVNIVKKTEVQTGGFSKESILPKRNSDKLIARKKDWDPKKYGGFDSPTVAYSVLVVAKVEKGKSKKLKSVKELLGITIMERSSFEKNPIDFLEAKGYKEVKKDLIIKLPKYSLFELENGRKRMLASAGELQKGNELALPSKYVNFLYLASHYEKLKGSPEDNEQKQLFVEQHKHYLDEIIEQISEFSKRVILADANLDKVLSAYNKHRDKPIREQAENIIHLFTLTNLGAPAAFKYFDTTIDRKRYTSTKEVLDATLIHQSITGLYETRIDLSQLGGDGGEAAAKEAAAKGGMDPLQLLQPLEAEIKGTKLKAHWNSGATITCVPQAFLEEEVPIKNIWIKTIHGEKEQPVYYLTFKIQGRKVEAEVISSPYDYILVSPSDIPWLMKKPLQLTTLVPLQEYEERLLKQTMLTGSYKEKLQSLFLKYDALWQHWENQVGHRRIKPHHIATGTVNPRPQKQYPINPKAKASIQTVINDLLKQGVLIQQNSIMNTPVYPVPKPDGKWRMVLDYREVNKTIPLIAAQNQHSAGILSSIFRGKYKTTLDLSNGFWAHSITPESYWLTAFTWLGQQYCWTRLPQGFLNSPALFNADVVDLLKEVPNVQVYVDDIYISHDDPREHLEQLEKVFSLLLNAGYVVSLKKSEIAQHEVEFLGFNITKEGRGLTETFKQKLLNITPPRDLKQLQSILGKLNFARNFIPNFSELVKPLYNIIATAPGKYITWTTDNSQQLQNIISMLNSAENLEERNPEVRLIMKVNTSPSAGYIRFYNEFAKRPIMYLNYVYTKAEVKFTNTEKLLTTIHKGLIKALDLGMGQEILVYSPIVSMTKIQKTPLPERKALPIRWITWMSYLEDPRIQFHYDKTLPELQQVPTVTDDIIAKIKHPSEFSMVFYTDGSAIKHPNVNKSHNAGMGIAQVQFKPEFTVINTWSIPLGDHTAQLAEVAAVEFACKKALKIDGPVLIVTDSFYVAESVNKELPYWQSNGFFNNKKKPLKHVSKWKSIADCIQLKPDIIIIHEKGHQPTASTFHTEGNNLADKLATQGSYVVNAGKRTADGSEFEKRTADGSEFESPKKKAKVE

SEQ ID NO: 6383 - protein, 2095 aa, synthetic construct
MPAAKRVKLDGGDKKYSIGLDIGTNSVGWAVITDEYKVPSKKFKVLGNTDRHSIKKNLIGALLFDSGETAEATRLKRTARRRYTRRKNRICYLQEIFSNEMAKVDDSFFHRLEESFLVEEDKKHERHPIFGNIVDEVAYHEKYPTIYHLRKKLVDSTDKADLRLIYLALAHMIKFRGHFLIEGDLNPDNSDVDKLFIQLVQTYNQLFEENPINASGVDAKAILSARLSKSRRLENLIAQLPGEKKNGLFGNLIALSLGLTPNFKSNFDLAEDAKLQLSKDTYDDDLDNLLAQIGDQYADLFLAAKNLSDAILLSDILRVNTEITKAPLSASMIKRYDEHHQDLTLLKALVRQQLPEKYKEIFFDQSKNGYAGYIDGGASQEEFYKFIKPILEKMDGTEELLVKLNREDLLRKQRTFDNGSIPHQIHLGELHAILRRQEDFYPFLKDNREKIEKILTFRIPYYVGPLARGNSRFAWMTRKSEETITPWNFEEVVDKGASAQSFIERMTNFDKNLPNEKVLPKHSLLYEYFTVYNELTKVKYVTEGMRKPAFLSGEQKKAIVDLLFKTNRKVTVKQLKEDYFKKIECFDSVEISGVEDRFNASLGTYHDLLKIIKDKDFLDNEENEDILEDIVLTLTLFEDREMIEERLKTYAHLFDDKVMKQLKRRRYTGWGRLSRKLINGIRDKQSGKTILDFLKSDGFANRNFMQLIHDDSLTFKEDIQKAQVSGQGDSLHEHIANLAGSPAIKKGILQTVKVVDELVKVMGRHKPENIVIEMARENQTTQKGQKNSRERMKRIEEGIKELGSQILKEHPVENTQLQNEKLYLYYLQNGRDMYVDQELDINRLSDYDVDHIVPQSFLKDDSIDNKVLTRSDKARGKSDNVPSEEVVKKMKNYWRQLLNAKLITQRKFDNLTKAERGGLSELDKAGFIKRQLVETRQITKHVAQILDSRMNTKYDENDKLIREVKVITLKSKLVSDFRKDFQFYKVREINNYHHAHDAYLNAVVGTALIKKYPKLESEFVYGDYKVYDVRKMIAKSEQEIGKATAKYFFYSNIMNFFKTEITLANGEIRKRPLIETNGETGEIVWDKGRDFATVRKVLSMPQVNIVKKTEVQTGGFSKESILPKRNSDKLIARKKDWDPKKYGGFDSPTVAYSVLVVAKVEKGKSKKLKSVKELLGITIMERSSFEKNPIDFLEAKGYKEVKKDLIIKLPKYSLFELENGRKRMLASAGELQKGNELALPSKYVNFLYLASHYEKLKGSPEDNEQKQLFVEQHKHYLDEIIEQISEFSKRVILADANLDKVLSAYNKHRDKPIREQAENIIHLFTLTNLGAPAAFKYFDTTIDRKRYTSTKEVLDATLIHQSITGLYETRIDLSQLGGDGGEAAAKEAAAKGGTLNIEDEYRLHETSKEPDVPLGSTWLSDFPQAWAETGGMGLAVRQAPLIIPLKATSTPVSIKQYPMSQEARLGIKPHIQRLLDQGILVPCQSPWNTPLLPVKKPGTNDYRPVQDLREVNKRVEDIHPTVPNPYNLLSGLPPSHQWYTVLDLKDAFFCLRLHPTSQPLFAFEWRDPEMGISGQLTWTRLPQGFKNSPTLFNEALHRDLADFRIQHPDLILLQYVDDLLLAATSEQDCQRGTRALLQTLGNLGYRASAKKAQICQKQVKYLGYLLKEGQRWLTEARKETVMGQPTPKTPRQLREFLGKAGFCRLFIPGFAEMAAPLYPLTKPGTLFNWGPDQQKAYQEIKQALLTAPALGLPDLTKPFELFVDEKQGYAKGVLTQKLGPWRRPVAYLSKKLDPVAAGWPPCLRMVAAIAVLTKDAGKLTMGQPLVILAPHAVEALVKQPPDRWLSNARMTHYQAMLLDTDRVQFGPVVALNPATLLPLPEKEAPHDCLEILAETHGTRPDLTDQPIPDADYTWYTDGSSFLQEGQRRAGAAVTTETEVIWARALPAGTSAQRAELIALTQALKMAEGKKLNVYTDSRYAFATAHVHGEIYRRRGWLTSEGREIKNKNEILALLKALFLPKRLSIIHCPGHQKGNSAEARGNRMADQAAREAAMKAVLETSTLLAGKRTADGSEFEKRTADGSEFESPKKKAKVE

SEQ ID NO: 6384 - protein, 2102 aa, synthetic construct
MPAAKRVKLDGGDKKYSIGLDIGTNSVGWAVITDEYKVPSKKFKVLGNTDRHSIKKNLIGALLFDSGETAEATRLKRTARRRYTRRKNRICYLQEIFSNEMAKVDDSFFHRLEESFLVEEDKKHERHPIFGNIVDEVAYHEKYPTIYHLRKKLVDSTDKADLRLIYLALAHMIKFRGHFLIEGDLNPDNSDVDKLFIQLVQTYNQLFEENPINASGVDAKAILSARLSKSRRLENLIAQLPGEKKNGLFGNLIALSLGLTPNFKSNFDLAEDAKLQLSKDTYDDDLDNLLAQIGDQYADLFLAAKNLSDAILLSDILRVNTEITKAPLSASMIKRYDEHHQDLTLLKALVRQQLPEKYKEIFFDQSKNGYAGYIDGGASQEEFYKFIKPILEKMDGTEELLVKLNREDLLRKQRTFDNGSIPHQIHLGELHAILRRQEDFYPFLKDNREKIEKILTFRIPYYVGPLARGNSRFAWMTRKSEETITPWNFEEVVDKGASAQSFIERMTNFDKNLPNEKVLPKHSLLYEYFTVYNELTKVKYVTEGMRKPAFLSGEQKKAIVDLLFKTNRKVTVKQLKEDYFKKIECFDSVEISGVEDRFNASLGTYHDLLKIIKDKDFLDNEENEDILEDIVLTLTLFEDREMIEERLKTYAHLFDDKVMKQLKRRRYTGWGRLSRKLINGIRDKQSGKTILDFLKSDGFANRNFMQLIHDDSLTFKEDIQKAQVSGQGDSLHEHIANLAGSPAIKKGILQTVKVVDELVKVMGRHKPENIVIEMARENQTTQKGQKNSRERMKRIEEGIKELGSQILKEHPVENTQLQNEKLYLYYLQNGRDMYVDQELDINRLSDYDVDHIVPQSFLKDDSIDNKVLTRSDKARGKSDNVPSEEVVKKMKNYWRQLLNAKLITQRKFDNLTKAERGGLSELDKAGFIKRQLVETRQITKHVAQILDSRMNTKYDENDKLIREVKVITLKSKLVSDFRKDFQFYKVREINNYHHAHDAYLNAVVGTALIKKYPKLESEFVYGDYKVYDVRKMIAKSEQEIGKATAKYFFYSNIMNFFKTEITLANGEIRKRPLIETNGETGEIVWDKGRDFATVRKVLSMPQVNIVKKTEVQTGGFSKESILPKRNSDKLIARKKDWDPKKYGGFDSPTVAYSVLVVAKVEKGKSKKLKSVKELLGITIMERSSFEKNPIDFLEAKGYKEVKKDLIIKLPKYSLFELENGRKRMLASAGELQKGNELALPSKYVNFLYLASHYEKLKGSPEDNEQKQLFVEQHKHYLDEIIEQISEFSKRVILADANLDKVLSAYNKHRDKPIREQAENIIHLFTLTNLGAPAAFKYFDTTIDRKRYTSTKEVLDATLIHQSITGLYETRIDLSQLGGDGGEAAAKEAAAKEAAAKGGTAPLEEEYRLFLEAPIQNVTLLEQWKREIPKVWAEINPPGLASTQAPIHVQLLSTALPVRVRQYPITLEAKRSLRETIRKFRAAGILRPVHSPWNTPLLPVRKSGTSEYRMVQDLREVNKRVETIHPTVPNPYTLLSLLPPDRIWYSVLDLKDAFFCIPLAPESQLIFAFEWADAEEGESGQLTWTRLPQGFKNSPTLFNEALNRDLQGFRLDHPSVSLLQYVDDLLIAADTQAACLSATRDLLMTLAELGYRVSGKKAQLCQEEVTYLGFKIHKGSRSLSNSRTQAILQIPVPKTKRQVREFLGTIGYCRLWIPGFAELAQPLYAATRPGNDPLVWGEKEEEAFQSLKLALTQPPALALPSLDKPFQLFVEETSGAAKGVLTQALGPWKRPVAYLSKRLDPVAAGWPRCLRAIAAAALLTREASKLTFGQDIEITSSHNLESLLRSPPDKWLTNARITQYQVLLLDPPRVRFKQTAALNPATLLPETDDTLPIHHCLDTLDSLTSTRPDLTDQPLAQAEATLFTDGSSYIRDGKRYAGAAVVTLDSVIWAEPLPIGTSAQKAELIALTKALEWSKDKSVNIYTDSRYAFATLHVHGMIYRERGWLTAGGKAIKNAPEILALLTAVWLPKRVAVMHCKGHQKDDAPTSTGNRRADEVAREVAIRPLSTQATISAGKRTADGSEFEKRTADGSEFESPKKKAKVE

SEQ ID NO: 6385 - protein, 2102 aa, synthetic construct
MPAAKRVKLDGGDKKYSIGLDIGTNSVGWAVITDEYKVPSKKFKVLGNTDRHSIKKNLIGALLFDSGETAEATRLKRTARRRYTRRKNRICYLQEIFSNEMAKVDDSFFHRLEESFLVEEDKKHERHPIFGNIVDEVAYHEKYPTIYHLRKKLVDSTDKADLRLIYLALAHMIKFRGHFLIEGDLNPDNSDVDKLFIQLVQTYNQLFEENPINASGVDAKAILSARLSKSRRLENLIAQLPGEKKNGLFGNLIALSLGLTPNFKSNFDLAEDAKLQLSKDTYDDDLDNLLAQIGDQYADLFLAAKNLSDAILLSDILRVNTEITKAPLSASMIKRYDEHHQDLTLLKALVRQQLPEKYKEIFFDQSKNGYAGYIDGGASQEEFYKFIKPILEKMDGTEELLVKLNREDLLRKQRTFDNGSIPHQIHLGELHAILRRQEDFYPFLKDNREKIEKILTFRIPYYVGPLARGNSRFAWMTRKSEETITPWNFEEVVDKGASAQSFIERMTNFDKNLPNEKVLPKHSLLYEYFTVYNELTKVKYVTEGMRKPAFLSGEQKKAIVDLLFKTNRKVTVKQLKEDYFKKIECFDSVEISGVEDRFNASLGTYHDLLKIIKDKDFLDNEENEDILEDIVLTLTLFEDREMIEERLKTYAHLFDDKVMKQLKRRRYTGWGRLSRKLINGIRDKQSGKTILDFLKSDGFANRNFMQLIHDDSLTFKEDIQKAQVSGQGDSLHEHIANLAGSPAIKKGILQTVKVVDELVKVMGRHKPENIVIEMARENQTTQKGQKNSRERMKRIEEGIKELGSQILKEHPVENTQLQNEKLYLYYLQNGRDMYVDQELDINRLSDYDVDHIVPQSFLKDDSIDNKVLTRSDKARGKSDNVPSEEVVKKMKNYWRQLLNAKLITQRKFDNLTKAERGGLSELDKAGFIKRQLVETRQITKHVAQILDSRMNTKYDENDKLIREVKVITLKSKLVSDFRKDFQFYKVREINNYHHAHDAYLNAVVGTALIKKYPKLESEFVYGDYKVYDVRKMIAKSEQEIGKATAKYFFYSNIMNFFKTEITLANGEIRKRPLIETNGETGEIVWDKGRDFATVRKVLSMPQVNIVKKTEVQTGGFSKESILPKRNSDKLIARKKDWDPKKYGGFDSPTVAYSVLVVAKVEKGKSKKLKSVKELLGITIMERSSFEKNPIDFLEAKGYKEVKKDLIIKLPKYSLFELENGRKRMLASAGELQKGNELALPSKYVNFLYLASHYEKLKGSPEDNEQKQLFVEQHKHYLDEIIEQISEFSKRVILADANLDKVLSAYNKHRDKPIREQAENIIHLFTLTNLGAPAAFKYFDTTIDRKRYTSTKEVLDATLIHQSITGLYETRIDLSQLGGDGGEAAAKEAAAKEAAAKGGTAPLEEEYRLFLEAPIQNVTLLEQWKREIPKVWAEINPPGLASTQAPIHVQLLSTALPVRVRQYPITLEAKRSLRETIRKFRAAGILRPVHSPWNTPLLPVRKSGTSEYRMVQDLREVNKRVETIHPTVPNPYTLLSLLPPDRIWYSVLDLKDAFFCIPLAPESQLIFAFEWADAEEGESGQLTWTRLPQGFKNSPTLFNEALNRDLQGFRLDHPSVSLLQYVDDLLIAADTQAACLSATRDLLMTLAELGYRVSGKKAQLCQEEVTYLGFKIHKGSRSLSNSRTQAILQIPVPKTKRQVREFLGKIGYCRLFIPGFAELAQPLYAATRPGNDPLVWGEKEEEAFQSLKLALTQPPALALPSLDKPFQLFVEETSGAAKGVLTQALGPWKRPVAYLSKRLDPVAAGWPRCLRAIAAAALLTREASKLTFGQDIEITSSHNLESLLRSPPDKWLTNARITQYQVLLLDPPRVRFKQTAALNPATLLPETDDTLPIHHCLDTLDSLTSTRPDLTDQPLAQAEATLFTDGSSYIRDGKRYAGAAVVTLDSVIWAEPLPIGTSAQKAELIALTKALEWSKDKSVNIYTDSRYAFATLHVHGMIYRERGWLTAGGKAIKNAPEILALLTAVWLPKRVAVMHCKGHQKDDAPTSTGNRRADEVAREVAIRPLSTQATISAGKRTADGSEFEKRTADGSEFESPKKKAKVE

SEQ ID NO: 6386 - protein, 2106 aa, synthetic construct
MPAAKRVKLDGGDKKYSIGLDIGTNSVGWAVITDEYKVPSKKFKVLGNTDRHSIKKNLIGALLFDSGETAEATRLKRTARRRYTRRKNRICYLQEIFSNEMAKVDDSFFHRLEESFLVEEDKKHERHPIFGNIVDEVAYHEKYPTIYHLRKKLVDSTDKADLRLIYLALAHMIKFRGHFLIEGDLNPDNSDVDKLFIQLVQTYNQLFEENPINASGVDAKAILSARLSKSRRLENLIAQLPGEKKNGLFGNLIALSLGLTPNFKSNFDLAEDAKLQLSKDTYDDDLDNLLAQIGDQYADLFLAAKNLSDAILLSDILRVNTEITKAPLSASMIKRYDEHHQDLTLLKALVRQQLPEKYKEIFFDQSKNGYAGYIDGGASQEEFYKFIKPILEKMDGTEELLVKLNREDLLRKQRTFDNGSIPHQIHLGELHAILRRQEDFYPFLKDNREKIEKILTFRIPYYVGPLARGNSRFAWMTRKSEETITPWNFEEVVDKGASAQSFIERMTNFDKNLPNEKVLPKHSLLYEYFTVYNELTKVKYVTEGMRKPAFLSGEQKKAIVDLLFKTNRKVTVKQLKEDYFKKIECFDSVEISGVEDRFNASLGTYHDLLKIIKDKDFLDNEENEDILEDIVLTLTLFEDREMIEERLKTYAHLFDDKVMKQLKRRRYTGWGRLSRKLINGIRDKQSGKTILDFLKSDGFANRNFMQLIHDDSLTFKEDIQKAQVSGQGDSLHEHIANLAGSPAIKKGILQTVKVVDELVKVMGRHKPENIVIEMARENQTTQKGQKNSRERMKRIEEGIKELGSQILKEHPVENTQLQNEKLYLYYLQNGRDMYVDQELDINRLSDYDVDHIVPQSFLKDDSIDNKVLTRSDKARGKSDNVPSEEVVKKMKNYWRQLLNAKLITQRKFDNLTKAERGGLSELDKAGFIKRQLVETRQITKHVAQILDSRMNTKYDENDKLIREVKVITLKSKLVSDFRKDFQFYKVREINNYHHAHDAYLNAVVGTALIKKYPKLESEFVYGDYKVYDVRKMIAKSEQEIGKATAKYFFYSNIMNFFKTEITLANGEIRKRPLIETNGETGEIVWDKGRDFATVRKVLSMPQVNIVKKTEVQTGGFSKESILPKRNSDKLIARKKDWDPKKYGGFDSPTVAYSVLVVAKVEKGKSKKLKSVKELLGITIMERSSFEKNPIDFLEAKGYKEVKKDLIIKLPKYSLFELENGRKRMLASAGELQKGNELALPSKYVNFLYLASHYEKLKGSPEDNEQKQLFVEQHKHYLDEIIEQISEFSKRVILADANLDKVLSAYNKHRDKPIREQAENIIHLFTLTNLGAPAAFKYFDTTIDRKRYTSTKEVLDATLIHQSITGLYETRIDLSQLGGDGGEAAAKEAAAKEAAAKGGTVSLQDEHRLFDIPVTTSLPDVWLQDFPQAWAETGGLGRAKCQAPIIIDLKPTAVPVSIKQYPMSLEAHMGIRQHIIKFLELGVLRPCRSPWNTPLLPVKKPGTQDYRPVQDLREINKRTVDIHPTVPNPYNLLSTLKPDYSWYTVLDLKDAFFCLPLAPQSQELFAFEWKDPERGISGQLTWTRLPQGFKNSPTLFNEALHRDLTDFRTQHPEVTLLQYVDDLLLAAPTKKACTQGTRHLLQELGEKGYRASAKKAQICQTKVTYLGYILSEGKRWLTPGRIETVARIPPPRNPREVREFLGTAGFCRLWIPGFAELAAPLYALTKPSTPFTWQTEHQLAFEALKKALLSAPALGLPDTSKPFTLFLDERQGIAKGVLTQKLGPWKRPVAYLSKKLDPVAAGWPPCLRIMAATAMLVKDSAKLTLGQPLTVITPHTLEAIVRQPPDRWITNARLTHYQALLLDTDRVQFGPPVTLNPATLLPVPENQPSPHDCRQVLAETHGTREDLKDQELPDADHTWYTDGSSYLDSGTRRAGAAVVDGHNTIWAQSLPPGTSAQKAELIALTKALELSKGKKANIYTDSRYAFATAHTHGSIYERRGWLTSEGKEIKNKAEIIALLKALFLPQEVAIIHCPGHQKGQDPVAVGNRQADRVARQAAMAEVLTLATEPDNTSHITAGKRTADGSEFEKRTADGSEFESPKKKAKVE

SEQ ID NO: 6387 - protein, 2091 aa, synthetic construct
MPAAKRVKLDGGDKKYSIGLDIGTNSVGWAVITDEYKVPSKKFKVLGNTDRHSIKKNLIGALLFDSGETAEATRLKRTARRRYTRRKNRICYLQEIFSNEMAKVDDSFFHRLEESFLVEEDKKHERHPIFGNIVDEVAYHEKYPTIYHLRKKLVDSTDKADLRLIYLALAHMIKFRGHFLIEGDLNPDNSDVDKLFIQLVQTYNQLFEENPINASGVDAKAILSARLSKSRRLENLIAQLPGEKKNGLFGNLIALSLGLTPNFKSNFDLAEDAKLQLSKDTYDDDLDNLLAQIGDQYADLFLAAKNLSDAILLSDILRVNTEITKAPLSASMIKRYDEHHQDLTLLKALVRQQLPEKYKEIFFDQSKNGYAGYIDGGASQEEFYKFIKPILEKMDGTEELLVKLNREDLLRKQRTFDNGSIPHQIHLGELHAILRRQEDFYPFLKDNREKIEKILTFRIPYYVGPLARGNSRFAWMTRKSEETITPWNFEEVVDKGASAQSFIERMTNFDKNLPNEKVLPKHSLLYEYFTVYNELTKVKYVTEGMRKPAFLSGEQKKAIVDLLFKTNRKVTVKQLKEDYFKKIECFDSVEISGVEDRFNASLGTYHDLLKIIKDKDFLDNEENEDILEDIVLTLTLFEDREMIEERLKTYAHLFDDKVMKQLKRRRYTGWGRLSRKLINGIRDKQSGKTILDFLKSDGFANRNFMQLIHDDSLTFKEDIQKAQVSGQGDSLHEHIANLAGSPAIKKGILQTVKVVDELVKVMGRHKPENIVIEMARENQTTQKGQKNSRERMKRIEEGIKELGSQILKEHPVENTQLQNEKLYLYYLQNGRDMYVDQELDINRLSDYDVDHIVPQSFLKDDSIDNKVLTRSDKARGKSDNVPSEEVVKKMKNYWRQLLNAKLITQRKFDNLTKAERGGLSELDKAGFIKRQLVETRQITKHVAQILDSRMNTKYDENDKLIREVKVITLKSKLVSDFRKDFQFYKVREINNYHHAHDAYLNAVVGTALIKKYPKLESEFVYGDYKVYDVRKMIAKSEQEIGKATAKYFFYSNIMNFFKTEITLANGEIRKRPLIETNGETGEIVWDKGRDFATVRKVLSMPQVNIVKKTEVQTGGFSKESILPKRNSDKLIARKKDWDPKKYGGFDSPTVAYSVLVVAKVEKGKSKKLKSVKELLGITIMERSSFEKNPIDFLEAKGYKEVKKDLIIKLPKYSLFELENGRKRMLASAGELQKGNELALPSKYVNFLYLASHYEKLKGSPEDNEQKQLFVEQHKHYLDEIIEQISEFSKRVILADANLDKVLSAYNKHRDKPIREQAENIIHLFTLTNLGAPAAFKYFDTTIDRKRYTSTKEVLDATLIHQSITGLYETRIDLSQLGGDGGEAAAKEAAAKEAAAKGGVPWILKKPLELTIKLDLEEQQGTLLNNSILSKKGKEELKQLFEKYSALWQSWENQVGHRRIRPHKIATGTVKPTPQKQYHINPKAKPDIQIVINDLLKQGVLIQKESTMNTPVYPVPKPNGRWRMVLDYRAVNKVTPLIAVQNQHSYGILGSLFKGRYKTTIDLSNGFWAHPIVPEDYWITAFTWQGKQYCWTVLPQGFLNSPGLFTGDVVDLLQGIPNVEVYVDDVYISHDSEKEHLEYLDILFNRLKEAGYIISLKKSNIANSIVDFLGFQITNEGRGLTDTFKEKLENITAPTTLKQLQSILGLLNFARNFIPDFTELIAPLYALIPKSTKNYVPWQIEHSTTLETLITKLNGAEYLQGRKGDKTLIMKVNASYTTGYIRYYNEGEKKPISYVSIVFSKTELKFTELEKLLTTVHKGLLKALDLSMGQNIHVYSPIVSMQNIQKTPQTAKKALASRWLSWLSYLEDPRIRFFYDPQMPALKDLPAVDTGKDNKKHPSNFQHIFYTDGSAITSPTKEGHLNAGMGIVYFINKDGNLQKQQEWSISLGNHTAQFAEIAAFEFALKKCLPLGGNILVVTDSNYVAKAYNEELDVWASNGFVNNRKKPLKHISKWKSVADLKRLRPDVVVTHEPGHQKLDSSPHAYGNNLADQLATQASFKVHAGKRTADGSEFEKRTADGSEFESPKKKAKVE

SEQ ID NO: 6388 - protein, 2091 aa, synthetic construct
MPAAKRVKLDGGDKKYSIGLDIGTNSVGWAVITDEYKVPSKKFKVLGNTDRHSIKKNLIGALLFDSGETAEATRLKRTARRRYTRRKNRICYLQEIFSNEMAKVDDSFFHRLEESFLVEEDKKHERHPIFGNIVDEVAYHEKYPTIYHLRKKLVDSTDKADLRLIYLALAHMIKFRGHFLIEGDLNPDNSDVDKLFIQLVQTYNQLFEENPINASGVDAKAILSARLSKSRRLENLIAQLPGEKKNGLFGNLIALSLGLTPNFKSNFDLAEDAKLQLSKDTYDDDLDNLLAQIGDQYADLFLAAKNLSDAILLSDILRVNTEITKAPLSASMIKRYDEHHQDLTLLKALVRQQLPEKYKEIFFDQSKNGYAGYIDGGASQEEFYKFIKPILEKMDGTEELLVKLNREDLLRKQRTFDNGSIPHQIHLGELHAILRRQEDFYPFLKDNREKIEKILTFRIPYYVGPLARGNSRFAWMTRKSEETITPWNFEEVVDKGASAQSFIERMTNFDKNLPNEKVLPKHSLLYEYFTVYNELTKVKYVTEGMRKPAFLSGEQKKAIVDLLFKTNRKVTVKQLKEDYFKKIECFDSVEISGVEDRFNASLGTYHDLLKIIKDKDFLDNEENEDILEDIVLTLTLFEDREMIEERLKTYAHLFDDKVMKQLKRRRYTGWGRLSRKLINGIRDKQSGKTILDFLKSDGFANRNFMQLIHDDSLTFKEDIQKAQVSGQGDSLHEHIANLAGSPAIKKGILQTVKVVDELVKVMGRHKPENIVIEMARENQTTQKGQKNSRERMKRIEEGIKELGSQILKEHPVENTQLQNEKLYLYYLQNGRDMYVDQELDINRLSDYDVDHIVPQSFLKDDSIDNKVLTRSDKARGKSDNVPSEEVVKKMKNYWRQLLNAKLITQRKFDNLTKAERGGLSELDKAGFIKRQLVETRQITKHVAQILDSRMNTKYDENDKLIREVKVITLKSKLVSDFRKDFQFYKVREINNYHHAHDAYLNAVVGTALIKKYPKLESEFVYGDYKVYDVRKMIAKSEQEIGKATAKYFFYSNIMNFFKTEITLANGEIRKRPLIETNGETGEIVWDKGRDFATVRKVLSMPQVNIVKKTEVQTGGFSKESILPKRNSDKLIARKKDWDPKKYGGFDSPTVAYSVLVVAKVEKGKSKKLKSVKELLGITIMERSSFEKNPIDFLEAKGYKEVKKDLIIKLPKYSLFELENGRKRMLASAGELQKGNELALPSKYVNFLYLASHYEKLKGSPEDNEQKQLFVEQHKHYLDEIIEQISEFSKRVILADANLDKVLSAYNKHRDKPIREQAENIIHLFTLTNLGAPAAFKYFDTTIDRKRYTSTKEVLDATLIHQSITGLYETRIDLSQLGGDGGEAAAKEAAAKEAAAKGGVPWLTQQPLQLTILVPLQEYQEKILSKTALPEDQKQQLKTLFVKYDNLWQHWENQVGHRKIRPHNIATGDYPPRPQKQYPINPKAKPSIQIVIDDLLKQGVLTPQNSTMNTPVYPVPKPDGRWRMVLDYREVNKTIPLTAAQNQHSAGILATIVRQKYKTTLDLANGFWAHPITPESYWLTAFTWQGKQYCWTRLPQGFLNSPALFNADVVDLLKEIPNVQVYVDDIYLSHDDPKEHVQQLEKVFQILLQAGYVVSLKKSEIGQKTVEFLGFNITKEGRGLTDTFKTKLLNITPPKDLKQLQSILGLLNFARNFIPNFAELVQPLYNLIAPAKGKYIEWSEENTKQLNMVIEALNTASNLEERLPEQRLVIKVNTSPSAGYVRYYNETGKKPIMYLNYVFSKAELKFSMLEKLLTTMHKALIKAMDLAMGQEILVYSPIVSMTKIQKTPLPERKALPIRWITWMTYLEDPRIQFHYDKTLPELKHIPDVYTSSQSPVKHPSQYEGVFYTDGSAIKSPDPTKSNNAGMGIVHATYKPEYQVLNQWSIPLGNHTAQMAEIAAVEFACKKALKIPGPVLVITDSFYVAESANKELPYWKSNGFVNNKKKPLKHISKWKSIAECLSMKPDITIQHEKGISLQIPVFILKGNALADKLATQGSYVVNAGKRTADGSEFEKRTADGSEFESPKKKAKVE

SEQ ID NO: 6389 - protein, 2091 aa, synthetic construct
MPAAKRVKLDGGDKKYSIGLDIGTNSVGWAVITDEYKVPSKKFKVLGNTDRHSIKKNLIGALLFDSGETAEATRLKRTARRRYTRRKNRICYLQEIFSNEMAKVDDSFFHRLEESFLVEEDKKHERHPIFGNIVDEVAYHEKYPTIYHLRKKLVDSTDKADLRLIYLALAHMIKFRGHFLIEGDLNPDNSDVDKLFIQLVQTYNQLFEENPINASGVDAKAILSARLSKSRRLENLIAQLPGEKKNGLFGNLIALSLGLTPNFKSNFDLAEDAKLQLSKDTYDDDLDNLLAQIGDQYADLFLAAKNLSDAILLSDILRVNTEITKAPLSASMIKRYDEHHQDLTLLKALVRQQLPEKYKEIFFDQSKNGYAGYIDGGASQEEFYKFIKPILEKMDGTEELLVKLNREDLLRKQRTFDNGSIPHQIHLGELHAILRRQEDFYPFLKDNREKIEKILTFRIPYYVGPLARGNSRFAWMTRKSEETITPWNFEEVVDKGASAQSFIERMTNFDKNLPNEKVLPKHSLLYEYFTVYNELTKVKYVTEGMRKPAFLSGEQKKAIVDLLFKTNRKVTVKQLKEDYFKKIECFDSVEISGVEDRFNASLGTYHDLLKIIKDKDFLDNEENEDILEDIVLTLTLFEDREMIEERLKTYAHLFDDKVMKQLKRRRYTGWGRLSRKLINGIRDKQSGKTILDFLKSDGFANRNFMQLIHDDSLTFKEDIQKAQVSGQGDSLHEHIANLAGSPAIKKGILQTVKVVDELVKVMGRHKPENIVIEMARENQTTQKGQKNSRERMKRIEEGIKELGSQILKEHPVENTQLQNEKLYLYYLQNGRDMYVDQELDINRLSDYDVDHIVPQSFLKDDSIDNKVLTRSDKARGKSDNVPSEEVVKKMKNYWRQLLNAKLITQRKFDNLTKAERGGLSELDKAGFIKRQLVETRQITKHVAQILDSRMNTKYDENDKLIREVKVITLKSKLVSDFRKDFQFYKVREINNYHHAHDAYLNAVVGTALIKKYPKLESEFVYGDYKVYDVRKMIAKSEQEIGKATAKYFFYSNIMNFFKTEITLANGEIRKRPLIETNGETGEIVWDKGRDFATVRKVLSMPQVNIVKKTEVQTGGFSKESILPKRNSDKLIARKKDWDPKKYGGFDSPTVAYSVLVVAKVEKGKSKKLKSVKELLGITIMERSSFEKNPIDFLEAKGYKEVKKDLIIKLPKYSLFELENGRKRMLASAGELQKGNELALPSKYVNFLYLASHYEKLKGSPEDNEQKQLFVEQHKHYLDEIIEQISEFSKRVILADANLDKVLSAYNKHRDKPIREQAENIIHLFTLTNLGAPAAFKYFDTTIDRKRYTSTKEVLDATLIHQSITGLYETRIDLSQLGGDGGEAAAKEAAAKEAAAKGGVPWLTQQPLQLTILVPLQEYQEKILSKTALPEDQKQQLKTLFVKYDNLWQHWENQVGHRKIRPHNIATGDYPPRPQKQYPINPKAKPSIQIVIDDLLKQGVLTPQNSTMNTPVYPVPKPDGRWRMVLDYREVNKTIPLTAAQNQHSAGILATIVRQKYKTTLDLANGFWAHPITPESYWLTAFTWQGKQYCWTRLPQGFLNSPALFNADVVDLLKEIPNVQVYVDDIYLSHDDPKEHVQQLEKVFQILLQAGYVVSLKKSEIGQKTVEFLGFNITKEGRGLTDTFKTKLLNITPPKDLKQLQSILGKLNFARNFIPNFAELVQPLYNLIAPAKGKYIEWSEENTKQLNMVIEALNTASNLEERLPEQRLVIKVNTSPSAGYVRYYNETGKKPIMYLNYVFSKAELKFSMLEKLLTTMHKALIKAMDLAMGQEILVYSPIVSMTKIQKTPLPERKALPIRWITWMTYLEDPRIQFHYDKTLPELKHIPDVYTSSQSPVKHPSQYEGVFYTDGSAIKSPDPTKSNNAGMGIVHATYKPEYQVLNQWSIPLGNHTAQMAEIAAVEFACKKALKIPGPVLVITDSFYVAESANKELPYWKSNGFVNNKKKPLKHISKWKSIAECLSMKPDITIQHEKGISLQIPVFILKGNALADKLATQGSYVVNAGKRTADGSEFEKRTADGSEFESPKKKAKVE

SEQ ID NO: 6390 - protein, 2222 aa, synthetic construct
MPAAKRVKLDGGDKKYSIGLDIGTNSVGWAVITDEYKVPSKKFKVLGNTDRHSIKKNLIGALLFDSGETAEATRLKRTARRRYTRRKNRICYLQEIFSNEMAKVDDSFFHRLEESFLVEEDKKHERHPIFGNIVDEVAYHEKYPTIYHLRKKLVDSTDKADLRLIYLALAHMIKFRGHFLIEGDLNPDNSDVDKLFIQLVQTYNQLFEENPINASGVDAKAILSARLSKSRRLENLIAQLPGEKKNGLFGNLIALSLGLTPNFKSNFDLAEDAKLQLSKDTYDDDLDNLLAQIGDQYADLFLAAKNLSDAILLSDILRVNTEITKAPLSASMIKRYDEHHQDLTLLKALVRQQLPEKYKEIFFDQSKNGYAGYIDGGASQEEFYKFIKPILEKMDGTEELLVKLNREDLLRKQRTFDNGSIPHQIHLGELHAILRRQEDFYPFLKDNREKIEKILTFRIPYYVGPLARGNSRFAWMTRKSEETITPWNFEEVVDKGASAQSFIERMTNFDKNLPNEKVLPKHSLLYEYFTVYNELTKVKYVTEGMRKPAFLSGEQKKAIVDLLFKTNRKVTVKQLKEDYFKKIECFDSVEISGVEDRFNASLGTYHDLLKIIKDKDFLDNEENEDILEDIVLTLTLFEDREMIEERLKTYAHLFDDKVMKQLKRRRYTGWGRLSRKLINGIRDKQSGKTILDFLKSDGFANRNFMQLIHDDSLTFKEDIQKAQVSGQGDSLHEHIANLAGSPAIKKGILQTVKVVDELVKVMGRHKPENIVIEMARENQTTQKGQKNSRERMKRIEEGIKELGSQILKEHPVENTQLQNEKLYLYYLQNGRDMYVDQELDINRLSDYDVDHIVPQSFLKDDSIDNKVLTRSDKARGKSDNVPSEEVVKKMKNYWRQLLNAKLITQRKFDNLTKAERGGLSELDKAGFIKRQLVETRQITKHVAQILDSRMNTKYDENDKLIREVKVITLKSKLVSDFRKDFQFYKVREINNYHHAHDAYLNAVVGTALIKKYPKLESEFVYGDYKVYDVRKMIAKSEQEIGKATAKYFFYSNIMNFFKTEITLANGEIRKRPLIETNGETGEIVWDKGRDFATVRKVLSMPQVNIVKKTEVQTGGFSKESILPKRNSDKLIARKKDWDPKKYGGFDSPTVAYSVLVVAKVEKGKSKKLKSVKELLGITIMERSSFEKNPIDFLEAKGYKEVKKDLIIKLPKYSLFELENGRKRMLASAGELQKGNELALPSKYVNFLYLASHYEKLKGSPEDNEQKQLFVEQHKHYLDEIIEQISEFSKRVILADANLDKVLSAYNKHRDKPIREQAENIIHLFTLTNLGAPAAFKYFDTTIDRKRYTSTKEVLDATLIHQSITGLYETRIDLSQLGGDGGEAAAKEAAAKEAAAKGGTLGDQGSRGSDPLPEPRVTLTVEGIPTEFLVNTGAEHSVLTKPMGKMGSKRTVVAGATGSKVYPWTTKRLLKIGQKQVTHSFLVIPECPAPLLGRDLLTKLKAQIQFSTEGPQVTWEDRPAMCLVLNLEEEYRLHEKPVPPSIDPSWLQLFPMVWAEKAGMGLANQVPPVVVELKSDASPVAVRQYPMSKEAREGIRPHIQRFLDLGILVPCQSPWNTPLLPVKKPGTNDYRPVQDLREVNKRVQDIHPTVPNPYNLLSSLPPSHTWYSVLDLKDAFFCLKLHPNSQPLFAFEWRDPEKGNTGQLTWTRLPQGFKNSPTLFDEALHRDLASFRALNPQVVMLQYVDDLLVAAPTYRDCKEGTRRLLQELSKLGYRVSAKKAQLCREEVTYLGYLLKGGKRWLTPARKATVMKIPTPTTPRQVREFLGTAGFCRLWIPGFASLAAPLYPLTREKVPFTWTEAHQEAFGRIKEALLSAPALALPDLTKPFALYVDEKEGVARGVLTQTLGPWRRPVAYLSKKLDPVASGWPTCLKAIAAVALLLKDADKLTLGQNVLVIAPHNLESIVRQPPDRWMTNARMTHYQSLLLNERVSFAPPAILNPATLLPVESDDTPIHICSEILAEETGTRPDLRDQPLPGVPAWYTDGSSFIMDGRRQAGAAIVDNKRTVWASNLPEGTSAQKAELIALTQALRLAEGKSINIYTDSRYAFATAHVHGAIYKQRGLLTSAGKDIKNKEEILALLEAIHLPKRVAIIHCPGHQRGTDPVATGNRKADEAAKQAAQSTRILTETTKNAGKRTADGSEFEKRTADGSEFESPKKKAKVE

SEQ ID NO: 6391 - protein, 2131 aa, synthetic construct
MPAAKRVKLDGGDKKYSIGLDIGTNSVGWAVITDEYKVPSKKFKVLGNTDRHSIKKNLIGALLFDSGETAEATRLKRTARRRYTRRKNRICYLQEIFSNEMAKVDDSFFHRLEESFLVEEDKKHERHPIFGNIVDEVAYHEKYPTIYHLRKKLVDSTDKADLRLIYLALAHMIKFRGHFLIEGDLNPDNSDVDKLFIQLVQTYNQLFEENPINASGVDAKAILSARLSKSRRLENLIAQLPGEKKNGLFGNLIALSLGLTPNFKSNFDLAEDAKLQLSKDTYDDDLDNLLAQIGDQYADLFLAAKNLSDAILLSDILRVNTEITKAPLSASMIKRYDEHHQDLTLLKALVRQQLPEKYKEIFFDQSKNGYAGYIDGGASQEEFYKFIKPILEKMDGTEELLVKLNREDLLRKQRTFDNGSIPHQIHLGELHAILRRQEDFYPFLKDNREKIEKILTFRIPYYVGPLARGNSRFAWMTRKSEETITPWNFEEVVDKGASAQSFIERMTNFDKNLPNEKVLPKHSLLYEYFTVYNELTKVKYVTEGMRKPAFLSGEQKKAIVDLLFKTNRKVTVKQLKEDYFKKIECFDSVEISGVEDRFNASLGTYHDLLKIIKDKDFLDNEENEDILEDIVLTLTLFEDREMIEERLKTYAHLFDDKVMKQLKRRRYTGWGRLSRKLINGIRDKQSGKTILDFLKSDGFANRNFMQLIHDDSLTFKEDIQKAQVSGQGDSLHEHIANLAGSPAIKKGILQTVKVVDELVKVMGRHKPENIVIEMARENQTTQKGQKNSRERMKRIEEGIKELGSQILKEHPVENTQLQNEKLYLYYLQNGRDMYVDQELDINRLSDYDVDHIVPQSFLKDDSIDNKVLTRSDKARGKSDNVPSEEVVKKMKNYWRQLLNAKLITQRKFDNLTKAERGGLSELDKAGFIKRQLVETRQITKHVAQILDSRMNTKYDENDKLIREVKVITLKSKLVSDFRKDFQFYKVREINNYHHAHDAYLNAVVGTALIKKYPKLESEFVYGDYKVYDVRKMIAKSEQEIGKATAKYFFYSNIMNFFKTEITLANGEIRKRPLIETNGETGEIVWDKGRDFATVRKVLSMPQVNIVKKTEVQTGGFSKESILPKRNSDKLIARKKDWDPKKYGGFDSPTVAYSVLVVAKVEKGKSKKLKSVKELLGITIMERSSFEKNPIDFLEAKGYKEVKKDLIIKLPKYSLFELENGRKRMLASAGELQKGNELALPSKYVNFLYLASHYEKLKGSPEDNEQKQLFVEQHKHYLDEIIEQISEFSKRVILADANLDKVLSAYNKHRDKPIREQAENIIHLFTLTNLGAPAAFKYFDTTIDRKRYTSTKEVLDATLIHQSITGLYETRIDLSQLGGDGGEAAAKEAAAKEAAAKGGLLGRDLLTKLKAQIQFSTEGPQVTWEDRPAMCLVLNLEEEYRLHEKPVPPSIDPSWLQLFPMVWAEKAGMGLANQVPPVVVELKSDASPVAVRQYPMSKEAREGIRPHIQRFLDLGILVPCQSPWNTPLLPVKKPGTNDYRPVQDLREVNKRVQDIHPTVPNPYNLLSSLPPSHTWYSVLDLKDAFFCLKLHPNSQPLFAFEWRDPEKGNTGQLTWTRLPQGFKNSPTLFNEALHRDLASFRALNPQVVMLQYVDDLLVAAPTYRDCKEGTRRLLQELSKLGYRVSAKKAQLCREEVTYLGYLLKGGKRWLTPARKATVMKIPTPTTPRQVREFLGKAGFCRLFIPGFASLAAPLYPLTRPKVPFTWTEAHQEAFGRIKEALLSAPALALPDLTKPFALYVDEKEGVARGVLTQTLGPWRRPVAYLSKKLDPVASGWPTCLKAIAAVALLLKDADKLTLGQNVLVIAPHNLESIVRQPPDRWMTNARMTHYQSLLLNERVSFAPPAILNPATLLPVESDDTPIHICSEILAEETGTRPDLRDQPLPGVPAWYTDGSSFIMDGRRQAGAAIVDNKRTVWASNLPEGTSAQKAELIALTQALRLAEGKSINIYTDSRYAFATAHVHGAIYKQRGWLTSAGKDIKNKEEILALLEAIHLPKRVAIIHCPGHQRGTDPVATGNRKADEAAKQAAQSTRILTETTKNAGKRTADGSEFEKRTADGSEFESPKKKAKVE

SEQ ID NO: 6392 - protein, 2222 aa, synthetic construct
MPAAKRVKLDGGDKKYSIGLDIGTNSVGWAVITDEYKVPSKKFKVLGNTDRHSIKKNLIGALLFDSGETAEATRLKRTARRRYTRRKNRICYLQEIFSNEMAKVDDSFFHRLEESFLVEEDKKHERHPIFGNIVDEVAYHEKYPTIYHLRKKLVDSTDKADLRLIYLALAHMIKFRGHFLIEGDLNPDNSDVDKLFIQLVQTYNQLFEENPINASGVDAKAILSARLSKSRRLENLIAQLPGEKKNGLFGNLIALSLGLTPNFKSNFDLAEDAKLQLSKDTYDDDLDNLLAQIGDQYADLFLAAKNLSDAILLSDILRVNTEITKAPLSASMIKRYDEHHQDLTLLKALVRQQLPEKYKEIFFDQSKNGYAGYIDGGASQEEFYKFIKPILEKMDGTEELLVKLNREDLLRKQRTFDNGSIPHQIHLGELHAILRRQEDFYPFLKDNREKIEKILTFRIPYYVGPLARGNSRFAWMTRKSEETITPWNFEEVVDKGASAQSFIERMTNFDKNLPNEKVLPKHSLLYEYFTVYNELTKVKYVTEGMRKPAFLSGEQKKAIVDLLFKTNRKVTVKQLKEDYFKKIECFDSVEISGVEDRFNASLGTYHDLLKIIKDKDFLDNEENEDILEDIVLTLTLFEDREMIEERLKTYAHLFDDKVMKQLKRRRYTGWGRLSRKLINGIRDKQSGKTILDFLKSDGFANRNFMQLIHDDSLTFKEDIQKAQVSGQGDSLHEHIANLAGSPAIKKGILQTVKVVDELVKVMGRHKPENIVIEMARENQTTQKGQKNSRERMKRIEEGIKELGSQILKEHPVENTQLQNEKLYLYYLQNGRDMYVDQELDINRLSDYDVDHIVPQSFLKDDSIDNKVLTRSDKARGKSDNVPSEEVVKKMKNYWRQLLNAKLITQRKFDNLTKAERGGLSELDKAGFIKRQLVETRQITKHVAQILDSRMNTKYDENDKLIREVKVITLKSKLVSDFRKDFQFYKVREINNYHHAHDAYLNAVVGTALIKKYPKLESEFVYGDYKVYDVRKMIAKSEQEIGKATAKYFFYSNIMNFFKTEITLANGEIRKRPLIETNGETGEIVWDKGRDFATVRKVLSMPQVNIVKKTEVQTGGFSKESILPKRNSDKLIARKKDWDPKKYGGFDSPTVAYSVLVVAKVEKGKSKKLKSVKELLGITIMERSSFEKNPIDFLEAKGYKEVKKDLIIKLPKYSLFELENGRKRMLASAGELQKGNELALPSKYVNFLYLASHYEKLKGSPEDNEQKQLFVEQHKHYLDEIIEQISEFSKRVILADANLDKVLSAYNKHRDKPIREQAENIIHLFTLTNLGAPAAFKYFDTTIDRKRYTSTKEVLDATLIHQSITGLYETRIDLSQLGGDGGEAAAKEAAAKEAAAKGGTLGDQGSRGSDPLPEPRVTLTVEGIPTEFLVNTGAEHSVLTKPMGKMGSKRTVVAGATGSKVYPWTTKRLLKIGQKQVTHSFLVIPECPAPLLGRDLLTKLKAQIQFSTEGPQVTWEDRPAMCLVLNLEEEYRLHEKPVPPSIDPSWLQLFPMVWAEKAGMGLANQVPPVVVELKSDASPVAVRQYPMSKEAREGIRPHIQRFLDLGILVPCQSPWNTPLLPVKKPGTNDYRPVQDLREVNKRVQDIHPTVPNPYNLLSSLPPSHTWYSVLDLKDAFFCLKLHPNSQPLFAFEWRDPEKGNTGQLTWTRLPQGFKNSPTLFNEALHRDLASFRALNPQVVMLQYVDDLLVAAPTYRDCKEGTRRLLQELSKLGYRVSAKKAQLCREEVTYLGYLLKGGKRWLTPARKATVMKIPTPTTPRQVREFLGKAGFCRLFIPGFASLAAPLYPLTRPKVPFTWTEAHQEAFGRIKEALLSAPALALPDLTKPFALYVDEKEGVARGVLTQTLGPWRRPVAYLSKKLDPVASGWPTCLKAIAAVALLLKDADKLTLGQNVLVIAPHNLESIVRQPPDRWMTNARMTHYQSLLLNERVSFAPPAILNPATLLPVESDDTPIHICSEILAEETGTRPDLRDQPLPGVPAWYTDGSSFIMDGRRQAGAAIVDNKRTVWASNLPEGTSAQKAELIALTQALRLAEGKSINIYTDSRYAFATAHVHGAIYKQRGWLTSAGKDIKNKEEILALLEAIHLPKRVAIIHCPGHQRGTDPVATGNRKADEAAKQAAQSTRILTETTKNAGKRTADGSEFEKRTADGSEFESPKKKAKVE

SEQ ID NO: 6393 - protein, 2100 aa, synthetic construct
MPAAKRVKLDGGDKKYSIGLDIGTNSVGWAVITDEYKVPSKKFKVLGNTDRHSIKKNLIGALLFDSGETAEATRLKRTARRRYTRRKNRICYLQEIFSNEMAKVDDSFFHRLEESFLVEEDKKHERHPIFGNIVDEVAYHEKYPTIYHLRKKLVDSTDKADLRLIYLALAHMIKFRGHFLIEGDLNPDNSDVDKLFIQLVQTYNQLFEENPINASGVDAKAILSARLSKSRRLENLIAQLPGEKKNGLFGNLIALSLGLTPNFKSNFDLAEDAKLQLSKDTYDDDLDNLLAQIGDQYADLFLAAKNLSDAILLSDILRVNTEITKAPLSASMIKRYDEHHQDLTLLKALVRQQLPEKYKEIFFDQSKNGYAGYIDGGASQEEFYKFIKPILEKMDGTEELLVKLNREDLLRKQRTFDNGSIPHQIHLGELHAILRRQEDFYPFLKDNREKIEKILTFRIPYYVGPLARGNSRFAWMTRKSEETITPWNFEEVVDKGASAQSFIERMTNFDKNLPNEKVLPKHSLLYEYFTVYNELTKVKYVTEGMRKPAFLSGEQKKAIVDLLFKTNRKVTVKQLKEDYFKKIECFDSVEISGVEDRFNASLGTYHDLLKIIKDKDFLDNEENEDILEDIVLTLTLFEDREMIEERLKTYAHLFDDKVMKQLKRRRYTGWGRLSRKLINGIRDKQSGKTILDFLKSDGFANRNFMQLIHDDSLTFKEDIQKAQVSGQGDSLHEHIANLAGSPAIKKGILQTVKVVDELVKVMGRHKPENIVIEMARENQTTQKGQKNSRERMKRIEEGIKELGSQILKEHPVENTQLQNEKLYLYYLQNGRDMYVDQELDINRLSDYDVDHIVPQSFLKDDSIDNKVLTRSDKARGKSDNVPSEEVVKKMKNYWRQLLNAKLITQRKFDNLTKAERGGLSELDKAGFIKRQLVETRQITKHVAQILDSRMNTKYDENDKLIREVKVITLKSKLVSDFRKDFQFYKVREINNYHHAHDAYLNAVVGTALIKKYPKLESEFVYGDYKVYDVRKMIAKSEQEIGKATAKYFFYSNIMNFFKTEITLANGEIRKRPLIETNGETGEIVWDKGRDFATVRKVLSMPQVNIVKKTEVQTGGFSKESILPKRNSDKLIARKKDWDPKKYGGFDSPTVAYSVLVVAKVEKGKSKKLKSVKELLGITIMERSSFEKNPIDFLEAKGYKEVKKDLIIKLPKYSLFELENGRKRMLASAGELQKGNELALPSKYVNFLYLASHYEKLKGSPEDNEQKQLFVEQHKHYLDEIIEQISEFSKRVILADANLDKVLSAYNKHRDKPIREQAENIIHLFTLTNLGAPAAFKYFDTTIDRKRYTSTKEVLDATLIHQSITGLYETRIDLSQLGGDGGEAAAKEAAAKEAAAKGGLGIEDEYRLHETSTEPDVSLGSTWLSDFPQAWAETGGMGLAVRQAPLIIPLKATSTPVSIQQYPMSHEARLGIKPHIQRLLDQGILVPCQSPWNTPLLPVKKPGTNDYRPVQDLREVNKRVEDIHPTVPNPYNLLSGLPPSHQWYTVLDLKDAFFCLRLHPTSQPLFAFEWRDPGMGISGQLTWTRLPQGFKNSPTLFNEALHRDLADFRIQHPDLILLQYVDDILLAATSELDCQQGTRALLQTLGDLGYRASAKKAQICQKQVKYLGYLLREGQRWLTEARKETVMGQPVPKTPRQLREFLGKAGFCRLFIPGFAEMAAPLYPLTKPGTLFSWGPDQQKAYQEIKQALLTAPALGLPDLTKPFELFVDEKQGYAKGVLTQKLGPWRRPVAYLSKKLDPVAAGWPPCLRMVAAIAVLTKDAGKLTMGQPLVILAPHAVEALVKQPPDRWLSNARMTHYQAMLLDTDRVQFGPVVALNPATLLPLPEEGAPHDCLEILAETHGTRPDLTDQPIPDADHTWYTDGSSFLQEGQRKAGAAVTTETEVIWAGALPAGTSAQRAELIALTQALKMAEGKRLNVYTDSRYAFATAHIHGEIYRRRGWLTSEGREIKNKSEILALLKALFLPKRLSIIHCLGHQKGDSAEARGNRLADQAAREAAIKTPPDTSTLLIAGKRTADGSEFEKRTADGSEFESPKKKAKVE

SEQ ID NO: 6394 - protein, 2100 aa, synthetic construct; identical to SEQ ID NO: 6393

SEQ ID NO: 6395 - protein, 2100 aa, synthetic construct
MPAAKRVKLDGGDKKYSIGLDIGTNSVGWAVITDEYKVPSKKFKVLGNTDRHSIKKNLIGALLFDSGETAEATRLKRTARRRYTRRKNRICYLQEIFSNEMAKVDDSFFHRLEESFLVEEDKKHERHPIFGNIVDEVAYHEKYPTIYHLRKKLVDSTDKADLRLIYLALAHMIKFRGHFLIEGDLNPDNSDVDKLFIQLVQTYNQLFEENPINASGVDAKAILSARLSKSRRLENLIAQLPGEKKNGLFGNLIALSLGLTPNFKSNFDLAEDAKLQLSKDTYDDDLDNLLAQIGDQYADLFLAAKNLSDAILLSDILRVNTEITKAPLSASMIKRYDEHHQDLTLLKALVRQQLPEKYKEIFFDQSKNGYAGYIDGGASQEEFYKFIKPILEKMDGTEELLVKLNREDLLRKQRTFDNGSIPHQIHLGELHAILRRQEDFYPFLKDNREKIEKILTFRIPYYVGPLARGNSRFAWMTRKSEETITPWNFEEVVDKGASAQSFIERMTNFDKNLPNEKVLPKHSLLYEYFTVYNELTKVKYVTEGMRKPAFLSGEQKKAIVDLLFKTNRKVTVKQLKEDYFKKIECFDSVEISGVEDRFNASLGTYHDLLKIIKDKDFLDNEENEDILEDIVLTLTLFEDREMIEERLKTYAHLFDDKVMKQLKRRRYTGWGRLSRKLINGIRDKQSGKTILDFLKSDGFANRNFMQLIHDDSLTFKEDIQKAQVSGQGDSLHEHIANLAGSPAIKKGILQTVKVVDELVKVMGRHKPENIVIEMARENQTTQKGQKNSRERMKRIEEGIKELGSQILKEHPVENTQLQNEKLYLYYLQNGRDMYVDQELDINRLSDYDVDHIVPQSFLKDDSIDNKVLTRSDKARGKSDNVPSEEVVKKMKNYWRQLLNAKLITQRKFDNLTKAERGGLSELDKAGFIKRQLVETRQITKHVAQILDSRMNTKYDENDKLIREVKVITLKSKLVSDFRKDFQFYKVREINNYHHAHDAYLNAVVGTALIKKYPKLESEFVYGDYKVYDVRKMIAKSEQEIGKATAKYFFYSNIMNFFKTEITLANGEIRKRPLIETNGETGEIVWDKGRDFATVRKVLSMPQVNIVKKTEVQTGGFSKESILPKRNSDKLIARKKDWDPKKYGGFDSPTVAYSVLVVAKVEKGKSKKLKSVKELLGITIMERSSFEKNPIDFLEAKGYKEVKKDLIIKLPKYSLFELENGRKRMLASAGELQKGNELALPSKYVNFLYLASHYEKLKGSPEDNEQKQLFVEQHKHYLDEIIEQISEFSKRVILADANLDKVLSAYNKHRDKPIREQAENIIHLFTLTNLGAPAAFKYFDTTIDRKRYTSTKEVLDATLIHQSITGLYETRIDLSQLGGDGGEAAAKEAAAKEAAAKGGTLNIEDEYRLHETSKGPDVPLGSTWLSDFPQAWAETGGMGLAVRQAPLIIPLKATSTPVSIKQYPMSQEARLGIKPHIQRLLDQGILVPCQSPWNTPLLPVKKPGTNDYRPVQDLREVNKRVEDIHPTVPNPYNLLSGLPPSHQWYTVLDLKDAFFCLRLHPTSQSLFAFEWRDPEMGISGQLTWTRLPQGFKNSPTLFNEALHRDLADFRIQHPDLILLQYVDDLLLAATSELDCQQGTRALLQTLGDLGYRASAKKAQICQKQVKYLGYLLKEGQRWLTEARKETVMGQPTPKTPRQLREFLGTAGFCRLWIPGFAEMAAPLYPLTKPGTLFEWGPDQQKAYQEIKQALLTAPALGLPDLTKPFELFVDEKQGYAKGVLTQKLGPWRRPVAYLSKKLDPVAAGWPPCLRMVAAIAVLTKDAGKLTMGQPLVILAPHAVEALVKQPPDRWLSNARMTHYQALLLDTDRVQFGPIVALNPATLLPLPEEGLQHDCLDILAEAHGTRPDLTDQPLPDADHTWYTDGSSFLQEGQRKAGAAVTTETEVVWAKALPAGTSAQRAELIALTQALKMAEGKKLNVYTDSRYAFATAHIHGEIYRRRGWLTSEGKEIKNKDEILALLKALFLPKRLSIIHCPGHQKGNRAEARGNRMADQAAREVATRETPETSTLLAGKRTADGSEFEKRTADGSEFESPKKKAKVE

SEQ ID NO: 6396 - protein, 2100 aa, synthetic construct
MPAAKRVKLDGGDKKYSIGLDIGTNSVGWAVITDEYKVPSKKFKVLGNTDRHSIKKNLIGALLFDSGETAEATRLKRTARRRYTRRKNRICYLQEIFSNEMAKVDDSFFHRLEESFLVEEDKKHERHPIFGNIVDEVAYHEKYPTIYHLRKKLVDSTDKADLRLIYLALAHMIKFRGHFLIEGDLNPDNSDVDKLFIQLVQTYNQLFEENPINASGVDAKAILSARLSKSRRLENLIAQLPGEKKNGLFGNLIALSLGLTPNFKSNFDLAEDAKLQLSKDTYDDDLDNLLAQIGDQYADLFLAAKNLSDAILLSDILRVNTEITKAPLSASMIKRYDEHHQDLTLLKALVRQQLPEKYKEIFFDQSKNGYAGYIDGGASQEEFYKFIKPILEKMDGTEELLVKLNREDLLRKQRTFDNGSIPHQIHLGELHAILRRQEDFYPFLKDNREKIEKILTFRIPYYVGPLARGNSRFAWMTRKSEETITPWNFEEVVDKGASAQSFIERMTNFDKNLPNEKVLPKHSLLYEYFTVYNELTKVKYVTEGMRKPAFLSGEQKKAIVDLLFKTNRKVTVKQLKEDYFKKIECFDSVEISGVEDRFNASLGTYHDLLKIIKDKDFLDNEENEDILEDIVLTLTLFEDREMIEERLKTYAHLFDDKVMKQLKRRRYTGWGRLSRKLINGIRDKQSGKTILDFLKSDGFANRNFMQLIHDDSLTFKEDIQKAQVSGQGDSLHEHIANLAGSPAIKKGILQTVKVVDELVKVMGRHKPENIVIEMARENQTTQKGQKNSRERMKRIEEGIKELGSQILKEHPVENTQLQNEKLYLYYLQNGRDMYVDQELDINRLSDYDVDHIVPQSFLKDDSIDNKVLTRSDKARGKSDNVPSEEVVKKMKNYWRQLLNAKLITQRKFDNLTKAERGGLSELDKAGFIKRQLVETRQITKHVAQILDSRMNTKYDENDKLIREVKVITLKSKLVSDFRKDFQFYKVREINNYHHAHDAYLNAVVGTALIKKYPKLESEFVYGDYKVYDVRKMIAKSEQEIGKATAKYFFYSNIMNFFKTEITLANGEIRKRPLIETNGETGEIVWDKGRDFATVRKVLSMPQVNIVKKTEVQTGGFSKESILPKRNSDKLIARKKDWDPKKYGGFDSPTVAYSVLVVAKVEKGKSKKLKSVKELLGITIMERSSFEKNPIDFLEAKGYKEVKKDLIIKLPKYSLFELENGRKRMLASAGELQKGNELALPSKYVNFLYLASHYEKLKGSPEDNEQKQLFVEQHKHYLDEIIEQISEFSKRVILADANLDKVLSAYNKHRDKPIREQAENIIHLFTLTNLGAPAAFKYFDTTIDRKRYTSTKEVLDATLIHQSITGLYETRIDLSQLGGDGGEAAAKEAAAKEAAAKGGTLNIEDEYRLHEISTEPDVSPGSTWLSDFPQAWAETGGMGLAVRQAPLIIPLKATSTPVSIKQYPMSQEAKLGIKPHIQRLLDQGILVPCQSPWNTPLLPVKKPGTNDYRPVQGLREVNKRVEDIHPTVPNPYNLLSGLPTSHRWYTVLDLKDAFFCLRLHPTSQPLFASEWRDPGMGISGQLTWTRLPQGFKNSPTLFDEALHRGLADFRIQHPDLILLQYVDDLLLAATSELDCQQGTRALLKTLGNLGYRASAKKAQICQKQVKYLGYLLREGQRWLTEARKETVMGQPTPKTPRQLREFLGTAGFCRLWIPRFAEMAAPLYPLTKTGTLFNWGPDQQKAYHEIKQALLTAPALGLPDLTKPFELFVDEKQGYAKGVLTQKLGPWRRPVAYLSKKLDPVAAGWPPCLRMVAAIAVLTKDAGKLTMGQPLVILAPHAVEALVKQPPDRWLSNARMTHYQAMLLDTDRVQFGPVVALNPATLLPLPEEGAPHDCLEILAETHGTEPDLTDQPIPDADHTWYTDGSSFLQEGQRKAGAAVTTETEVIWARALPAGTSAQRAELIALTQALKMAEGKRLNVYTDSRYAFATAHIHGEIYKRRGLLTSEGREIKNKSEILALLKALFLPKRLSIIHCLGHQKGDSAEARGNRLADQAAREAAIKTPPDTSTLLAGKRTADGSEFEKRTADGSEFESPKKKAKVE

SEQ ID NO: 6397 - protein, 2120 aa, synthetic construct
MPAAKRVKLDGGDKKYSIGLDIGTNSVGWAVITDEYKVPSKKFKVLGNTDRHSIKKNLIGALLFDSGETAEATRLKRTARRRYTRRKNRICYLQEIFSNEMAKVDDSFFHRLEESFLVEEDKKHERHPIFGNIVDEVAYHEKYPTIYHLRKKLVDSTDKADLRLIYLALAHMIKFRGHFLIEGDLNPDNSDVDKLFIQLVQTYNQLFEENPINASGVDAKAILSARLSKSRRLENLIAQLPGEKKNGLFGNLIALSLGLTPNFKSNFDLAEDAKLQLSKDTYDDDLDNLLAQIGDQYADLFLAAKNLSDAILLSDILRVNTEITKAPLSASMIKRYDEHHQDLTLLKALVRQQLPEKYKEIFFDQSKNGYAGYIDGGASQEEFYKFIKPILEKMDGTEELLVKLNREDLLRKQRTFDNGSIPHQIHLGELHAILRRQEDFYPFLKDNREKIEKILTFRIPYYVGPLARGNSRFAWMTRKSEETITPWNFEEVVDKGASAQSFIERMTNFDKNLPNEKVLPKHSLLYEYFTVYNELTKVKYVTEGMRKPAFLSGEQKKAIVDLLFKTNRKVTVKQLKEDYFKKIECFDSVEISGVEDRFNASLGTYHDLLKIIKDKDFLDNEENEDILEDIVLTLTLFEDREMIEERLKTYAHLFDDKVMKQLKRRRYTGWGRLSRKLINGIRDKQSGKTILDFLKSDGFANRNFMQLIHDDSLTFKEDIQKAQVSGQGDSLHEHIANLAGSPAIKKGILQTVKVVDELVKVMGRHKPENIVIEMARENQTTQKGQKNSRERMKRIEEGIKELGSQILKEHPVENTQLQNEKLYLYYLQNGRDMYVDQELDINRLSDYDVDHIVPQSFLKDDSIDNKVLTRSDKARGKSDNVPSEEVVKKMKNYWRQLLNAKLITQRKFDNLTKAERGGLSELDKAGFIKRQLVETRQITKHVAQILDSRMNTKYDENDKLIREVKVITLKSKLVSDFRKDFQFYKVREINNYHHAHDAYLNAVVGTALIKKYPKLESEFVYGDYKVYDVRKMIAKSEQEIGKATAKYFFYSNIMNFFKTEITLANGEIRKRPLIETNGETGEIVWDKGRDFATVRKVLSMPQVNIVKKTEVQTGGFSKESILPKRNSDKLIARKKDWDPKKYGGFDSPTVAYSVLVVAKVEKGKSKKLKSVKELLGITIMERSSFEKNPIDFLEAKGYKEVKKDLIIKLPKYSLFELENGRKRMLASAGELQKGNELALPSKYVNFLYLASHYEKLKGSPEDNEQKQLFVEQHKHYLDEIIEQISEFSKRVILADANLDKVLSAYNKHRDKPIREQAENIIHLFTLTNLGAPAAFKYFDTTIDRKRYTSTKEVLDATLIHQSITGLYETRIDLSQLGGDGGEAAAKEAAAKEAAAKGGVQEISDSRPMLHIYLNGRRFLGLLDTGADKTCIAGRDWPANWPIHQTESSLQGLGMACGVARSSQPLRWQHEDKSGIIHPFVIPTLPFTLWGRDIMKDIKVRLMTDSPDDSQDLMIGAIESNLFADQISWKSDQPVWLNQWPLKQEKLQALQQLVTEQLQLGHLEESNSPWNTPVFVIKKKSGKWRLLQDLRAVNATMHDMGALQPGLPSPVAVPKGWEIIIIDLQDCFFNIKLHPEDCKRFAFSVPSPNFKRPYQRFQWKVLPQGMKNSPTLCQKFVDKAILTVRDKYQDSYIVHYMDDILLAHPSRSIVDEILTSMIQALNKHGLVVSTEKIQKYDNLKYLGTHIQGDSVSYQKLQIRTDKLRTLNDFQKLLGNINWIRPFLKLTTGELKPLFEILNGDSNPISTRKLTPEACKALQLMNERLSTARVKRLDLSQPWSLCILKTEYTPTACLWQDGVVEWIHLPHISPKVITPYDIFCTQLIIKGRHRSKELFSKDPDYIVVPYTKVQFDLLLQEKEDWPISLLGFLGEVHFHLPKDPLLTFTLQTAIIFPHMTSTTPLEKGIVIFTDGSANGRSVTYIQGREPIIKENTQNTAQQAEIVAVITAFEEVSQPFNLYTDSKYVTGLFPEIETATLSPRTKIYTELKHLQRLIHKRQEKFYIGHIRGHTGLPGPLAQGNAYADSLTRILTAAGKRTADGSEFEKRTADGSEFESPKKKAKVE

SEQ ID NO: 6398 - protein, 2091 aa, synthetic construct
MPAAKRVKLDGGDKKYSIGLDIGTNSVGWAVITDEYKVPSKKFKVLGNTDRHSIKKNLIGALLFDSGETAEATRLKRTARRRYTRRKNRICYLQEIFSNEMAKVDDSFFHRLEESFLVEEDKKHERHPIFGNIVDEVAYHEKYPTIYHLRKKLVDSTDKADLRLIYLALAHMIKFRGHFLIEGDLNPDNSDVDKLFIQLVQTYNQLFEENPINASGVDAKAILSARLSKSRRLENLIAQLPGEKKNGLFGNLIALSLGLTPNFKSNFDLAEDAKLQLSKDTYDDDLDNLLAQIGDQYADLFLAAKNLSDAILLSDILRVNTEITKAPLSASMIKRYDEHHQDLTLLKALVRQQLPEKYKEIFFDQSKNGYAGYIDGGASQEEFYKFIKPILEKMDGTEELLVKLNREDLLRKQRTFDNGSIPHQIHLGELHAILRRQEDFYPFLKDNREKIEKILTFRIPYYVGPLARGNSRFAWMTRKSEETITPWNFEEVVDKGASAQSFIERMTNFDKNLPNEKVLPKHSLLYEYFTVYNELTKVKYVTEGMRKPAFLSGEQKKAIVDLLFKTNRKVTVKQLKEDYFKKIECFDSVEISGVEDRFNASLGTYHDLLKIIKDKDFLDNEENEDILEDIVLTLTLFEDREMIEERLKTYAHLFDDKVMKQLKRRRYTGWGRLSRKLINGIRDKQSGKTILDFLKSDGFANRNFMQLIHDDSLTFKEDIQKAQVSGQGDSLHEHIANLAGSPAIKKGILQTVKVVDELVKVMGRHKPENIVIEMARENQTTQKGQKNSRERMKRIEEGIKELGSQILKEHPVENTQLQNEKLYLYYLQNGRDMYVDQELDINRLSDYDVDHIVPQSFLKDDSIDNKVLTRSDKARGKSDNVPSEEVVKKMKNYWRQLLNAKLITQRKFDNLTKAERGGLSELDKAGFIKRQLVETRQITKHVAQILDSRMNTKYDENDKLIREVKVITLKSKLVSDFRKDFQFYKVREINNYHHAHDAYLNAVVGTALIKKYPKLESEFVYGDYKVYDVRKMIAKSEQEIGKATAKYFFYSNIMNFFKTEITLANGEIRKRPLIETNGETGEIVWDKGRDFATVRKVLSMPQVNIVKKTEVQTGGFSKESILPKRNSDKLIARKKDWDPKKYGGFDSPTVAYSVLVVAKVEKGKSKKLKSVKELLGITIMERSSFEKNPIDFLEAKGYKEVKKDLIIKLPKYSLFELENGRKRMLASAGELQKGNELALPSKYVNFLYLASHYEKLKGSPEDNEQKQLFVEQHKHYLDEIIEQISEFSKRVILADANLDKVLSAYNKHRDKPIREQAENIIHLFTLTNLGAPAAFKYFDTTIDRKRYTSTKEVLDATLIHQSITGLYETRIDLSQLGGDGGEAAAKEAAAKEAAAKGGIPWLMKKPLQLTTLVPLQEYEERLLKQTMLTGSYKEKLQSLFLKYDALWQHWENQVGHRRIKPHHIATGTVNPRPQKQYPINPKAKASIQTVINDLLKQGVLIQQNSIMNTPVYPVPKPDGKWRMVLDYREVNKTIPLIAAQNQHSAGILSSIFRGKYKTTLDLSNGFWAHSITPESYWLTAFTWLGQQYCWTRLPQGFLNSPALFNADVVDLLKEVPNVQVYVDDIYISHDDPREHLEQLEKVFSLLLNAGYVVSLKKSEIAQHEVEFLGFNITKEGRGLTETFKQKLLNITPPRDLKQLQSILGKLNFARNFIPNFSELVKPLYNIIATAPGKYITWTTDNSQQLQNIISMLNSAENLEERNPEVRLIMKVNTSPSAGYIRFYNEFAKRPIMYLNYVYTKAEVKFTNTEKLLTTIHKGLIKALDLGMGQEILVYSPIVSMTKIQKTPLPERKALPIRWITWMSYLEDPRIQFHYDKTLPELQQVPTVTDDIIAKIKHPSEFSMVFYTDGSAIKHPNVNKSHNAGMGIAQVQFKPEFTVINTWSIPLGDHTAQLAEVAAVEFACKKALKIDGPVLIVTDSFYVAESVNKELPYWQSNGFFNNKKKPLKHVSKWKSIADCIQLKPDIIIIHEKGHQPTASTFHTEGNNLADKLATQGSYVVNAGKRTADGSEFEKRTADGSEFESPKKKAKVE

SEQ ID NO: 6399 - protein, 2180 aa, synthetic construct
MPAAKRVKLDGGDKKYSIGLDIGTNSVGWAVITDEYKVPSKKFKVLGNTDRHSIKKNLIGALLFDSGETAEATRLKRTARRRYTRRKNRICYLQEIFSNEMAKVDDSFFHRLEESFLVEEDKKHERHPIFGNIVDEVAYHEKYPTIYHLRKKLVDSTDKADLRLIYLALAHMIKFRGHFLIEGDLNPDNSDVDKLFIQLVQTYNQLFEENPINASGVDAKAILSARLSKSRRLENLIAQLPGEKKNGLFGNLIALSLGLTPNFKSNFDLAEDAKLQLSKDTYDDDLDNLLAQIGDQYADLFLAAKNLSDAILLSDILRVNTEITKAPLSASMIKRYDEHHQDLTLLKALVRQQLPEKYKEIFFDQSKNGYAGYIDGGASQEEFYKFIKPILEKMDGTEELLVKLNREDLLRKQRTFDNGSIPHQIHLGELHAILRRQEDFYPFLKDNREKIEKILTFRIPYYVGPLARGNSRFAWMTRKSEETITPWNFEEVVDKGASAQSFIERMTNFDKNLPNEKVLPKHSLLYEYFTVYNELTKVKYVTEGMRKPAFLSGEQKKAIVDLLFKTNRKVTVKQLKEDYFKKIECFDSVEISGVEDRFNASLGTYHDLLKIIKDKDFLDNEENEDILEDIVLTLTLFEDREMIEERLKTYAHLFDDKVMKQLKRRRYTGWGRLSRKLINGIRDKQSGKTILDFLKSDGFANRNFMQLIHDDSLTFKEDIQKAQVSGQGDSLHEHIANLAGSPAIKKGILQTVKVVDELVKVMGRHKPENIVIEMARENQTTQKGQKNSRERMKRIEEGIKELGSQILKEHPVENTQLQNEKLYLYYLQNGRDMYVDQELDINRLSDYDVDHIVPQSFLKDDSIDNKVLTRSDKARGKSDNVPSEEVVKKMKNYWRQLLNAKLITQRKFDNLTKAERGGLSELDKAGFIKRQLVETRQITKHVAQILDSRMNTKYDENDKLIREVKVITLKSKLVSDFRKDFQFYKVREINNYHHAHDAYLNAVVGTALIKKYPKLESEFVYGDYKVYDVRKMIAKSEQEIGKATAKYFFYSNIMNFFKTEITLANGEIRKRPLIETNGETGEIVWDKGRDFATVRKVLSMPQVNIVKKTEVQTGGFSKESILPKRNSDKLIARKKDWDPKKYGGFDSPTVAYSVLVVAKVEKGKSKKLKSVKELLGITIMERSSFEKNPIDFLEAKGYKEVKKDLIIKLPKYSLFELENGRKRMLASAGELQKGNELALPSKYVNFLYLASHYEKLKGSPEDNEQKQLFVEQHKHYLDEIIEQISEFSKRVILADANLDKVLSAYNKHRDKPIREQAENIIHLFTLTNLGAPAAFKYFDTTIDRKRYTSTKEVLDATLIHQSITGLYETRIDLSQLGGDGGEAAAKEAAAKEAAAKGGMDPLQLLQPLEAEIKGTKLKAHWNSGATITCVPQAFLEEEVPIKNIWIKTIHGEKEQPVYYLTFKIQGRKVEAEVISSPYDYILVSPSDIPWLMKKPLQLTTLVPLQEYEERLLKQTMLTGSYKEKLQSLFLKYDALWQHWENQVGHRRIKPHHIATGTVNPRPQKQYPINPKAKASIQTVINDLLKQGVLIQQNSIMNTPVYPVPKPDGKWRMVLDYREVNKTIPLIAAQNQHSAGILSSIFRGKYKTTLDLSNGFWAHSITPESYWLTAFTWLGQQYCWTRLPQGFLNSPALFNADVVDLLKEVPNVQVYVDDIYISHDDPREHLEQLEKVFSLLLNAGYVVSLKKSEIAQHEVEFLGFNITKEGRGLTETFKQKLLNITPPRDLKQLQSILGKLNFARNFIPNFSELVKPLYNIIATAPGKYITWTTDNSQQLQNIISMLNSAENLEERNPEVRLIMKVNTSPSAGYIRFYNEFAKRPIMYLNYVYTKAEVKFTNTEKLLTTIHKGLIKALDLGMGQEILVYSPIVSMTKIQKTPLPERKALPIRWITWMSYLEDPRIQFHYDKTLPELQQVPTVTDDIIAKIKHPSEFSMVFYTDGSAIKHPNVNKSHNAGMGIAQVQFKPEFTVINTWSIPLGDHTAQLAEVAAVEFACKKALKIDGPVLIVTDSFYVAESVNKELPYWQSNGFFNNKKKPLKHVSKWKSIADCIQLKPDIIIIHEKGHQPTASTFHTEGNNLADKLATQGSYVVNAGKRTADGSEFEKRTADGSEFESPKKKAKVE

SEQ ID NO: 6400 - protein, 2180 aa, synthetic construct
MPAAKRVKLDGGDKKYSIGLDIGTNSVGWAVITDEYKVPSKKFKVLGNTDRHSIKKNLIGALLFDSGETAEATRLKRTARRRYTRRKNRICYLQEIFSNEMAKVDDSFFHRLEESFLVEEDKKHERHPIFGNIVDEVAYHEKYPTIYHLRKKLVDSTDKADLRLIYLALAHMIKFRGHFLIEGDLNPDNSDVDKLFIQLVQTYNQLFEENPINASGVDAKAILSARLSKSRRLENLIAQLPGEKKNGLFGNLIALSLGLTPNFKSNFDLAEDAKLQLSKDTYDDDLDNLLAQIGDQYADLFLAAKNLSDAILLSDILRVNTEITKAPLSASMIKRYDEHHQDLTLLKALVRQQLPEKYKEIFFDQSKNGYAGYIDGGASQEEFYKFIKPILEKMDGTEELLVKLNREDLLRKQRTFDNGSIPHQIHLGELHAILRRQEDFYPFLKDNREKIEKILTFRIPYYVGPLARGNSRFAWMTRKSEETITPWNFEEVVDKGASAQSFIERMTNFDKNLPNEKVLPKHSLLYEYFTVYNELTKVKYVTEGMRKPAFLSGEQKKAIVDLLFKTNRKVTVKQLKEDYFKKIECFDSVEISGVEDRFNASLGTYHDLLKIIKDKDFLDNEENEDILEDIVLTLTLFEDREMIEERLKTYAHLFDDKVMKQLKRRRYTGWGRLSRKLINGIRDKQSGKTILDFLKSDGFANRNFMQLIHDDSLTFKEDIQKAQVSGQGDSLHEHIANLAGSPAIKKGILQTVKVVDELVKVMGRHKPENIVIEMARENQTTQKGQKNSRERMKRIEEGIKELGSQILKEHPVENTQLQNEKLYLYYLQNGRDMYVDQELDINRLSDYDVDHIVPQSFLKDDSIDNKVLTRSDKARGKSDNVPSEEVVKKMKNYWRQLLNAKLITQRKFDNLTKAERGGLSELDKAGFIKRQLVETRQITKHVAQILDSRMNTKYDENDKLIREVKVITLKSKLVSDFRKDFQFYKVREINNYHHAHDAYLNAVVGTALIKKYPKLESEFVYGDYKVYDVRKMIAKSEQEIGKATAKYFFYSNIMNFFKTEITLANGEIRKRPLIETNGETGEIVWDKGRDFATVRKVLSMPQVNIVKKTEVQTGGFSKESILPKRNSDKLIARKKDWDPKKYGGFDSPTVAYSVLVVAKVEKGKSKKLKSVKELLGITIMERSSFEKNPIDFLEAKGYKEVKKDLIIKLPKYSLFELENGRKRMLASAGELQKGNELALPSKYVNFLYLASHYEKLKGSPEDNEQKQLFVEQHKHYLDEIIEQISEFSKRVILADANLDKVLSAYNKHRDKPIREQAENIIHLFTLTNLGAPAAFKYFDTTIDRKRYTSTKEVLDATLIHQSITGLYETRIDLSQLGGDGGEAAAKEAAAKEAAAKGGMNPLQLLQPLPAEVKGTKLLAHWNSGATITCIPESFLEDEQPIKQTLIKTIHGEKQQNVYYLTFKVKGRKVEAEVIASPYEYILLSPTDVPWLTQQPLQLTILVPLQEYQDRILNKTALPEEQKQQLKALFTKYDNLWQHWENQVGHRKIRPHNIATGDYPPRPQKQYPINPKAKPSIQIVIDDLLKQGVLTPQNSTMNTPVYPVPKPDGRWRMVLDYREVNKTIPLTAAQNQHSAGILATIVRQKYKTTLDLANGFWAHPITPDSYWLTAFTWQGKQYCWTRLPQGFLNSPALFTADAVDLLKEVPNVQVYVDDIYLSHDNPHEHIQQLEKVFQILLQAGYVVSLKKSEIGQRTVEFLGFNITKEGRGLTDTFKTKLLNVTPPKDLKQLQSILGLLNFARNFIPNFAELVQTLYNLIASSKGKYIEWTEDNTKQLNKVIEALNTASNLEERLPDQRLVIKVNTSPSAGYVRYYNESGKKPIMYLNYVFSKAELKFSMLEKLLTTMHKALIKAMDLAMGQEILVYSPIVSMTKIQKTPLPERKALPIRWITWMTYLEDPRIQFHYDKTLPELKHIPDVYTSSIPPLKHPSQYEGVFCTDGSAIKSPDPTKSNNAGMGIVHAIYNPEYKILNQWSIPLGHHTAQMAEIAAVEFACKKALKVPGPVLVITDSFYVAESANKELPYWKSNGFVNNKKEPLKHISKWKSIAECLSIKPDITIQHEKGHQPINTSIHTEGNALADKLATQGSYVVNAGKRTADGSEFEKRTADGSEFESPKKKAKVE

SEQ ID NO: 6401 - protein, 2098 aa, synthetic construct
MPAAKRVKLDGGDKKYSIGLDIGTNSVGWAVITDEYKVPSKKFKVLGNTDRHSIKKNLIGALLFDSGETAEATRLKRTARRRYTRRKNRICYLQEIFSNEMAKVDDSFFHRLEESFLVEEDKKHERHPIFGNIVDEVAYHEKYPTIYHLRKKLVDSTDKADLRLIYLALAHMIKFRGHFLIEGDLNPDNSDVDKLFIQLVQTYNQLFEENPINASGVDAKAILSARLSKSRRLENLIAQLPGEKKNGLFGNLIALSLGLTPNFKSNFDLAEDAKLQLSKDTYDDDLDNLLAQIGDQYADLFLAAKNLSDAILLSDILRVNTEITKAPLSASMIKRYDEHHQDLTLLKALVRQQLPEKYKEIFFDQSKNGYAGYIDGGASQEEFYKFIKPILEKMDGTEELLVKLNREDLLRKQRTFDNGSIPHQIHLGELHAILRRQEDFYPFLKDNREKIEKILTFRIPYYVGPLARGNSRFAWMTRKSEETITPWNFEEVVDKGASAQSFIERMTNFDKNLPNEKVLPKHSLLYEYFTVYNELTKVKYVTEGMRKPAFLSGEQKKAIVDLLFKTNRKVTVKQLKEDYFKKIECFDSVEISGVEDRFNASLGTYHDLLKIIKDKDFLDNEENEDILEDIVLTLTLFEDREMIEERLKTYAHLFDDKVMKQLKRRRYTGWGRLSRKLINGIRDKQSGKTILDFLKSDGFANRNFMQLIHDDSLTFKEDIQKAQVSGQGDSLHEHIANLAGSPAIKKGILQTVKVVDELVKVMGRHKPENIVIEMARENQTTQKGQKNSRERMKRIEEGIKELGSQILKEHPVENTQLQNEKLYLYYLQNGRDMYVDQELDINRLSDYDVDHIVPQSFLKDDSIDNKVLTRSDKARGKSDNVPSEEVVKKMKNYWRQLLNAKLITQRKFDNLTKAERGGLSELDKAGFIKRQLVETRQITKHVAQILDSRMNTKYDENDKLIREVKVITLKSKLVSDFRKDFQFYKVREINNYHHAHDAYLNAVVGTALIKKYPKLESEFVYGDYKVYDVRKMIAKSEQEIGKATAKYFFYSNIMNFFKTEITLANGEIRKRPLIETNGETGEIVWDKGRDFATVRKVLSMPQVNIVKKTEVQTGGFSKESILPKRNSDKLIARKKDWDPKKYGGFDSPTVAYSVLVVAKVEKGKSKKLKSVKELLGITIMERSSFEKNPIDFLEAKGYKEVKKDLIIKLPKYSLFELENGRKRMLASAGELQKGNELALPSKYVNFLYLASHYEKLKGSPEDNEQKQLFVEQHKHYLDEIIEQISEFSKRVILADANLDKVLSAYNKHRDKPIREQAENIIHLFTLTNLGAPAAFKYFDTTIDRKRYTSTKEVLDATLIHQSITGLYETRIDLSQLGGDGGEAAAKEAAAKEAAAKGGVLNLEEEYRLHEKPVPSSIDPSWLQLFPTVWAERAGMGLANQVPPVVVELRSGASPVAVRQYPMSKEAREGIRPHIQRFLDLGVLVPCQSPWNTPLLPVKKPGTNDYRPVQDLREINKRVQDIHPTVPNPYNLLSSLPPSHTWYSVLDLKDAFFCLKLHPNSQPLFAFEWRDPEKGNTGQLTWTRLPQGFKNSPTLFNEALHRDLAPFRALNPQVVLLQYVDDLLVAAPTYRDCKEGTQKLLQELSKLGYRVSAKKAQLCQKEVTYLGYLLKEGKRWLTPARKATVMKIPPPTTPRQVREFLGTAGFCRLWIPGFASLAAPLYPLTKPSIPFIWTEEHQKAFDRIKEALLSAPALALPDLTKPFTLYVDERAGVARGVLTQTLGPWRRPVAYLSKKLDPVASGWPTCLKAVAAVALLLKDADKLTLGQNVTVIASHSLESIVRQPPDRWMTNARMTHYQSLLLNERVSFAPPAVLNPATLLPVESEATPVHRCSEILAEETGTRRDLKDQPLPGVPAWYTDGSSFIAEGKRRAGAAIVDGKRTVWASSLPEGTSAQKAELVALTQALRLAEGKDINIYTDSRYAFATAHIHGAIYKQRGWLTSAGKDIKNKEEILALLEAIHLPKRVAIIHCPGHQKGNDPVATGNRRADEAAKQAALSTRVLAETTKPAGKRTADGSEFEKRTADGSEFESPKKKAKVE

SEQ ID NO: 6402 - protein, 2100 aa, synthetic construct; identical to SEQ ID NO: 4506

SEQ ID NO: 6403 - protein, 2107 aa, synthetic construct
MPAAKRVKLDGGDKKYSIGLDIGTNSVGWAVITDEYKVPSKKFKVLGNTDRHSIKKNLIGALLFDSGETAEATRLKRTARRRYTRRKNRICYLQEIFSNEMAKVDDSFFHRLEESFLVEEDKKHERHPIFGNIVDEVAYHEKYPTIYHLRKKLVDSTDKADLRLIYLALAHMIKFRGHFLIEGDLNPDNSDVDKLFIQLVQTYNQLFEENPINASGVDAKAILSARLSKSRRLENLIAQLPGEKKNGLFGNLIALSLGLTPNFKSNFDLAEDAKLQLSKDTYDDDLDNLLAQIGDQYADLFLAAKNLSDAILLSDILRVNTEITKAPLSASMIKRYDEHHQDLTLLKALVRQQLPEKYKEIFFDQSKNGYAGYIDGGASQEEFYKFIKPILEKMDGTEELLVKLNREDLLRKQRTFDNGSIPHQIHLGELHAILRRQEDFYPFLKDNREKIEKILTFRIPYYVGPLARGNSRFAWMTRKSEETITPWNFEEVVDKGASAQSFIERMTNFDKNLPNEKVLPKHSLLYEYFTVYNELTKVKYVTEGMRKPAFLSGEQKKAIVDLLFKTNRKVTVKQLKEDYFKKIECFDSVEISGVEDRFNASLGTYHDLLKIIKDKDFLDNEENEDILEDIVLTLTLFEDREMIEERLKTYAHLFDDKVMKQLKRRRYTGWGRLSRKLINGIRDKQSGKTILDFLKSDGFANRNFMQLIHDDSLTFKEDIQKAQVSGQGDSLHEHIANLAGSPAIKKGILQTVKVVDELVKVMGRHKPENIVIEMARENQTTQKGQKNSRERMKRIEEGIKELGSQILKEHPVENTQLQNEKLYLYYLQNGRDMYVDQELDINRLSDYDVDHIVPQSFLKDDSIDNKVLTRSDKARGKSDNVPSEEVVKKMKNYWRQLLNAKLITQRKFDNLTKAERGGLSELDKAGFIKRQLVETRQITKHVAQILDSRMNTKYDENDKLIREVKVITLKSKLVSDFRKDFQFYKVREINNYHHAHDAYLNAVVGTALIKKYPKLESEFVYGDYKVYDVRKMIAKSEQEIGKATAKYFFYSNIMNFFKTEITLANGEIRKRPLIETNGETGEIVWDKGRDFATVRKVLSMPQVNIVKKTEVQTGGFSKESILPKRNSDKLIARKKDWDPKKYGGFDSPTVAYSVLVVAKVEKGKSKKLKSVKELLGITIMERSSFEKNPIDFLEAKGYKEVKKDLIIKLPKYSLFELENGRKRMLASAGELQKGNELALPSKYVNFLYLASHYEKLKGSPEDNEQKQLFVEQHKHYLDEIIEQISEFSKRVILADANLDKVLSAYNKHRDKPIREQAENIIHLFTLTNLGAPAAFKYFDTTIDRKRYTSTKEVLDATLIHQSITGLYETRIDLSQLGGDGGEAAAKEAAAKEAAAKEAAAKGGTAPLEEEYRLFLEAPIQNVTLLEQWKREIPKVWAEINPPGLASTQAPIHVQLLSTALPVRVRQYPITLEAKRSLRETIRKFRAAGILRPVHSPWNTPLLPVRKSGTSEYRMVQDLREVNKRVETIHPTVPNPYTLLSLLPPDRIWYSVLDLKDAFFCIPLAPESQLIFAFEWADAEEGESGQLTWTRLPQGFKNSPTLFDEALNRDLQGFRLDHPSVSLLQYVDDLLIAADTQAACLSATRDLLMTLAELGYRVSGKKAQLCQEEVTYLGFKIHKGSRSLSNSRTQAILQIPVPKTKRQVREFLGTIGYCRLWIPGFAELAQPLYAATRGGNDPLVWGEKEEEAFQSLKLALTQPPALALPSLDKPFQLFVEETSGAAKGVLTQALGPWKRPVAYLSKRLDPVAAGWPRCLRAIAAAALLTREASKLTFGQDIEITSSHNLESLLRSPPDKWLTNARITQYQVLLLDPPRVRFKQTAALNPATLLPETDDTLPIHHCLDTLDSLTSTRPDLTDQPLAQAEATLFTDGSSYIRDGKRYAGAAVVTLDSVIWAEPLPIGTSAQKAELIALTKALEWSKDKSVNIYTDSRYAFATLHVHGMIYRERGLLTAGGKAIKNAPEILALLTAVWLPKRVAVMHCKGHQKDDAPTSTGNRRADEVAREVAIRPLSTQATISAGKRTADGSEFEKRTADGSEFESPKKKAKVE

SEQ ID NO: 6404 - protein, 2107 aa, synthetic construct
MPAAKRVKLDGGDKKYSIGLDIGTNSVGWAVITDEYKVPSKKFKVLGNTDRHSIKKNLIGALLFDSGETAEATRLKRTARRRYTRRKNRICYLQEIFSNEMAKVDDSFFHRLEESFLVEEDKKHERHPIFGNIVDEVAYHEKYPTIYHLRKKLVDSTDKADLRLIYLALAHMIKFRGHFLIEGDLNPDNSDVDKLFIQLVQTYNQLFEENPINASGVDAKAILSARLSKSRRLENLIAQLPGEKKNGLFGNLIALSLGLTPNFKSNFDLAEDAKLQLSKDTYDDDLDNLLAQIGDQYADLFLAAKNLSDAILLSDILRVNTEITKAPLSASMIKRYDEHHQDLTLLKALVRQQLPEKYKEIFFDQSKNGYAGYIDGGASQEEFYKFIKPILEKMDGTEELLVKLNREDLLRKQRTFDNGSIPHQIHLGELHAILRRQEDFYPFLKDNREKIEKILTFRIPYYVGPLARGNSRFAWMTRKSEETITPWNFEEVVDKGASAQSFIERMTNFDKNLPNEKVLPKHSLLYEYFTVYNELTKVKYVTEGMRKPAFLSGEQKKAIVDLLFKTNRKVTVKQLKEDYFKKIECFDSVEISGVEDRFNASLGTYHDLLKIIKDKDFLDNEENEDILEDIVLTLTLFEDREMIEERLKTYAHLFDDKVMKQLKRRRYTGWGRLSRKLINGIRDKQSGKTILDFLKSDGFANRNFMQLIHDDSLTFKEDIQKAQVSGQGDSLHEHIANLAGSPAIKKGILQTVKVVDELVKVMGRHKPENIVIEMARENQTTQKGQKNSRERMKRIEEGIKELGSQILKEHPVENTQLQNEKLYLYYLQNGRDMYVDQELDINRLSDYDVDHIVPQSFLKDDSIDNKVLTRSDKARGKSDNVPSEEVVKKMKNYWRQLLNAKLITQRKFDNLTKAERGGLSELDKAGFIKRQLVETRQITKHVAQILDSRMNTKYDENDKLIREVKVITLKSKLVSDFRKDFQFYKVREINNYHHAHDAYLNAVVGTALIKKYPKLESEFVYGDYKVYDVRKMIAKSEQEIGKATAKYFFYSNIMNFFKTEITLANGEIRKRPLIETNGETGEIVWDKGRDFATVRKVLSMPQVNIVKKTEVQTGGFSKESILPKRNSDKLIARKKDWDPKKYGGFDSPTVAYSVLVVAKVEKGKSKKLKSVKELLGITIMERSSFEKNPIDFLEAKGYKEVKKDLIIKLPKYSLFELENGRKRMLASAGELQKGNELALPSKYVNFLYLASHYEKLKGSPEDNEQKQLFVEQHKHYLDEIIEQISEFSKRVILADANLDKVLSAYNKHRDKPIREQAENIIHLFTLTNLGAPAAFKYFDTTIDRKRYTSTKEVLDATLIHQSITGLYETRIDLSQLGGDGGEAAAKEAAAKEAAAKEAAAKGGTAPLEEEYRLFLEAPIQNVTLLEQWKREIPKVWAEINPPGLASTQAPIHVQLLSTALPVRVRQYPITLEAKRSLRETIRKFRAAGILRPVHSPWNTPLLPVRKSGTSEYRMVQDLREVNKRVETIHPTVPNPYTLLSLLPPDRIWYSVLDLKDAFFCIPLAPESQLIFAFEWADAEEGESGQLTWTRLPQGFKNSPTLFNEALNRDLQGFRLDHPSVSLLQYVDDLLIAADTQAACLSATRDLLMTLAELGYRVSGKKAQLCQEEVTYLGFKIHKGSRSLSNSRTQAILQIPVPKTKRQVREFLGKIGYCRLFIPGFAELAQPLYAATRPGNDPLVWGEKEEEAFQSLKLALTQPPALALPSLDKPFQLFVEETSGAAKGVLTQALGPWKRPVAYLSKRLDPVAAGWPRCLRAIAAAALLTREASKLTFGQDIEITSSHNLESLLRSPPDKWLTNARITQYQVLLLDPPRVRFKQTAALNPATLLPETDDTLPIHHCLDTLDSLTSTRPDLTDQPLAQAEATLFTDGSSYIRDGKRYAGAAVVTLDSVIWAEPLPIGTSAQKAELIALTKALEWSKDKSVNIYTDSRYAFATLHVHGMIYRERGWLTAGGKAIKNAPEILALLTAVWLPKRVAVMHCKGHQKDDAPTSTGNRRADEVAREVAIRPLSTQATISAGKRTADGSEFEKRTADGSEFESPKKKAKVE

SEQ ID NO: 6405 - protein, 2096 aa, synthetic construct
MPAAKRVKLDGGDKKYSIGLDIGTNSVGWAVITDEYKVPSKKFKVLGNTDRHSIKKNLIGALLFDSGETAEATRLKRTARRRYTRRKNRICYLQEIFSNEMAKVDDSFFHRLEESFLVEEDKKHERHPIFGNIVDEVAYHEKYPTIYHLRKKLVDSTDKADLRLIYLALAHMIKFRGHFLIEGDLNPDNSDVDKLFIQLVQTYNQLFEENPINASGVDAKAILSARLSKSRRLENLIAQLPGEKKNGLFGNLIALSLGLTPNFKSNFDLAEDAKLQLSKDTYDDDLDNLLAQIGDQYADLFLAAKNLSDAILLSDILRVNTEITKAPLSASMIKRYDEHHQDLTLLKALVRQQLPEKYKEIFFDQSKNGYAGYIDGGASQEEFYKFIKPILEKMDGTEELLVKLNREDLLRKQRTFDNGSIPHQIHLGELHAILRRQEDFYPFLKDNREKIEKILTFRIPYYVGPLARGNSRFAWMTRKSEETITPWNFEEVVDKGASAQSFIERMTNFDKNLPNEKVLPKHSLLYEYFTVYNELTKVKYVTEGMRKPAFLSGEQKKAIVDLLFKTNRKVTVKQLKEDYFKKIECFDSVEISGVEDRFNASLGTYHDLLKIIKDKDFLDNEENEDILEDIVLTLTLFEDREMIEERLKTYAHLFDDKVMKQLKRRRYTGWGRLSRKLINGIRDKQSGKTILDFLKSDGFANRNFMQLIHDDSLTFKEDIQKAQVSGQGDSLHEHIANLAGSPAIKKGILQTVKVVDELVKVMGRHKPENIVIEMARENQTTQKGQKNSRERMKRIEEGIKELGSQILKEHPVENTQLQNEKLYLYYLQNGRDMYVDQELDINRLSDYDVDHIVPQSFLKDDSIDNKVLTRSDKARGKSDNVPSEEVVKKMKNYWRQLLNAKLITQRKFDNLTKAERGGLSELDKAGFIKRQLVETRQITKHVAQILDSRMNTKYDENDKLIREVKVITLKSKLVSDFRKDFQFYKVREINNYHHAHDAYLNAVVGTALIKKYPKLESEFVYGDYKVYDVRKMIAKSEQEIGKATAKYFFYSNIMNFFKTEITLANGEIRKRPLIETNGETGEIVWDKGRDFATVRKVLSMPQVNIVKKTEVQTGGFSKESILPKRNSDKLIARKKDWDPKKYGGFDSPTVAYSVLVVAKVEKGKSKKLKSVKELLGITIMERSSFEKNPIDFLEAKGYKEVKKDLIIKLPKYSLFELENGRKRMLASAGELQKGNELALPSKYVNFLYLASHYEKLKGSPEDNEQKQLFVEQHKHYLDEIIEQISEFSKRVILADANLDKVLSAYNKHRDKPIREQAENIIHLFTLTNLGAPAAFKYFDTTIDRKRYTSTKEVLDATLIHQSITGLYETRIDLSQLGGDGGEAAAKEAAAKEAAAKEAAAKGGVPWILKKPLELTIKLDLEEQQGTLLNNSILSKKGKEELKQLFEKYSALWQSWENQVGHRRIRPHKIATGTVKPTPQKQYHINPKAKPDIQIVINDLLKQGVLIQKESTMNTPVYPVPKPNGRWRMVLDYRAVNKVTPLIAVQNQHSYGILGSLFKGRYKTTIDLSNGFWAHPIVPEDYWITAFTWQGKQYCWTVLPQGFLNSPGLFNGDVVDLLQGIPNVEVYVDDVYISHDSEKEHLEYLDILFNRLKEAGYIISLKKSNIANSIVDFLGFQITNEGRGLTDTFKEKLENITAPTTLKQLQSILGLLNFARNFIPDFTELIAPLYALIPKSPKNYVPWQIEHSTTLETLITKLNGAEYLQGRKGDKTLIMKVNASYTTGYIRYYNEGEKKPISYVSIVFSKTELKFTELEKLLTTVHKGLLKALDLSMGQNIHVYSPIVSMQNIQKTPQTAKKALASRWLSWLSYLEDPRIRFFYDPQMPALKDLPAVDTGKDNKKHPSNFQHIFYTDGSAITSPTKEGHLNAGMGIVYFINKDGNLQKQQEWSISLGNHTAQFAEIAAFEFALKKCLPLGGNILVVTDSNYVAKAYNEELDVWASNGFVNNRKKPLKHISKWKSVADLKRLRPDVVVTHEPGHQKLDSSPHAYGNNLADQLATQASFKVHAGKRTADGSEFEKRTADGSEFESPKKKAKVE

SEQ ID NO: 6406 - protein, 2185 aa, synthetic construct
MPAAKRVKLDGGDKKYSIGLDIGTNSVGWAVITDEYKVPSKKFKVLGNTDRHSIKKNLIGALLFDSGETAEATRLKRTARRRYTRRKNRICYLQEIFSNEMAKVDDSFFHRLEESFLVEEDKKHERHPIFGNIVDEVAYHEKYPTIYHLRKKLVDSTDKADLRLIYLALAHMIKFRGHFLIEGDLNPDNSDVDKLFIQLVQTYNQLFEENPINASGVDAKAILSARLSKSRRLENLIAQLPGEKKNGLFGNLIALSLGLTPNFKSNFDLAEDAKLQLSKDTYDDDLDNLLAQIGDQYADLFLAAKNLSDAILLSDILRVNTEITKAPLSASMIKRYDEHHQDLTLLKALVRQQLPEKYKEIFFDQSKNGYAGYIDGGASQEEFYKFIKPILEKMDGTEELLVKLNREDLLRKQRTFDNGSIPHQIHLGELHAILRRQEDFYPFLKDNREKIEKILTFRIPYYVGPLARGNSRFAWMTRKSEETITPWNFEEVVDKGASAQSFIERMTNFDKNLPNEKVLPKHSLLYEYFTVYNELTKVKYVTEGMRKPAFLSGEQKKAIVDLLFKTNRKVTVKQLKEDYFKKIECFDSVEISGVEDRFNASLGTYHDLLKIIKDKDFLDNEENEDILEDIVLTLTLFEDREMIEERLKTYAHLFDDKVMKQLKRRRYTGWGRLSRKLINGIRDKQSGKTILDFLKSDGFANRNFMQLIHDDSLTFKEDIQKAQVSGQGDSLHEHIANLAGSPAIKKGILQTVKVVDELVKVMGRHKPENIVIEMARENQTTQKGQKNSRERMKRIEEGIKELGSQILKEHPVENTQLQNEKLYLYYLQNGRDMYVDQELDINRLSDYDVDHIVPQSFLKDDSIDNKVLTRSDKARGKSDNVPSEEVVKKMKNYWRQLLNAKLITQRKFDNLTKAERGGLSELDKAGFIKRQLVETRQITKHVAQILDSRMNTKYDENDKLIREVKVITLKSKLVSDFRKDFQFYKVREINNYHHAHDAYLNAVVGTALIKKYPKLESEFVYGDYKVYDVRKMIAKSEQEIGKATAKYFFYSNIMNFFKTEITLANGEIRKRPLIETNGETGEIVWDKGRDFATVRKVLSMPQVNIVKKTEVQTGGFSKESILPKRNSDKLIARKKDWDPKKYGGFDSPTVAYSVLVVAKVEKGKSKKLKSVKELLGITIMERSSFEKNPIDFLEAKGYKEVKKDLIIKLPKYSLFELENGRKRMLASAGELQKGNELALPSKYVNFLYLASHYEKLKGSPEDNEQKQLFVEQHKHYLDEIIEQISEFSKRVILADANLDKVLSAYNKHRDKPIREQAENIIHLFTLTNLGAPAAFKYFDTTIDRKRYTSTKEVLDATLIHQSITGLYETRIDLSQLGGDGGEAAAKEAAAKEAAAKEAAAKGGMNPLQLLQPLPAEIKGTKLLAHWNSGATITCIPESFLEDEQPIKKTLIKTIHGEKQQNVYYVTFKVKGRKVEAEVIASPYEYILLSPTDVPWLTQQPLQLTILVPLQEYQEKILSKTALPEDQKQQLKTLFVKYDNLWQHWENQVGHRKIRPHNIATGDYPPRPQKQYPINPKAKPSIQIVIDDLLKQGVLTPQNSTMNTPVYPVPKPDGRWRMVLDYREVNKTIPLTAAQNQHSAGILATIVRQKYKTTLDLANGFWAHPITPESYWLTAFTWQGKQYCWTRLPQGFLNSPALFTADVVDLLKEIPNVQVYVDDIYLSHDDPKEHVQQLEKVFQILLQAGYVVSLKKSEIGQKTVEFLGFNITKEGRGLTDTFKTKLLNITPPKDLKQLQSILGLLNFARNFIPNFAELVQPLYNLIASAKGKYIEWSEENTKQLNMVIEALNTASNLEERLPEQRLVIKVNTSPSAGYVRYYNETGKKPIMYLNYVFSKAELKFSMLEKLLTTMHKALIKAMDLAMGQEILVYSPIVSMTKIQKTPLPERKALPIRWITWMTYLEDPRIQFHYDKTLPELKHIPDVYTSSQSPVKHPSQYEGVFYTDGSAIKSPDPTKSNNAGMGIVHATYKPEYQVLNQWSIPLGNHTAQMAEIAAVEFACKKALKIPGPVLVITDSFYVAESANKELPYWKSNGFVNNKKKPLKHISKWKSIAECLSMKPDITIQHEKGISLQIPVFILKGNALADKLATQGSYVVNAGKRTADGSEFEKRTADGSEFESPKKKAKVE

SEQ ID NO: 6407 - protein, 2103 aa, synthetic construct
MPAAKRVKLDGGDKKYSIGLDIGTNSVGWAVITDEYKVPSKKFKVLGNTDRHSIKKNLIGALLFDSGETAEATRLKRTARRRYTRRKNRICYLQEIFSNEMAKVDDSFFHRLEESFLVEEDKKHERHPIFGNIVDEVAYHEKYPTIYHLRKKLVDSTDKADLRLIYLALAHMIKFRGHFLIEGDLNPDNSDVDKLFIQLVQTYNQLFEENPINASGVDAKAILSARLSKSRRLENLIAQLPGEKKNGLFGNLIALSLGLTPNFKSNFDLAEDAKLQLSKDTYDDDLDNLLAQIGDQYADLFLAAKNLSDAILLSDILRVNTEITKAPLSASMIKRYDEHHQDLTLLKALVRQQLPEKYKEIFFDQSKNGYAGYIDGGASQEEFYKFIKPILEKMDGTEELLVKLNREDLLRKQRTFDNGSIPHQIHLGELHAILRRQEDFYPFLKDNREKIEKILTFRIPYYVGPLARGNSRFAWMTRKSEETITPWNFEEVVDKGASAQSFIERMTNFDKNLPNEKVLPKHSLLYEYFTVYNELTKVKYVTEGMRKPAFLSGEQKKAIVDLLFKTNRKVTVKQLKEDYFKKIECFDSVEISGVEDRFNASLGTYHDLLKIIKDKDFLDNEENEDILEDIVLTLTLFEDREMIEERLKTYAHLFDDKVMKQLKRRRYTGWGRLSRKLINGIRDKQSGKTILDFLKSDGFANRNFMQLIHDDSLTFKEDIQKAQVSGQGDSLHEHIANLAGSPAIKKGILQTVKVVDELVKVMGRHKPENIVIEMARENQTTQKGQKNSRERMKRIEEGIKELGSQILKEHPVENTQLQNEKLYLYYLQNGRDMYVDQELDINRLSDYDVDHIVPQSFLKDDSIDNKVLTRSDKARGKSDNVPSEEVVKKMKNYWRQLLNAKLITQRKFDNLTKAERGGLSELDKAGFIKRQLVETRQITKHVAQILDSRMNTKYDENDKLIREVKVITLKSKLVSDFRKDFQFYKVREINNYHHAHDAYLNAVVGTALIKKYPKLESEFVYGDYKVYDVRKMIAKSEQEIGKATAKYFFYSNIMNFFKTEITLANGEIRKRPLIETNGETGEIVWDKGRDFATVRKVLSMPQVNIVKKTEVQTGGFSKESILPKRNSDKLIARKKDWDPKKYGGFDSPTVAYSVLVVAKVEKGKSKKLKSVKELLGITIMERSSFEKNPIDFLEAKGYKEVKKDLIIKLPKYSLFELENGRKRMLASAGELQKGNELALPSKYVNFLYLASHYEKLKGSPEDNEQKQLFVEQHKHYLDEIIEQISEFSKRVILADANLDKVLSAYNKHRDKPIREQAENIIHLFTLTNLGAPAAFKYFDTTIDRKRYTSTKEVLDATLIHQSITGLYETRIDLSQLGGDGGEAAAKEAAAKEAAAKEAAAKGGVLNLEEEYRLHEKPVPSSIDPSWLQLFPTVWAERAGMGLANQVPPVVVELRSGASPVAVRQYPMSKEAREGIRPHIQKFLDLGVLVPCRSPWNTPLLPVKKPGTNDYRPVQDLREINKRVQDIHPTVPNPYNLLSSLPPSYTWYSVLDLKDAFFCLRLHPNSQPLFAFEWKDPEKGNTGQLTWTRLPQGFKNSPTLFNEALHRDLAPFRALNPQVVLLQYVDDLLVAAPTYEDCKKGTQKLLQELSKLGYRVSAKKAQLCQREVTYLGYLLKEGKRWLTPARKATVMKIPVPTTPRQVREFLGKAGFCRLFIPGFASLAAPLYPLTKPSIPFIWTEEHQQAFDHIKKALLSAPALALPDLTKPFTLYIDERAGVARGVLTQTLGPWRRPVAYLSKKLDPVASGWPTCLKAVAAVALLLKDADKLTLGQNVTVIASHSLESIVRQPPDRWMTNARMTHYQSLLLNERVSFAPPAVLNPATLLPVESEATPVHRCSEILAEETGTRRDLEDQPLPGVPTWYTDGSSFITEGKRRAGAPIVDGKRTVWASSLPEGTSAQKAELVALTQALRLAEGKNINIYTDSRYAFATAHIHGAIYKQRGWLTSAGKDIKNKEEILALLEAIHLPRRVAIIHCPGHQRGSNPVATGNRRADEAAKQAALSTRVLAGTTKPAGKRTADGSEFEKRTADGSEFESPKKKAKVE

SEQ ID NO: 6408 - protein, 2136 aa, synthetic construct
MPAAKRVKLDGGDKKYSIGLDIGTNSVGWAVITDEYKVPSKKFKVLGNTDRHSIKKNLIGALLFDSGETAEATRLKRTARRRYTRRKNRICYLQEIFSNEMAKVDDSFFHRLEESFLVEEDKKHERHPIFGNIVDEVAYHEKYPTIYHLRKKLVDSTDKADLRLIYLALAHMIKFRGHFLIEGDLNPDNSDVDKLFIQLVQTYNQLFEENPINASGVDAKAILSARLSKSRRLENLIAQLPGEKKNGLFGNLIALSLGLTPNFKSNFDLAEDAKLQLSKDTYDDDLDNLLAQIGDQYADLFLAAKNLSDAILLSDILRVNTEITKAPLSASMIKRYDEHHQDLTLLKALVRQQLPEKYKEIFFDQSKNGYAGYIDGGASQEEFYKFIKPILEKMDGTEELLVKLNREDLLRKQRTFDNGSIPHQIHLGELHAILRRQEDFYPFLKDNREKIEKILTFRIPYYVGPLARGNSRFAWMTRKSEETITPWNFEEVVDKGASAQSFIERMTNFDKNLPNEKVLPKHSLLYEYFTVYNELTKVKYVTEGMRKPAFLSGEQKKAIVDLLFKTNRKVTVKQLKEDYFKKIECFDSVEISGVEDRFNASLGTYHDLLKIIKDKDFLDNEENEDILEDIVLTLTLFEDREMIEERLKTYAHLFDDKVMKQLKRRRYTGWGRLSRKLINGIRDKQSGKTILDFLKSDGFANRNFMQLIHDDSLTFKEDIQKAQVSGQGDSLHEHIANLAGSPAIKKGILQTVKVVDELVKVMGRHKPENIVIEMARENQTTQKGQKNSRERMKRIEEGIKELGSQILKEHPVENTQLQNEKLYLYYLQNGRDMYVDQELDINRLSDYDVDHIVPQSFLKDDSIDNKVLTRSDKARGKSDNVPSEEVVKKMKNYWRQLLNAKLITQRKFDNLTKAERGGLSELDKAGFIKRQLVETRQITKHVAQILDSRMNTKYDENDKLIREVKVITLKSKLVSDFRKDFQFYKVREINNYHHAHDAYLNAVVGTALIKKYPKLESEFVYGDYKVYDVRKMIAKSEQEIGKATAKYFFYSNIMNFFKTEITLANGEIRKRPLIETNGETGEIVWDKGRDFATVRKVLSMPQVNIVKKTEVQTGGFSKESILPKRNSDKLIARKKDWDPKKYGGFDSPTVAYSVLVVAKVEKGKSKKLKSVKELLGITIMERSSFEKNPIDFLEAKGYKEVKKDLIIKLPKYSLFELENGRKRMLASAGELQKGNELALPSKYVNFLYLASHYEKLKGSPEDNEQKQLFVEQHKHYLDEIIEQISEFSKRVILADANLDKVLSAYNKHRDKPIREQAENIIHLFTLTNLGAPAAFKYFDTTIDRKRYTSTKEVLDATLIHQSITGLYETRIDLSQLGGDGGEAAAKEAAAKEAAAKEAAAKGGLLGRDLLTKLKAQIQFSTEGPQVTWEDRPAMCLVLNLEEEYRLHEKPVPPSIDPSWLQLFPMVWAEKAGMGLANQVPPVVVELKSDASPVAVRQYPMSKEAREGIRPHIQRFLDLGILVPCQSPWNTPLLPVKKPGTNDYRPVQDLREVNKRVQDIHPTVPNPYNLLSSLPPSHTWYSVLDLKDAFFCLKLHPNSQPLFAFEWRDPEKGNTGQLTWTRLPQGFKNSPTLFDEALHRDLASFRALNPQVVMLQYVDDLLVAAPTYRDCKEGTRRLLQELSKLGYRVSAKKAQLCREEVTYLGYLLKGGKRWLTPARKATVMKIPTPTTPRQVREFLGTAGFCRLWIPGFASLAAPLYPLTREKVPFTWTEAHQEAFGRIKEALLSAPALALPDLTKPFALYVDEKEGVARGVLTQTLGPWRRPVAYLSKKLDPVASGWPTCLKAIAAVALLLKDADKLTLGQNVLVIAPHNLESIVRQPPDRWMTNARMTHYQSLLLNERVSFAPPAILNPATLLPVESDDTPIHICSEILAEETGTRPDLRDQPLPGVPAWYTDGSSFIMDGRRQAGAAIVDNKRTVWASNLPEGTSAQKAELIALTQALRLAEGKSINIYTDSRYAFATAHVHGAIYKQRGLLTSAGKDIKNKEEILALLEAIHLPKRVAIIHCPGHQRGTDPVATGNRKADEAAKQAAQSTRILTETTKNAGKRTADGSEFEKRTADGSEFESPKKKAKVE

SEQ ID NO: 6409 - protein, 2136 aa, synthetic construct
MPAAKRVKLDGGDKKYSIGLDIGTNSVGWAVITDEYKVPSKKFKVLGNTDRHSIKKNLIGALLFDSGETAEATRLKRTARRRYTRRKNRICYLQEIFSNEMAKVDDSFFHRLEESFLVEEDKKHERHPIFGNIVDEVAYHEKYPTIYHLRKKLVDSTDKADLRLIYLALAHMIKFRGHFLIEGDLNPDNSDVDKLFIQLVQTYNQLFEENPINASGVDAKAILSARLSKSRRLENLIAQLPGEKKNGLFGNLIALSLGLTPNFKSNFDLAEDAKLQLSKDTYDDDLDNLLAQIGDQYADLFLAAKNLSDAILLSDILRVNTEITKAPLSASMIKRYDEHHQDLTLLKALVRQQLPEKYKEIFFDQSKNGYAGYIDGGASQEEFYKFIKPILEKMDGTEELLVKLNREDLLRKQRTFDNGSIPHQIHLGELHAILRRQEDFYPFLKDNREKIEKILTFRIPYYVGPLARGNSRFAWMTRKSEETITPWNFEEVVDKGASAQSFIERMTNFDKNLPNEKVLPKHSLLYEYFTVYNELTKVKYVTEGMRKPAFLSGEQKKAIVDLLFKTNRKVTVKQLKEDYFKKIECFDSVEISGVEDRFNASLGTYHDLLKIIKDKDFLDNEENEDILEDIVLTLTLFEDREMIEERLKTYAHLFDDKVMKQLKRRRYTGWGRLSRKLINGIRDKQSGKTILDFLKSDGFANRNFMQLIHDDSLTFKEDIQKAQVSGQGDSLHEHIANLAGSPAIKKGILQTVKVVDELVKVMGRHKPENIVIEMARENQTTQKGQKNSRERMKRIEEGIKELGSQILKEHPVENTQLQNEKLYLYYLQNGRDMYVDQELDINRLSDYDVDHIVPQSFLKDDSIDNKVLTRSDKARGKSDNVPSEEVVKKMKNYWRQLLNAKLITQRKFDNLTKAERGGLSELDKAGFIKRQLVETRQITKHVAQILDSRMNTKYDENDKLIREVKVITLKSKLVSDFRKDFQFYKVREINNYHHAHDAYLNAVVGTALIKKYPKLESEFVYGDYKVYDVRKMIAKSEQEIGKATAKYFFYSNIMNFFKTEITLANGEIRKRPLIETNGETGEIVWDKGRDFATVRKVLSMPQVNIVKKTEVQTGGFSKESILPKRNSDKLIARKKDWDPKKYGGFDSPTVAYSVLVVAKVEKGKSKKLKSVKELLGITIMERSSFEKNPIDFLEAKGYKEVKKDLIIKLPKYSLFELENGRKRMLASAGELQKGNELALPSKYVNFLYLASHYEKLKGSPEDNEQKQLFVEQHKHYLDEIIEQISEFSKRVILADANLDKVLSAYNKHRDKPIREQAENIIHLFTLTNLGAPAAFKYFDTTIDRKRYTSTKEVLDATLIHQSITGLYETRIDLSQLGGDGGEAAAKEAAAKEAAAKEAAAKGGLLGRDLLTKLKAQIQFSTEGPQVTWEDRPAMCLVLNLEEEYRLHEKPVPPSIDPSWLQLFPMVWAEKAGMGLANQVPPVVVELKSDASPVAVRQYPMSKEAREGIRPHIQRFLDLGILVPCQSPWNTPLLPVKKPGTNDYRPVQDLREVNKRVQDIHPTVPNPYNLLSSLPPSHTWYSVLDLKDAFFCLKLHPNSQPLFAFEWRDPEKGNTGQLTWTRLPQGFKNSPTLFNEALHRDLASFRALNPQVVMLQYVDDLLVAAPTYRDCKEGTRRLLQELSKLGYRVSAKKAQLCREEVTYLGYLLKGGKRWLTPARKATVMKIPTPTTPRQVREFLGTAGFCRLWIPGFASLAAPLYPLTRPKVPFTWTEAHQEAFGRIKEALLSAPALALPDLTKPFALYVDEKEGVARGVLTQTLGPWRRPVAYLSKKLDPVASGWPTCLKAIAAVALLLKDADKLTLGQNVLVIAPHNLESIVRQPPDRWMTNARMTHYQSLLLNERVSFAPPAILNPATLLPVESDDTPIHICSEILAEETGTRPDLRDQPLPGVPAWYTDGSSFIMDGRRQAGAAIVDNKRTVWASNLPEGTSAQKAELIALTQALRLAEGKSINIYTDSRYAFATAHVHGAIYKQRGWLTSAGKDIKNKEEILALLEAIHLPKRVAIIHCPGHQRGTDPVATGNRKADEAAKQAAQSTRILTETTKNAGKRTADGSEFEKRTADGSEFESPKKKAKVE

SEQ ID NO: 6410 - protein, 2227 aa, synthetic construct
MPAAKRVKLDGGDKKYSIGLDIGTNSVGWAVITDEYKVPSKKFKVLGNTDRHSIKKNLIGALLFDSGETAEATRLKRTARRRYTRRKNRICYLQEIFSNEMAKVDDSFFHRLEESFLVEEDKKHERHPIFGNIVDEVAYHEKYPTIYHLRKKLVDSTDKADLRLIYLALAHMIKFRGHFLIEGDLNPDNSDVDKLFIQLVQTYNQLFEENPINASGVDAKAILSARLSKSRRLENLIAQLPGEKKNGLFGNLIALSLGLTPNFKSNFDLAEDAKLQLSKDTYDDDLDNLLAQIGDQYADLFLAAKNLSDAILLSDILRVNTEITKAPLSASMIKRYDEHHQDLTLLKALVRQQLPEKYKEIFFDQSKNGYAGYIDGGASQEEFYKFIKPILEKMDGTEELLVKLNREDLLRKQRTFDNGSIPHQIHLGELHAILRRQEDFYPFLKDNREKIEKILTFRIPYYVGPLARGNSRFAWMTRKSEETITPWNFEEVVDKGASAQSFIERMTNFDKNLPNEKVLPKHSLLYEYFTVYNELTKVKYVTEGMRKPAFLSGEQKKAIVDLLFKTNRKVTVKQLKEDYFKKIECFDSVEISGVEDRFNASLGTYHDLLKIIKDKDFLDNEENEDILEDIVLTLTLFEDREMIEERLKTYAHLFDDKVMKQLKRRRYTGWGRLSRKLINGIRDKQSGKTILDFLKSDGFANRNFMQLIHDDSLTFKEDIQKAQVSGQGDSLHEHIANLAGSPAIKKGILQTVKVVDELVKVMGRHKPENIVIEMARENQTTQKGQKNSRERMKRIEEGIKELGSQILKEHPVENTQLQNEKLYLYYLQNGRDMYVDQELDINRLSDYDVDHIVPQSFLKDDSIDNKVLTRSDKARGKSDNVPSEEVVKKMKNYWRQLLNAKLITQRKFDNLTKAERGGLSELDKAGFIKRQLVETRQITKHVAQILDSRMNTKYDENDKLIREVKVITLKSKLVSDFRKDFQFYKVREINNYHHAHDAYLNAVVGTALIKKYPKLESEFVYGDYKVYDVRKMIAKSEQEIGKATAKYFFYSNIMNFFKTEITLANGEIRKRPLIETNGETGEIVWDKGRDFATVRKVLSMPQVNIVKKTEVQTGGFSKESILPKRNSDKLIARKKDWDPKKYGGFDSPTVAYSVLVVAKVEKGKSKKLKSVKELLGITIMERSSFEKNPIDFLEAKGYKEVKKDLIIKLPKYSLFELENGRKRMLASAGELQKGNELALPSKYVNFLYLASHYEKLKGSPEDNEQKQLFVEQHKHYLDEIIEQISEFSKRVILADANLDKVLSAYNKHRDKPIREQAENIIHLFTLTNLGAPAAFKYFDTTIDRKRYTSTKEVLDATLIHQSITGLYETRIDLSQLGGDGGEAAAKEAAAKEAAAKEAAAKGGTLGDQGSRGSDPLPEPRVTLTVEGIPTEFLVNTGAEHSVLTKPMGKMGSKRTVVAGATGSKVYPWTTKRLLKIGQKQVTHSFLVIPECPAPLLGRDLLTKLKAQIQFSTEGPQVTWEDRPAMCLVLNLEEEYRLHEKPVPPSIDPSWLQLFPMVWAEKAGMGLANQVPPVVVELKSDASPVAVRQYPMSKEAREGIRPHIQRFLDLGILVPCQSPWNTPLLPVKKPGTNDYRPVQDLREVNKRVQDIHPTVPNPYNLLSSLPPSHTWYSVLDLKDAFFCLKLHPNSQPLFAFEWRDPEKGNTGQLTWTRLPQGFKNSPTLFNEALHRDLASFRALNPQVVMLQYVDDLLVAAPTYRDCKEGTRRLLQELSKLGYRVSAKKAQLCREEVTYLGYLLKGGKRWLTPARKATVMKIPTPTTPRQVREFLGTAGFCRLWIPGFASLAAPLYPLTRPKVPFTWTEAHQEAFGRIKEALLSAPALALPDLTKPFALYVDEKEGVARGVLTQTLGPWRRPVAYLSKKLDPVASGWPTCLKAIAAVALLLKDADKLTLGQNVLVIAPHNLESIVRQPPDRWMTNARMTHYQSLLLNERVSFAPPAILNPATLLPVESDDTPIHICSEILAEETGTRPDLRDQPLPGVPAWYTDGSSFIMDGRRQAGAAIVDNKRTVWASNLPEGTSAQKAELIALTQALRLAEGKSINIYTDSRYAFATAHVHGAIYKQRGWLTSAGKDIKNKEEILALLEAIHLPKRVAIIHCPGHQRGTDPVATGNRKADEAAKQAAQSTRILTETTKNAGKRTADGSEFEKRTADGSEFESPKKKAKVE

SEQ ID NO: 6411 - protein, 2105 aa, synthetic construct
MPAAKRVKLDGGDKKYSIGLDIGTNSVGWAVITDEYKVPSKKFKVLGNTDRHSIKKNLIGALLFDSGETAEATRLKRTARRRYTRRKNRICYLQEIFSNEMAKVDDSFFHRLEESFLVEEDKKHERHPIFGNIVDEVAYHEKYPTIYHLRKKLVDSTDKADLRLIYLALAHMIKFRGHFLIEGDLNPDNSDVDKLFIQLVQTYNQLFEENPINASGVDAKAILSARLSKSRRLENLIAQLPGEKKNGLFGNLIALSLGLTPNFKSNFDLAEDAKLQLSKDTYDDDLDNLLAQIGDQYADLFLAAKNLSDAILLSDILRVNTEITKAPLSASMIKRYDEHHQDLTLLKALVRQQLPEKYKEIFFDQSKNGYAGYIDGGASQEEFYKFIKPILEKMDGTEELLVKLNREDLLRKQRTFDNGSIPHQIHLGELHAILRRQEDFYPFLKDNREKIEKILTFRIPYYVGPLARGNSRFAWMTRKSEETITPWNFEEVVDKGASAQSFIERMTNFDKNLPNEKVLPKHSLLYEYFTVYNELTKVKYVTEGMRKPAFLSGEQKKAIVDLLFKTNRKVTVKQLKEDYFKKIECFDSVEISGVEDRFNASLGTYHDLLKIIKDKDFLDNEENEDILEDIVLTLTLFEDREMIEERLKTYAHLFDDKVMKQLKRRRYTGWGRLSRKLINGIRDKQSGKTILDFLKSDGFANRNFMQLIHDDSLTFKEDIQKAQVSGQGDSLHEHIANLAGSPAIKKGILQTVKVVDELVKVMGRHKPENIVIEMARENQTTQKGQKNSRERMKRIEEGIKELGSQILKEHPVENTQLQNEKLYLYYLQNGRDMYVDQELDINRLSDYDVDHIVPQSFLKDDSIDNKVLTRSDKARGKSDNVPSEEVVKKMKNYWRQLLNAKLITQRKFDNLTKAERGGLSELDKAGFIKRQLVETRQITKHVAQILDSRMNTKYDENDKLIREVKVITLKSKLVSDFRKDFQFYKVREINNYHHAHDAYLNAVVGTALIKKYPKLESEFVYGDYKVYDVRKMIAKSEQEIGKATAKYFFYSNIMNFFKTEITLANGEIRKRPLIETNGETGEIVWDKGRDFATVRKVLSMPQVNIVKKTEVQTGGFSKESILPKRNSDKLIARKKDWDPKKYGGFDSPTVAYSVLVVAKVEKGKSKKLKSVKELLGITIMERSSFEKNPIDFLEAKGYKEVKKDLIIKLPKYSLFELENGRKRMLASAGELQKGNELALPSKYVNFLYLASHYEKLKGSPEDNEQKQLFVEQHKHYLDEIIEQISEFSKRVILADANLDKVLSAYNKHRDKPIREQAENIIHLFTLTNLGAPAAFKYFDTTIDRKRYTSTKEVLDATLIHQSITGLYETRIDLSQLGGDGGEAAAKEAAAKEAAAKEAAAKGGTLNIEDEHRLHETSKEPDVSLGSTWLSDFPQAWAETGGMGLAVRQAPLIIPLKATSTPVSIKQYPMSQEARLGIKPHIQRLLDQGILVPCQSPWNTPLLPVKKPGTNDYRPVQDLREVNKRVEDIHPTVPNPYNLLSGLPPSHQWYTVLDLKDAFFCLRLHPTSQPLFAFEWRDPEMGISGQLTWTRLPQGFKNSPTLFDEALHRDLADFRIQHPDLILLQYVDDLLLAATSELDCQQGTRALLQTLGNLGYRASAKKAQICQKQVKYLGYLLKEGQRWLTEARKETVMGQPTPKTPRQLREFLGTAGFCRLWIPGFAEMAAPLYPLTKTGTLFNWGPDQQKAYQEIKQALLTAPALGLPDLTKPFELFVDEKQGYAKGVLTQKLGPWRRPVAYLSKKLDPVAAGWPPCLRMVAAIAVLTKDAGKLTMGQPLVILAPHAVEALVKQPPDRWLSNARMTHYQALLLDTDRVQFGPVVALNPATLLPLPEEGLQHNCLDILAEAHGTRPDLTDQPLPDADHTWYTDGSSLLQEGQRKAGAAVTTETEVIWAKALPAGTSAQRAELIALTQALKMAEGKKLNVYTDSRYAFATAHIHGEIYRRRGLLTSEGKEIKNKDEILALLKALFLPKRLSIIHCPGHQKGHSAEARGNRMADQAARKAAITETPDTSTLLAGKRTADGSEFEKRTADGSEFESPKKKAKVE

SEQ ID NO: 6412 - protein, 2099 aa, synthetic construct
MPAAKRVKLDGGDKKYSIGLDIGTNSVGWAVITDEYKVPSKKFKVLGNTDRHSIKKNLIGALLFDSGETAEATRLKRTARRRYTRRKNRICYLQEIFSNEMAKVDDSFFHRLEESFLVEEDKKHERHPIFGNIVDEVAYHEKYPTIYHLRKKLVDSTDKADLRLIYLALAHMIKFRGHFLIEGDLNPDNSDVDKLFIQLVQTYNQLFEENPINASGVDAKAILSARLSKSRRLENLIAQLPGEKKNGLFGNLIALSLGLTPNFKSNFDLAEDAKLQLSKDTYDDDLDNLLAQIGDQYADLFLAAKNLSDAILLSDILRVNTEITKAPLSASMIKRYDEHHQDLTLLKALVRQQLPEKYKEIFFDQSKNGYAGYIDGGASQEEFYKFIKPILEKMDGTEELLVKLNREDLLRKQRTFDNGSIPHQIHLGELHAILRRQEDFYPFLKDNREKIEKILTFRIPYYVGPLARGNSRFAWMTRKSEETITPWNFEEVVDKGASAQSFIERMTNFDKNLPNEKVLPKHSLLYEYFTVYNELTKVKYVTEGMRKPAFLSGEQKKAIVDLLFKTNRKVTVKQLKEDYFKKIECFDSVEISGVEDRFNASLGTYHDLLKIIKDKDFLDNEENEDILEDIVLTLTLFEDREMIEERLKTYAHLFDDKVMKQLKRRRYTGWGRLSRKLINGIRDKQSGKTILDFLKSDGFANRNFMQLIHDDSLTFKEDIQKAQVSGQGDSLHEHIANLAGSPAIKKGILQTVKVVDELVKVMGRHKPENIVIEMARENQTTQKGQKNSRERMKRIEEGIKELGSQILKEHPVENTQLQNEKLYLYYLQNGRDMYVDQELDINRLSDYDVDHIVPQSFLKDDSIDNKVLTRSDKARGKSDNVPSEEVVKKMKNYWRQLLNAKLITQRKFDNLTKAERGGLSELDKAGFIKRQLVETRQITKHVAQILDSRMNTKYDENDKLIREVKVITLKSKLVSDFRKDFQFYKVREINNYHHAHDAYLNAVVGTALIKKYPKLESEFVYGDYKVYDVRKMIAKSEQEIGKATAKYFFYSNIMNFFKTEITLANGEIRKRPLIETNGETGEIVWDKGRDFATVRKVLSMPQVNIVKKTEVQTGGFSKESILPKRNSDKLIARKKDWDPKKYGGFDSPTVAYSVLVVAKVEKGKSKKLKSVKELLGITIMERSSFEKNPIDFLEAKGYKEVKKDLIIKLPKYSLFELENGRKRMLASAGELQKGNELALPSKYVNFLYLASHYEKLKGSPEDNEQKQLFVEQHKHYLDEIIEQISEFSKRVILADANLDKVLSAYNKHRDKPIREQAENIIHLFTLTNLGAPAAFKYFDTTIDRKRYTSTKEVLDATLIHQSITGLYETRIDLSQLGGDGGEAAAKEAAAKEAAAKEAAAKGGTLQLDDEYRLYSPLVKPDQNIQFWLEQFPQAWAETAGMGLAKQVPPQVIQLKASATPVSVRQYPLSKEAQEGIRPHVQRLIQQGILVPVQSPWNTPLLPVRKPGTNDYRPVQDLREVNKRVQDIHPTVPNPYNLLCALPPQRSWYTVLDLKDAFFCLRLHPTSQPLFAFEWRDPGTGRTGQLTWTRLPQGFKNSPTIFDEALHRDLANFRIQHPQVTLLQYVDDLLLAGATKQDCLEGTKALLLELSDLGYRASAKKAQICRREVTYLGYSLRDGQRWLTEARKKTVVQIPAPTTAKQVREFLGTAGFCRLWIPGFATLAAPLYPLTKEKGEFSWAPEHQKAFDAIKKALLSAPALALPDVTKPFTLYVDERKGVARGVLTQTLGPWRRPVAYLSKKLDPVASGWPVCLKAIAAVAILVKDADKLTLGQNITVIAPHALENIVRQPPDRWMTNARMTHYQSLLLTERVTFAPPAALNPATLLPEETDEPVTHDCHQLLIEETGVRKDLTDIPLTGEVLTWFTDGSSYVVEGKRMAGAAVVDGTRTIWASSLPEGTSAQKAELMALTQALRLAEGKSINIYTDSRYAFATAHVHGAIYKQRGLLTSAGREIKNKEEILSLLEALHLPKRLAIIHCPGHQKAKDPISRGNQMADRVAKQAAQGVNLLAGKRTADGSEFEKRTADGSEFESPKKKAKVE

SEQ ID NO: 6413 - protein, 2099 aa, synthetic construct; identical to SEQ ID NO: 6412

SEQ ID NO: 6414 - protein, 2096 aa, synthetic construct
MPAAKRVKLDGGDKKYSIGLDIGTNSVGWAVITDEYKVPSKKFKVLGNTDRHSIKKNLIGALLFDSGETAEATRLKRTARRRYTRRKNRICYLQEIFSNEMAKVDDSFFHRLEESFLVEEDKKHERHPIFGNIVDEVAYHEKYPTIYHLRKKLVDSTDKADLRLIYLALAHMIKFRGHFLIEGDLNPDNSDVDKLFIQLVQTYNQLFEENPINASGVDAKAILSARLSKSRRLENLIAQLPGEKKNGLFGNLIALSLGLTPNFKSNFDLAEDAKLQLSKDTYDDDLDNLLAQIGDQYADLFLAAKNLSDAILLSDILRVNTEITKAPLSASMIKRYDEHHQDLTLLKALVRQQLPEKYKEIFFDQSKNGYAGYIDGGASQEEFYKFIKPILEKMDGTEELLVKLNREDLLRKQRTFDNGSIPHQIHLGELHAILRRQEDFYPFLKDNREKIEKILTFRIPYYVGPLARGNSRFAWMTRKSEETITPWNFEEVVDKGASAQSFIERMTNFDKNLPNEKVLPKHSLLYEYFTVYNELTKVKYVTEGMRKPAFLSGEQKKAIVDLLFKTNRKVTVKQLKEDYFKKIECFDSVEISGVEDRFNASLGTYHDLLKIIKDKDFLDNEENEDILEDIVLTLTLFEDREMIEERLKTYAHLFDDKVMKQLKRRRYTGWGRLSRKLINGIRDKQSGKTILDFLKSDGFANRNFMQLIHDDSLTFKEDIQKAQVSGQGDSLHEHIANLAGSPAIKKGILQTVKVVDELVKVMGRHKPENIVIEMARENQTTQKGQKNSRERMKRIEEGIKELGSQILKEHPVENTQLQNEKLYLYYLQNGRDMYVDQELDINRLSDYDVDHIVPQSFLKDDSIDNKVLTRSDKARGKSDNVPSEEVVKKMKNYWRQLLNAKLITQRKFDNLTKAERGGLSELDKAGFIKRQLVETRQITKHVAQILDSRMNTKYDENDKLIREVKVITLKSKLVSDFRKDFQFYKVREINNYHHAHDAYLNAVVGTALIKKYPKLESEFVYGDYKVYDVRKMIAKSEQEIGKATAKYFFYSNIMNFFKTEITLANGEIRKRPLIETNGETGEIVWDKGRDFATVRKVLSMPQVNIVKKTEVQTGGFSKESILPKRNSDKLIARKKDWDPKKYGGFDSPTVAYSVLVVAKVEKGKSKKLKSVKELLGITIMERSSFEKNPIDFLEAKGYKEVKKDLIIKLPKYSLFELENGRKRMLASAGELQKGNELALPSKYVNFLYLASHYEKLKGSPEDNEQKQLFVEQHKHYLDEIIEQISEFSKRVILADANLDKVLSAYNKHRDKPIREQAENIIHLFTLTNLGAPAAFKYFDTTIDRKRYTSTKEVLDATLIHQSITGLYETRIDLSQLGGDGGEAAAKEAAAKEAAAKEAAAKGGVPWLMKKPLQLTVLVPLHEYQERLLQQTALPKEQKELLQKLFLKYDALWQHWENQVGHRRIKPHNIATGTLAPRPQKQYPINPKAKPSIQIVIDDLLKQGVLIQQNSTMNTPVYPVPKPDGKWRMVLDYREVNKTIPLIAAQNQHSAGILSSIYRGKYKTTLDLTNGFWAHPITPESYWLTAFTWQGKQYCWTRLPQGFLNSPALFNADVVDLLKEIPNVQAYVDDIYISHDDPQEHLEQLEKIFSILLNAGYVVSLKKSEIAQREVEFLGFNITKEGRGLTDTFKQKLLNITPPKDLKQLQSILGKLNFARNFIPNYSELVKPLYTIVAPANGKFISWTEDNSNQLQHIISVLNQADNLEERNPETRLIIKVNSSPSAGYIRYYNEGSKRPIMYVNYIFSKAEAKFTQTEKLLTTMHKGLIKAMDLAMGQEILVYSPIVSMTKIQRTPLPERKALPVRWITWMTYLEDPRIQFHYDKSLPELQQIPNVTEDVIAKTKHPSEFAMVFYTDGSAIKHPDVNKSHSAGMGIAQVQFIPEYKIVHQWSIPLGDHTAQLAEIAAVEFACKKALKISGPVLIVTDSFYVAESANKELPYWKSNGFLNNKKKPLRHVSKWKSIAECLQLKPDIIIMHEKGHQQPMTTLHTEGNNLADKLATQGSYVVHAGKRTADGSEFEKRTADGSEFESPKKKAKVE

SEQ ID NO: 6415 - protein, 2185 aa, synthetic construct
MPAAKRVKLDGGDKKYSIGLDIGTNSVGWAVITDEYKVPSKKFKVLGNTDRHSIKKNLIGALLFDSGETAEATRLKRTARRRYTRRKNRICYLQEIFSNEMAKVDDSFFHRLEESFLVEEDKKHERHPIFGNIVDEVAYHEKYPTIYHLRKKLVDSTDKADLRLIYLALAHMIKFRGHFLIEGDLNPDNSDVDKLFIQLVQTYNQLFEENPINASGVDAKAILSARLSKSRRLENLIAQLPGEKKNGLFGNLIALSLGLTPNFKSNFDLAEDAKLQLSKDTYDDDLDNLLAQIGDQYADLFLAAKNLSDAILLSDILRVNTEITKAPLSASMIKRYDEHHQDLTLLKALVRQQLPEKYKEIFFDQSKNGYAGYIDGGASQEEFYKFIKPILEKMDGTEELLVKLNREDLLRKQRTFDNGSIPHQIHLGELHAILRRQEDFYPFLKDNREKIEKILTFRIPYYVGPLARGNSRFAWMTRKSEETITPWNFEEVVDKGASAQSFIERMTNFDKNLPNEKVLPKHSLLYEYFTVYNELTKVKYVTEGMRKPAFLSGEQKKAIVDLLFKTNRKVTVKQLKEDYFKKIECFDSVEISGVEDRFNASLGTYHDLLKIIKDKDFLDNEENEDILEDIVLTLTLFEDREMIEERLKTYAHLFDDKVMKQLKRRRYTGWGRLSRKLINGIRDKQSGKTILDFLKSDGFANRNFMQLIHDDSLTFKEDIQKAQVSGQGDSLHEHIANLAGSPAIKKGILQTVKVVDELVKVMGRHKPENIVIEMARENQTTQKGQKNSRERMKRIEEGIKELGSQILKEHPVENTQLQNEKLYLYYLQNGRDMYVDQELDINRLSDYDVDHIVPQSFLKDDSIDNKVLTRSDKARGKSDNVPSEEVVKKMKNYWRQLLNAKLITQRKFDNLTKAERGGLSELDKAGFIKRQLVETRQITKHVAQILDSRMNTKYDENDKLIREVKVITLKSKLVSDFRKDFQFYKVREINNYHHAHDAYLNAVVGTALIKKYPKLESEFVYGDYKVYDVRKMIAKSEQEIGKATAKYFFYSNIMNFFKTEITLANGEIRKRPLIETNGETGEIVWDKGRDFATVRKVLSMPQVNIVKKTEVQTGGFSKESILPKRNSDKLIARKKDWDPKKYGGFDSPTVAYSVLVVAKVEKGKSKKLKSVKELLGITIMERSSFEKNPIDFLEAKGYKEVKKDLIIKLPKYSLFELENGRKRMLASAGELQKGNELALPSKYVNFLYLASHYEKLKGSPEDNEQKQLFVEQHKHYLDEIIEQISEFSKRVILADANLDKVLSAYNKHRDKPIREQAENIIHLFTLTNLGAPAAFKYFDTTIDRKRYTSTKEVLDATLIHQSITGLYETRIDLSQLGGDGGEAAAKEAAAKEAAAKEAAAKGGMDPLQLLQPLEAEIKGTKLKAHWNSGATITCVPEAFLEDERPIQTMLIKTIHGEKQQDVYYLTFKVQGRKVEAEVLASPYDYILLNPSDVPWLMKKPLQLTVLVPLHEYQERLLQQTALPKEQKELLQKLFLKYDALWQHWENQVGHRRIKPHNIATGTLAPRPQKQYPINPKAKPSIQIVIDDLLKQGVLIQQNSTMNTPVYPVPKPDGKWRMVLDYREVNKTIPLIAAQNQHSAGILSSIYRGKYKTTLDLTNGFWAHPITPESYWLTAFTWQGKQYCWTRLPQGFLNSPALFNADVVDLLKEIPNVQAYVDDIYISHDDPQEHLEQLEKIFSILLNAGYVVSLKKSEIAQREVEFLGFNITKEGRGLTDTFKQKLLNITPPKDLKQLQSILGLLNFARNFIPNYSELVKPLYTIVAPANGKFISWTEDNSNQLQHIISVLNQADNLEERNPETRLIIKVNSSPSAGYIRYYNEGSKRPIMYVNYIFSKAEAKFTQTEKLLTTMHKGLIKAMDLAMGQEILVYSPIVSMTKIQRTPLPERKALPVRWITWMTYLEDPRIQFHYDKSLPELQQIPNVTEDVIAKTKHPSEFAMVFYTDGSAIKHPDVNKSHSAGMGIAQVQFIPEYKIVHQWSIPLGDHTAQLAEIAAVEFACKKALKISGPVLIVTDSFYVAESANKELPYWKSNGFLNNKKKPLRHVSKWKSIAECLQLKPDIIIMHEKGHQQPMTTLHTEGNNLADKLATQGSYVVHAGKRTADGSEFEKRTADGSEFESPKKKAKVE

SEQ ID NO: 6416 - protein, 2185 aa, synthetic construct
MPAAKRVKLDGGDKKYSIGLDIGTNSVGWAVITDEYKVPSKKFKVLGNTDRHSIKKNLIGALLFDSGETAEATRLKRTARRRYTRRKNRICYLQEIFSNEMAKVDDSFFHRLEESFLVEEDKKHERHPIFGNIVDEVAYHEKYPTIYHLRKKLVDSTDKADLRLIYLALAHMIKFRGHFLIEGDLNPDNSDVDKLFIQLVQTYNQLFEENPINASGVDAKAILSARLSKSRRLENLIAQLPGEKKNGLFGNLIALSLGLTPNFKSNFDLAEDAKLQLSKDTYDDDLDNLLAQIGDQYADLFLAAKNLSDAILLSDILRVNTEITKAPLSASMIKRYDEHHQDLTLLKALVRQQLPEKYKEIFFDQSKNGYAGYIDGGASQEEFYKFIKPILEKMDGTEELLVKLNREDLLRKQRTFDNGSIPHQIHLGELHAILRRQEDFYPFLKDNREKIEKILTFRIPYYVGPLARGNSRFAWMTRKSEETITPWNFEEVVDKGASAQSFIERMTNFDKNLPNEKVLPKHSLLYEYFTVYNELTKVKYVTEGMRKPAFLSGEQKKAIVDLLFKTNRKVTVKQLKEDYFKKIECFDSVEISGVEDRFNASLGTYHDLLKIIKDKDFLDNEENEDILEDIVLTLTLFEDREMIEERLKTYAHLFDDKVMKQLKRRRYTGWGRLSRKLINGIRDKQSGKTILDFLKSDGFANRNFMQLIHDDSLTFKEDIQKAQVSGQGDSLHEHIANLAGSPAIKKGILQTVKVVDELVKVMGRHKPENIVIEMARENQTTQKGQKNSRERMKRIEEGIKELGSQILKEHPVENTQLQNEKLYLYYLQNGRDMYVDQELDINRLSDYDVDHIVPQSFLKDDSIDNKVLTRSDKARGKSDNVPSEEVVKKMKNYWRQLLNAKLITQRKFDNLTKAERGGLSELDKAGFIKRQLVETRQITKHVAQILDSRMNTKYDENDKLIREVKVITLKSKLVSDFRKDFQFYKVREINNYHHAHDAYLNAVVGTALIKKYPKLESEFVYGDYKVYDVRKMIAKSEQEIGKATAKYFFYSNIMNFFKTEITLANGEIRKRPLIETNGETGEIVWDKGRDFATVRKVLSMPQVNIVKKTEVQTGGFSKESILPKRNSDKLIARKKDWDPKKYGGFDSPTVAYSVLVVAKVEKGKSKKLKSVKELLGITIMERSSFEKNPIDFLEAKGYKEVKKDLIIKLPKYSLFELENGRKRMLASAGELQKGNELALPSKYVNFLYLASHYEKLKGSPEDNEQKQLFVEQHKHYLDEIIEQISEFSKRVILADANLDKVLSAYNKHRDKPIREQAENIIHLFTLTNLGAPAAFKYFDTTIDRKRYTSTKEVLDATLIHQSITGLYETRIDLSQLGGDGGEAAAKEAAAKEAAAKEAAAKGGMDPLQLLQPLEAEIKGTKLKAHWNSGATITCVPEAFLEDERPIQTMLIKTIHGEKQQDVYYLTFKVQGRKVEAEVLASPYDYILLNPSDVPWLMKKPLQLTVLVPLHEYQERLLQQTALPKEQKELLQKLFLKYDALWQHWENQVGHRRIKPHNIATGTLAPRPQKQYPINPKAKPSIQIVIDDLLKQGVLIQQNSTMNTPVYPVPKPDGKWRMVLDYREVNKTIPLIAAQNQHSAGILSSIYRGKYKTTLDLTNGFWAHPITPESYWLTAFTWQGKQYCWTRLPQGFLNSPALFNADVVDLLKEIPNVQAYVDDIYISHDDPQEHLEQLEKIFSILLNAGYVVSLKKSEIAQREVEFLGFNITKEGRGLTDTFKQKLLNITPPKDLKQLQSILGKLNFARNFIPNYSELVKPLYTIVAPANGKFISWTEDNSNQLQHIISVLNQADNLEERNPETRLIIKVNSSPSAGYIRYYNEGSKRPIMYVNYIFSKAEAKFTQTEKLLTTMHKGLIKAMDLAMGQEILVYSPIVSMTKIQRTPLPERKALPVRWITWMTYLEDPRIQFHYDKSLPELQQIPNVTEDVIAKTKHPSEFAMVFYTDGSAIKHPDVNKSHSAGMGIAQVQFIPEYKIVHQWSIPLGDHTAQLAEIAAVEFACKKALKISGPVLIVTDSFYVAESANKELPYWKSNGFLNNKKKPLRHVSKWKSIAECLQLKPDIIIMHEKGHQQPMTTLHTEGNNLADKLATQGSYVVHAGKRTADGSEFEKRTADGSEFESPKKKAKVE

SEQ ID NO: 6417 - protein, 2185 aa, synthetic construct
MPAAKRVKLDGGDKKYSIGLDIGTNSVGWAVITDEYKVPSKKFKVLGNTDRHSIKKNLIGALLFDSGETAEATRLKRTARRRYTRRKNRICYLQEIFSNEMAKVDDSFFHRLEESFLVEEDKKHERHPIFGNIVDEVAYHEKYPTIYHLRKKLVDSTDKADLRLIYLALAHMIKFRGHFLIEGDLNPDNSDVDKLFIQLVQTYNQLFEENPINASGVDAKAILSARLSKSRRLENLIAQLPGEKKNGLFGNLIALSLGLTPNFKSNFDLAEDAKLQLSKDTYDDDLDNLLAQIGDQYADLFLAAKNLSDAILLSDILRVNTEITKAPLSASMIKRYDEHHQDLTLLKALVRQQLPEKYKEIFFDQSKNGYAGYIDGGASQEEFYKFIKPILEKMDGTEELLVKLNREDLLRKQRTFDNGSIPHQIHLGELHAILRRQEDFYPFLKDNREKIEKILTFRIPYYVGPLARGNSRFAWMTRKSEETITPWNFEEVVDKGASAQSFIERMTNFDKNLPNEKVLPKHSLLYEYFTVYNELTKVKYVTEGMRKPAFLSGEQKKAIVDLLFKTNRKVTVKQLKEDYFKKIECFDSVEISGVEDRFNASLGTYHDLLKIIKDKDFLDNEENEDILEDIVLTLTLFEDREMIEERLKTYAHLFDDKVMKQLKRRRYTGWGRLSRKLINGIRDKQSGKTILDFLKSDGFANRNFMQLIHDDSLTFKEDIQKAQVSGQGDSLHEHIANLAGSPAIKKGILQTVKVVDELVKVMGRHKPENIVIEMARENQTTQKGQKNSRERMKRIEEGIKELGSQILKEHPVENTQLQNEKLYLYYLQNGRDMYVDQELDINRLSDYDVDHIVPQSFLKDDSIDNKVLTRSDKARGKSDNVPSEEVVKKMKNYWRQLLNAKLITQRKFDNLTKAERGGLSELDKAGFIKRQLVETRQITKHVAQILDSRMNTKYDENDKLIREVKVITLKSKLVSDFRKDFQFYKVREINNYHHAHDAYLNAVVGTALIKKYPKLESEFVYGDYKVYDVRKMIAKSEQEIGKATAKYFFYSNIMNFFKTEITLANGEIRKRPLIETNGETGEIVWDKGRDFATVRKVLSMPQVNIVKKTEVQTGGFSKESILPKRNSDKLIARKKDWDPKKYGGFDSPTVAYSVLVVAKVEKGKSKKLKSVKELLGITIMERSSFEKNPIDFLEAKGYKEVKKDLIIKLPKYSLFELENGRKRMLASAGELQKGNELALPSKYVNFLYLASHYEKLKGSPEDNEQKQLFVEQHKHYLDEIIEQISEFSKRVILADANLDKVLSAYNKHRDKPIREQAENIIHLFTLTNLGAPAAFKYFDTTIDRKRYTSTKEVLDATLIHQSITGLYETRIDLSQLGGDGGEAAAKEAAAKEAAAKEAAAKGGMDPLQLLQPLEAEIKGTKLKAHWNSGATITCVPQAFLEEEVPIKNIWIKTIHGEKEQPVYYLTFKIQGRKVEAEVISSPYDYILVSPSDIPWLMKKPLQLTTLVPLQEYEERLLKQTMLTGSYKEKLQSLFLKYDALWQHWENQVGHRRIKPHHIATGTVNPRPQKQYPINPKAKASIQTVINDLLKQGVLIQQNSIMNTPVYPVPKPDGKWRMVLDYREVNKTIPLIAAQNQHSAGILSSIFRGKYKTTLDLSNGFWAHSITPESYWLTAFTWLGQQYCWTRLPQGFLNSPALFNADVVDLLKEVPNVQVYVDDIYISHDDPREHLEQLEKVFSLLLNAGYVVSLKKSEIAQHEVEFLGFNITKEGRGLTETFKQKLLNITPPRDLKQLQSILGLLNFARNFIPNFSELVKPLYNIIATAPGKYITWTTDNSQQLQNIISMLNSAENLEERNPEVRLIMKVNTSPSAGYIRFYNEFAKRPIMYLNYVYTKAEVKFTNTEKLLTTIHKGLIKALDLGMGQEILVYSPIVSMTKIQKTPLPERKALPIRWITWMSYLEDPRIQFHYDKTLPELQQVPTVTDDIIAKIKHPSEFSMVFYTDGSAIKHPNVNKSHNAGMGIAQVQFKPEFTVINTWSIPLGDHTAQLAEVAAVEFACKKALKIDGPVLIVTDSFYVAESVNKELPYWQSNGFFNNKKKPLKHVSKWKSIADCIQLKPDIIIIHEKGHQPTASTFHTEGNNLADKLATQGSYVVNAGKRTADGSEFEKRTADGSEFESPKKKAKVE

SEQ ID NO: 6418 - protein, 2185 aa, synthetic construct
MPAAKRVKLDGGDKKYSIGLDIGTNSVGWAVITDEYKVPSKKFKVLGNTDRHSIKKNLIGALLFDSGETAEATRLKRTARRRYTRRKNRICYLQEIFSNEMAKVDDSFFHRLEESFLVEEDKKHERHPIFGNIVDEVAYHEKYPTIYHLRKKLVDSTDKADLRLIYLALAHMIKFRGHFLIEGDLNPDNSDVDKLFIQLVQTYNQLFEENPINASGVDAKAILSARLSKSRRLENLIAQLPGEKKNGLFGNLIALSLGLTPNFKSNFDLAEDAKLQLSKDTYDDDLDNLLAQIGDQYADLFLAAKNLSDAILLSDILRVNTEITKAPLSASMIKRYDEHHQDLTLLKALVRQQLPEKYKEIFFDQSKNGYAGYIDGGASQEEFYKFIKPILEKMDGTEELLVKLNREDLLRKQRTFDNGSIPHQIHLGELHAILRRQEDFYPFLKDNREKIEKILTFRIPYYVGPLARGNSRFAWMTRKSEETITPWNFEEVVDKGASAQSFIERMTNFDKNLPNEKVLPKHSLLYEYFTVYNELTKVKYVTEGMRKPAFLSGEQKKAIVDLLFKTNRKVTVKQLKEDYFKKIECFDSVEISGVEDRFNASLGTYHDLLKIIKDKDFLDNEENEDILEDIVLTLTLFEDREMIEERLKTYAHLFDDKVMKQLKRRRYTGWGRLSRKLINGIRDKQSGKTILDFLKSDGFANRNFMQLIHDDSLTFKEDIQKAQVSGQGDSLHEHIANLAGSPAIKKGILQTVKVVDELVKVMGRHKPENIVIEMARENQTTQKGQKNSRERMKRIEEGIKELGSQILKEHPVENTQLQNEKLYLYYLQNGRDMYVDQELDINRLSDYDVDHIVPQSFLKDDSIDNKVLTRSDKARGKSDNVPSEEVVKKMKNYWRQLLNAKLITQRKFDNLTKAERGGLSELDKAGFIKRQLVETRQITKHVAQILDSRMNTKYDENDKLIREVKVITLKSKLVSDFRKDFQFYKVREINNYHHAHDAYLNAVVGTALIKKYPKLESEFVYGDYKVYDVRKMIAKSEQEIGKATAKYFFYSNIMNFFKTEITLANGEIRKRPLIETNGETGEIVWDKGRDFATVRKVLSMPQVNIVKKTEVQTGGFSKESILPKRNSDKLIARKKDWDPKKYGGFDSPTVAYSVLVVAKVEKGKSKKLKSVKELLGITIMERSSFEKNPIDFLEAKGYKEVKKDLIIKLPKYSLFELENGRKRMLASAGELQKGNELALPSKYVNFLYLASHYEKLKGSPEDNEQKQLFVEQHKHYLDEIIEQISEFSKRVILADANLDKVLSAYNKHRDKPIREQAENIIHLFTLTNLGAPAAFKYFDTTIDRKRYTSTKEVLDATLIHQSITGLYETRIDLSQLGGDGGEAAAKEAAAKEAAAKEAAAKGGMDPLQLLQPLEAEIKGTKLKAHWNSGATITCVPQAFLEEEVPIKNIWIKTIHGEKEQPVYYLTFKIQGRKVEAEVISSPYDYILVSPSDIPWLMKKPLQLTTLVPLQEYEERLLKQTMLTGSYKEKLQSLFLKYDALWQHWENQVGHRRIKPHHIATGTVNPRPQKQYPINPKAKASIQTVINDLLKQGVLIQQNSIMNTPVYPVPKPDGKWRMVLDYREVNKTIPLIAAQNQHSAGILSSIFRGKYKTTLDLSNGFWAHSITPESYWLTAFTWLGQQYCWTRLPQGFLNSPALFNADVVDLLKEVPNVQVYVDDIYISHDDPREHLEQLEKVFSLLLNAGYVVSLKKSEIAQHEVEFLGFNITKEGRGLTETFKQKLLNITPPRDLKQLQSILGKLNFARNFIPNFSELVKPLYNIIATAPGKYITWTTDNSQQLQNIISMLNSAENLEERNPEVRLIMKVNTSPSAGYIRFYNEFAKRPIMYLNYVYTKAEVKFTNTEKLLTTIHKGLIKALDLGMGQEILVYSPIVSMTKIQKTPLPERKALPIRWITWMSYLEDPRIQFHYDKTLPELQQVPTVTDDIIAKIKHPSEFSMVFYTDGSAIKHPNVNKSHNAGMGIAQVQFKPEFTVINTWSIPLGDHTAQLAEVAAVEFACKKALKIDGPVLIVTDSFYVAESVNKELPYWQSNGFFNNKKKPLKHVSKWKSIADCIQLKPDIIIIHEKGHQPTASTFHTEGNNLADKLATQGSYVVNAGKRTADGSEFEKRTADGSEFESPKKKAKVE

SEQ ID NO: 6419 - protein, 2105 aa, synthetic construct
MPAAKRVKLDGGDKKYSIGLDIGTNSVGWAVITDEYKVPSKKFKVLGNTDRHSIKKNLIGALLFDSGETAEATRLKRTARRRYTRRKNRICYLQEIFSNEMAKVDDSFFHRLEESFLVEEDKKHERHPIFGNIVDEVAYHEKYPTIYHLRKKLVDSTDKADLRLIYLALAHMIKFRGHFLIEGDLNPDNSDVDKLFIQLVQTYNQLFEENPINASGVDAKAILSARLSKSRRLENLIAQLPGEKKNGLFGNLIALSLGLTPNFKSNFDLAEDAKLQLSKDTYDDDLDNLLAQIGDQYADLFLAAKNLSDAILLSDILRVNTEITKAPLSASMIKRYDEHHQDLTLLKALVRQQLPEKYKEIFFDQSKNGYAGYIDGGASQEEFYKFIKPILEKMDGTEELLVKLNREDLLRKQRTFDNGSIPHQIHLGELHAILRRQEDFYPFLKDNREKIEKILTFRIPYYVGPLARGNSRFAWMTRKSEETITPWNFEEVVDKGASAQSFIERMTNFDKNLPNEKVLPKHSLLYEYFTVYNELTKVKYVTEGMRKPAFLSGEQKKAIVDLLFKTNRKVTVKQLKEDYFKKIECFDSVEISGVEDRFNASLGTYHDLLKIIKDKDFLDNEENEDILEDIVLTLTLFEDREMIEERLKTYAHLFDDKVMKQLKRRRYTGWGRLSRKLINGIRDKQSGKTILDFLKSDGFANRNFMQLIHDDSLTFKEDIQKAQVSGQGDSLHEHIANLAGSPAIKKGILQTVKVVDELVKVMGRHKPENIVIEMARENQTTQKGQKNSRERMKRIEEGIKELGSQILKEHPVENTQLQNEKLYLYYLQNGRDMYVDQELDINRLSDYDVDHIVPQSFLKDDSIDNKVLTRSDKARGKSDNVPSEEVVKKMKNYWRQLLNAKLITQRKFDNLTKAERGGLSELDKAGFIKRQLVETRQITKHVAQILDSRMNTKYDENDKLIREVKVITLKSKLVSDFRKDFQFYKVREINNYHHAHDAYLNAVVGTALIKKYPKLESEFVYGDYKVYDVRKMIAKSEQEIGKATAKYFFYSNIMNFFKTEITLANGEIRKRPLIETNGETGEIVWDKGRDFATVRKVLSMPQVNIVKKTEVQTGGFSKESILPKRNSDKLIARKKDWDPKKYGGFDSPTVAYSVLVVAKVEKGKSKKLKSVKELLGITIMERSSFEKNPIDFLEAKGYKEVKKDLIIKLPKYSLFELENGRKRMLASAGELQKGNELALPSKYVNFLYLASHYEKLKGSPEDNEQKQLFVEQHKHYLDEIIEQISEFSKRVILADANLDKVLSAYNKHRDKPIREQAENIIHLFTLTNLGAPAAFKYFDTTIDRKRYTSTKEVLDATLIHQSITGLYETRIDLSQLGGDGGEAAAKEAAAKEAAAKEAAAKGGTLNIEDEYRLHETSKEPDVPLGSTWLSDFPQAWAETGGMGLAVRQAPLIIPLKATSTPVSIKQYPMSQEARLGIKPHIQRLLDQGILVPCQSPWNTPLLPVKKPGTNDYRPVQDLREVNKRVEDIHPTVPNPYNLLSGLPPSHQWYTVLDLKDAFFCLRLHPTSQPLFAFEWRDPEMGISGQLTWTRLPQGFKNSPTLFDEALHRDLADFRIQHPDLILLQYVDDLLLAATSEQDCQRGTRALLQTLGNLGYRASAKKAQICQKQVKYLGYLLKEGQRWLTEARKETVMGQPTPKTPRQLREFLGTAGFCRLWIPGFAEMAAPLYPLTKTGTLFNWGPDQQKAYQEIKQALLTAPALGLPDLTKPFELFVDEKQGYAKGVLTQKLGPWRRPVAYLSKKLDPVAAGWPPCLRMVAAIAVLTKDAGKLTMGQPLVILAPHAVEALVKQPPDRWLSNARMTHYQAMLLDTDRVQFGPVVALNPATLLPLPEKEAPHDCLEILAETHGTRPDLTDQPIPDADYTWYTDGSSFLQEGQRRAGAAVTTETEVIWARALPAGTSAQRAELIALTQALKMAEGKKLNVYTDSRYAFATAHVHGEIYRRRGLLTSEGREIKNKNEILALLKALFLPKRLSIIHCPGHQKGNSAEARGNRMADQAAREAAMKAVLETSTLLAGKRTADGSEFEKRTADGSEFESPKKKAKVE

SEQ ID NO: 6420 - protein, 2112 aa, synthetic construct
MPAAKRVKLDGGDKKYSIGLDIGTNSVGWAVITDEYKVPSKKFKVLGNTDRHSIKKNLIGALLFDSGETAEATRLKRTARRRYTRRKNRICYLQEIFSNEMAKVDDSFFHRLEESFLVEEDKKHERHPIFGNIVDEVAYHEKYPTIYHLRKKLVDSTDKADLRLIYLALAHMIKFRGHFLIEGDLNPDNSDVDKLFIQLVQTYNQLFEENPINASGVDAKAILSARLSKSRRLENLIAQLPGEKKNGLFGNLIALSLGLTPNFKSNFDLAEDAKLQLSKDTYDDDLDNLLAQIGDQYADLFLAAKNLSDAILLSDILRVNTEITKAPLSASMIKRYDEHHQDLTLLKALVRQQLPEKYKEIFFDQSKNGYAGYIDGGASQEEFYKFIKPILEKMDGTEELLVKLNREDLLRKQRTFDNGSIPHQIHLGELHAILRRQEDFYPFLKDNREKIEKILTFRIPYYVGPLARGNSRFAWMTRKSEETITPWNFEEVVDKGASAQSFIERMTNFDKNLPNEKVLPKHSLLYEYFTVYNELTKVKYVTEGMRKPAFLSGEQKKAIVDLLFKTNRKVTVKQLKEDYFKKIECFDSVEISGVEDRFNASLGTYHDLLKIIKDKDFLDNEENEDILEDIVLTLTLFEDREMIEERLKTYAHLFDDKVMKQLKRRRYTGWGRLSRKLINGIRDKQSGKTILDFLKSDGFANRNFMQLIHDDSLTFKEDIQKAQVSGQGDSLHEHIANLAGSPAIKKGILQTVKVVDELVKVMGRHKPENIVIEMARENQTTQKGQKNSRERMKRIEEGIKELGSQILKEHPVENTQLQNEKLYLYYLQNGRDMYVDQELDINRLSDYDVDHIVPQSFLKDDSIDNKVLTRSDKARGKSDNVPSEEVVKKMKNYWRQLLNAKLITQRKFDNLTKAERGGLSELDKAGFIKRQLVETRQITKHVAQILDSRMNTKYDENDKLIREVKVITLKSKLVSDFRKDFQFYKVREINNYHHAHDAYLNAVVGTALIKKYPKLESEFVYGDYKVYDVRKMIAKSEQEIGKATAKYFFYSNIMNFFKTEITLANGEIRKRPLIETNGETGEIVWDKGRDFATVRKVLSMPQVNIVKKTEVQTGGFSKESILPKRNSDKLIARKKDWDPKKYGGFDSPTVAYSVLVVAKVEKGKSKKLKSVKELLGITIMERSSFEKNPIDFLEAKGYKEVKKDLIIKLPKYSLFELENGRKRMLASAGELQKGNELALPSKYVNFLYLASHYEKLKGSPEDNEQKQLFVEQHKHYLDEIIEQISEFSKRVILADANLDKVLSAYNKHRDKPIREQAENIIHLFTLTNLGAPAAFKYFDTTIDRKRYTSTKEVLDATLIHQSITGLYETRIDLSQLGGDGGEAAAKEAAAKEAAAKEAAAKEAAAKGGTAPLEEEYRLFLEAPIQNVTLLEQWKREIPKVWAEINPPGLASTQAPIHVQLLSTALPVRVRQYPITLEAKRSLRETIRKFRAAGILRPVHSPWNTPLLPVRKSGTSEYRMVQDLREVNKRVETIHPTVPNPYTLLSLLPPDRIWYSVLDLKDAFFCIPLAPESQLIFAFEWADAEEGESGQLTWTRLPQGFKNSPTLFDEALNRDLQGFRLDHPSVSLLQYVDDLLIAADTQAACLSATRDLLMTLAELGYRVSGKKAQLCQEEVTYLGFKIHKGSRSLSNSRTQAILQIPVPKTKRQVREFLGTIGYCRLWIPGFAELAQPLYAATRGGNDPLVWGEKEEEAFQSLKLALTQPPALALPSLDKPFQLFVEETSGAAKGVLTQALGPWKRPVAYLSKRLDPVAAGWPRCLRAIAAAALLTREASKLTFGQDIEITSSHNLESLLRSPPDKWLTNARITQYQVLLLDPPRVRFKQTAALNPATLLPETDDTLPIHHCLDTLDSLTSTRPDLTDQPLAQAEATLFTDGSSYIRDGKRYAGAAVVTLDSVIWAEPLPIGTSAQKAELIALTKALEWSKDKSVNIYTDSRYAFATLHVHGMIYRERGLLTAGGKAIKNAPEILALLTAVWLPKRVAVMHCKGHQKDDAPTSTGNRRADEVAREVAIRPLSTQATISAGKRTADGSEFEKRTADGSEFESPKKKAKVE

SEQ ID NO: 6421 - protein, 2112 aa, synthetic construct
MPAAKRVKLDGGDKKYSIGLDIGTNSVGWAVITDEYKVPSKKFKVLGNTDRHSIKKNLIGALLFDSGETAEATRLKRTARRRYTRRKNRICYLQEIFSNEMAKVDDSFFHRLEESFLVEEDKKHERHPIFGNIVDEVAYHEKYPTIYHLRKKLVDSTDKADLRLIYLALAHMIKFRGHFLIEGDLNPDNSDVDKLFIQLVQTYNQLFEENPINASGVDAKAILSARLSKSRRLENLIAQLPGEKKNGLFGNLIALSLGLTPNFKSNFDLAEDAKLQLSKDTYDDDLDNLLAQIGDQYADLFLAAKNLSDAILLSDILRVNTEITKAPLSASMIKRYDEHHQDLTLLKALVRQQLPEKYKEIFFDQSKNGYAGYIDGGASQEEFYKFIKPILEKMDGTEELLVKLNREDLLRKQRTFDNGSIPHQIHLGELHAILRRQEDFYPFLKDNREKIEKILTFRIPYYVGPLARGNSRFAWMTRKSEETITPWNFEEVVDKGASAQSFIERMTNFDKNLPNEKVLPKHSLLYEYFTVYNELTKVKYVTEGMRKPAFLSGEQKKAIVDLLFKTNRKVTVKQLKEDYFKKIECFDSVEISGVEDRFNASLGTYHDLLKIIKDKDFLDNEENEDILEDIVLTLTLFEDREMIEERLKTYAHLFDDKVMKQLKRRRYTGWGRLSRKLINGIRDKQSGKTILDFLKSDGFANRNFMQLIHDDSLTFKEDIQKAQVSGQGDSLHEHIANLAGSPAIKKGILQTVKVVDELVKVMGRHKPENIVIEMARENQTTQKGQKNSRERMKRIEEGIKELGSQILKEHPVENTQLQNEKLYLYYLQNGRDMYVDQELDINRLSDYDVDHIVPQSFLKDDSIDNKVLTRSDKARGKSDNVPSEEVVKKMKNYWRQLLNAKLITQRKFDNLTKAERGGLSELDKAGFIKRQLVETRQITKHVAQILDSRMNTKYDENDKLIREVKVITLKSKLVSDFRKDFQFYKVREINNYHHAHDAYLNAVVGTALIKKYPKLESEFVYGDYKVYDVRKMIAKSEQEIGKATAKYFFYSNIMNFFKTEITLANGEIRKRPLIETNGETGEIVWDKGRDFATVRKVLSMPQVNIVKKTEVQTGGFSKESILPKRNSDKLIARKKDWDPKKYGGFDSPTVAYSVLVVAKVEKGKSKKLKSVKELLGITIMERSSFEKNPIDFLEAKGYKEVKKDLIIKLPKYSLFELENGRKRMLASAGELQKGNELALPSKYVNFLYLASHYEKLKGSPEDNEQKQLFVEQHKHYLDEIIEQISEFSKRVILADANLDKVLSAYNKHRDKPIREQAENIIHLFTLTNLGAPAAFKYFDTTIDRKRYTSTKEVLDATLIHQSITGLYETRIDLSQLGGDGGEAAAKEAAAKEAAAKEAAAKEAAAKGGTAPLEEEYRLFLEAPIQNVTLLEQWKREIPKVWAEINPPGLASTQAPIHVQLLSTALPVRVRQYPITLEAKRSLRETIRKFRAAGILRPVHSPWNTPLLPVRKSGTSEYRMVQDLREVNKRVETIHPTVPNPYTLLSLLPPDRIWYSVLDLKDAFFCIPLAPESQLIFAFEWADAEEGESGQLTWTRLPQGFKNSPTLFNEALNRDLQGFRLDHPSVSLLQYVDDLLIAADTQAACLSATRDLLMTLAELGYRVSGKKAQLCQEEVTYLGFKIHKGSRSLSNSRTQAILQIPVPKTKRQVREFLGTIGYCRLWIPGFAELAQPLYAATRPGNDPLVWGEKEEEAFQSLKLALTQPPALALPSLDKPFQLFVEETSGAAKGVLTQALGPWKRPVAYLSKRLDPVAAGWPRCLRAIAAAALLTREASKLTFGQDIEITSSHNLESLLRSPPDKWLTNARITQYQVLLLDPPRVRFKQTAALNPATLLPETDDTLPIHHCLDTLDSLTSTRPDLTDQPLAQAEATLFTDGSSYIRDGKRYAGAAVVTLDSVIWAEPLPIGTSAQKAELIALTKALEWSKDKSVNIYTDSRYAFATLHVHGMIYRERGWLTAGGKAIKNAPEILALLTAVWLPKRVAVMHCKGHQKDDAPTSTGNRRADEVAREVAIRPLSTQATISAGKRTADGSEFEKRTADGSEFESPKKKAKVE

SEQ ID NO: 6422 - protein, 2187 aa, synthetic construct
MPAAKRVKLDGGDKKYSIGLDIGTNSVGWAVITDEYKVPSKKFKVLGNTDRHSIKKNLIGALLFDSGETAEATRLKRTARRRYTRRKNRICYLQEIFSNEMAKVDDSFFHRLEESFLVEEDKKHERHPIFGNIVDEVAYHEKYPTIYHLRKKLVDSTDKADLRLIYLALAHMIKFRGHFLIEGDLNPDNSDVDKLFIQLVQTYNQLFEENPINASGVDAKAILSARLSKSRRLENLIAQLPGEKKNGLFGNLIALSLGLTPNFKSNFDLAEDAKLQLSKDTYDDDLDNLLAQIGDQYADLFLAAKNLSDAILLSDILRVNTEITKAPLSASMIKRYDEHHQDLTLLKALVRQQLPEKYKEIFFDQSKNGYAGYIDGGASQEEFYKFIKPILEKMDGTEELLVKLNREDLLRKQRTFDNGSIPHQIHLGELHAILRRQEDFYPFLKDNREKIEKILTFRIPYYVGPLARGNSRFAWMTRKSEETITPWNFEEVVDKGASAQSFIERMTNFDKNLPNEKVLPKHSLLYEYFTVYNELTKVKYVTEGMRKPAFLSGEQKKAIVDLLFKTNRKVTVKQLKEDYFKKIECFDSVEISGVEDRFNASLGTYHDLLKIIKDKDFLDNEENEDILEDIVLTLTLFEDREMIEERLKTYAHLFDDKVMKQLKRRRYTGWGRLSRKLINGIRDKQSGKTILDFLKSDGFANRNFMQLIHDDSLTFKEDIQKAQVSGQGDSLHEHIANLAGSPAIKKGILQTVKVVDELVKVMGRHKPENIVIEMARENQTTQKGQKNSRERMKRIEEGIKELGSQILKEHPVENTQLQNEKLYLYYLQNGRDMYVDQELDINRLSDYDVDHIVPQSFLKDDSIDNKVLTRSDKARGKSDNVPSEEVVKKMKNYWRQLLNAKLITQRKFDNLTKAERGGLSELDKAGFIKRQLVETRQITKHVAQILDSRMNTKYDENDKLIREVKVITLKSKLVSDFRKDFQFYKVREINNYHHAHDAYLNAVVGTALIKKYPKLESEFVYGDYKVYDVRKMIAKSEQEIGKATAKYFFYSNIMNFFKTEITLANGEIRKRPLIETNGETGEIVWDKGRDFATVRKVLSMPQVNIVKKTEVQTGGFSKESILPKRNSDKLIARKKDWDPKKYGGFDSPTVAYSVLVVAKVEKGKSKKLKSVKELLGITIMERSSFEKNPIDFLEAKGYKEVKKDLIIKLPKYSLFELENGRKRMLASAGELQKGNELALPSKYVNFLYLASHYEKLKGSPEDNEQKQLFVEQHKHYLDEIIEQISEFSKRVILADANLDKVLSAYNKHRDKPIREQAENIIHLFTLTNLGAPAAFKYFDTTIDRKRYTSTKEVLDATLIHQSITGLYETRIDLSQLGGDGGEAAAKEAAAKEAAAKEAAAKEAAAKGGMDLLKPLTVERKGVKIKGYWNSQADITCVPKDLLQGEEPVRQQNVTTIHGTQEGDVYYVNLKIDGRRINTEVIGTTLDYAIITPGDVPWILKKPLELTIKLDLEEQQGTLLNNSILSKKGKEELKQLFEKYSALWQSWENQVGHRRIRPHKIATGTVKPTPQKQYHINPKAKPDIQIVINDLLKQGVLIQKESTMNTPVYPVPKPNGRWRMVLDYRAVNKVTPLIAVQNQHSYGILGSLFKGRYKTTIDLSNGFWAHPIVPEDYWITAFTWQGKQYCWTVLPQGFLNSPGLFTGDVVDLLQGIPNVEVYVDDVYISHDSEKEHLEYLDILFNRLKEAGYIISLKKSNIANSIVDFLGFQITNEGRGLTDTFKEKLENITAPTTLKQLQSILGLLNFARNFIPDFTELIAPLYALIPKSTKNYVPWQIEHSTTLETLITKLNGAEYLQGRKGDKTLIMKVNASYTTGYIRYYNEGEKKPISYVSIVFSKTELKFTELEKLLTTVHKGLLKALDLSMGQNIHVYSPIVSMQNIQKTPQTAKKALASRWLSWLSYLEDPRIRFFYDPQMPALKDLPAVDTGKDNKKHPSNFQHIFYTDGSAITSPTKEGHLNAGMGIVYFINKDGNLQKQQEWSISLGNHTAQFAEIAAFEFALKKCLPLGGNILVVTDSNYVAKAYNEELDVWASNGFVNNRKKPLKHISKWKSVADLKRLRPDVVVTHEPGHQKLDSSPHAYGNNLADQLATQASFKVHAGKRTADGSEFEKRTADGSEFESPKKKAKVE

SEQ ID NO: 6423 - protein, 2101 aa, synthetic construct
MPAAKRVKLDGGDKKYSIGLDIGTNSVGWAVITDEYKVPSKKFKVLGNTDRHSIKKNLIGALLFDSGETAEATRLKRTARRRYTRRKNRICYLQEIFSNEMAKVDDSFFHRLEESFLVEEDKKHERHPIFGNIVDEVAYHEKYPTIYHLRKKLVDSTDKADLRLIYLALAHMIKFRGHFLIEGDLNPDNSDVDKLFIQLVQTYNQLFEENPINASGVDAKAILSARLSKSRRLENLIAQLPGEKKNGLFGNLIALSLGLTPNFKSNFDLAEDAKLQLSKDTYDDDLDNLLAQIGDQYADLFLAAKNLSDAILLSDILRVNTEITKAPLSASMIKRYDEHHQDLTLLKALVRQQLPEKYKEIFFDQSKNGYAGYIDGGASQEEFYKFIKPILEKMDGTEELLVKLNREDLLRKQRTFDNGSIPHQIHLGELHAILRRQEDFYPFLKDNREKIEKILTFRIPYYVGPLARGNSRFAWMTRKSEETITPWNFEEVVDKGASAQSFIERMTNFDKNLPNEKVLPKHSLLYEYFTVYNELTKVKYVTEGMRKPAFLSGEQKKAIVDLLFKTNRKVTVKQLKEDYFKKIECFDSVEISGVEDRFNASLGTYHDLLKIIKDKDFLDNEENEDILEDIVLTLTLFEDREMIEERLKTYAHLFDDKVMKQLKRRRYTGWGRLSRKLINGIRDKQSGKTILDFLKSDGFANRNFMQLIHDDSLTFKEDIQKAQVSGQGDSLHEHIANLAGSPAIKKGILQTVKVVDELVKVMGRHKPENIVIEMARENQTTQKGQKNSRERMKRIEEGIKELGSQILKEHPVENTQLQNEKLYLYYLQNGRDMYVDQELDINRLSDYDVDHIVPQSFLKDDSIDNKVLTRSDKARGKSDNVPSEEVVKKMKNYWRQLLNAKLITQRKFDNLTKAERGGLSELDKAGFIKRQLVETRQITKHVAQILDSRMNTKYDENDKLIREVKVITLKSKLVSDFRKDFQFYKVREINNYHHAHDAYLNAVVGTALIKKYPKLESEFVYGDYKVYDVRKMIAKSEQEIGKATAKYFFYSNIMNFFKTEITLANGEIRKRPLIETNGETGEIVWDKGRDFATVRKVLSMPQVNIVKKTEVQTGGFSKESILPKRNSDKLIARKKDWDPKKYGGFDSPTVAYSVLVVAKVEKGKSKKLKSVKELLGITIMERSSFEKNPIDFLEAKGYKEVKKDLIIKLPKYSLFELENGRKRMLASAGELQKGNELALPSKYVNFLYLASHYEKLKGSPEDNEQKQLFVEQHKHYLDEIIEQISEFSKRVILADANLDKVLSAYNKHRDKPIREQAENIIHLFTLTNLGAPAAFKYFDTTIDRKRYTSTKEVLDATLIHQSITGLYETRIDLSQLGGDGGEAAAKEAAAKEAAAKEAAAKEAAAKGGVPWILKKPLELTIKLDLEEQQGTLLNNSILSKKGKEELKQLFEKYSALWQSWENQVGHRRIRPHKIATGTVKPTPQKQYHINPKAKPDIQIVINDLLKQGVLIQKESTMNTPVYPVPKPNGRWRMVLDYRAVNKVTPLIAVQNQHSYGILGSLFKGRYKTTIDLSNGFWAHPIVPEDYWITAFTWQGKQYCWTVLPQGFLNSPGLFTGDVVDLLQGIPNVEVYVDDVYISHDSEKEHLEYLDILFNRLKEAGYIISLKKSNIANSIVDFLGFQITNEGRGLTDTFKEKLENITAPTTLKQLQSILGLLNFARNFIPDFTELIAPLYALIPKSTKNYVPWQIEHSTTLETLITKLNGAEYLQGRKGDKTLIMKVNASYTTGYIRYYNEGEKKPISYVSIVFSKTELKFTELEKLLTTVHKGLLKALDLSMGQNIHVYSPIVSMQNIQKTPQTAKKALASRWLSWLSYLEDPRIRFFYDPQMPALKDLPAVDTGKDNKKHPSNFQHIFYTDGSAITSPTKEGHLNAGMGIVYFINKDGNLQKQQEWSISLGNHTAQFAEIAAFEFALKKCLPLGGNILVVTDSNYVAKAYNEELDVWASNGFVNNRKKPLKHISKWKSVADLKRLRPDVVVTHEPGHQKLDSSPHAYGNNLADQLATQASFKVHAGKRTADGSEFEKRTADGSEFESPKKKAKVE

SEQ ID NO: 6424 - protein, 2101 aa, synthetic construct
MPAAKRVKLDGGDKKYSIGLDIGTNSVGWAVITDEYKVPSKKFKVLGNTDRHSIKKNLIGALLFDSGETAEATRLKRTARRRYTRRKNRICYLQEIFSNEMAKVDDSFFHRLEESFLVEEDKKHERHPIFGNIVDEVAYHEKYPTIYHLRKKLVDSTDKADLRLIYLALAHMIKFRGHFLIEGDLNPDNSDVDKLFIQLVQTYNQLFEENPINASGVDAKAILSARLSKSRRLENLIAQLPGEKKNGLFGNLIALSLGLTPNFKSNFDLAEDAKLQLSKDTYDDDLDNLLAQIGDQYADLFLAAKNLSDAILLSDILRVNTEITKAPLSASMIKRYDEHHQDLTLLKALVRQQLPEKYKEIFFDQSKNGYAGYIDGGASQEEFYKFIKPILEKMDGTEELLVKLNREDLLRKQRTFDNGSIPHQIHLGELHAILRRQEDFYPFLKDNREKIEKILTFRIPYYVGPLARGNSRFAWMTRKSEETITPWNFEEVVDKGASAQSFIERMTNFDKNLPNEKVLPKHSLLYEYFTVYNELTKVKYVTEGMRKPAFLSGEQKKAIVDLLFKTNRKVTVKQLKEDYFKKIECFDSVEISGVEDRFNASLGTYHDLLKIIKDKDFLDNEENEDILEDIVLTLTLFEDREMIEERLKTYAHLFDDKVMKQLKRRRYTGWGRLSRKLINGIRDKQSGKTILDFLKSDGFANRNFMQLIHDDSLTFKEDIQKAQVSGQGDSLHEHIANLAGSPAIKKGILQTVKVVDELVKVMGRHKPENIVIEMARENQTTQKGQKNSRERMKRIEEGIKELGSQILKEHPVENTQLQNEKLYLYYLQNGRDMYVDQELDINRLSDYDVDHIVPQSFLKDDSIDNKVLTRSDKARGKSDNVPSEEVVKKMKNYWRQLLNAKLITQRKFDNLTKAERGGLSELDKAGFIKRQLVETRQITKHVAQILDSRMNTKYDENDKLIREVKVITLKSKLVSDFRKDFQFYKVREINNYHHAHDAYLNAVVGTALIKKYPKLESEFVYGDYKVYDVRKMIAKSEQEIGKATAKYFFYSNIMNFFKTEITLANGEIRKRPLIETNGETGEIVWDKGRDFATVRKVLSMPQVNIVKKTEVQTGGFSKESILPKRNSDKLIARKKDWDPKKYGGFDSPTVAYSVLVVAKVEKGKSKKLKSVKELLGITIMERSSFEKNPIDFLEAKGYKEVKKDLIIKLPKYSLFELENGRKRMLASAGELQKGNELALPSKYVNFLYLASHYEKLKGSPEDNEQKQLFVEQHKHYLDEIIEQISEFSKRVILADANLDKVLSAYNKHRDKPIREQAENIIHLFTLTNLGAPAAFKYFDTTIDRKRYTSTKEVLDATLIHQSITGLYETRIDLSQLGGDGGEAAAKEAAAKEAAAKEAAAKEAAAKGGVPWILKKPLELTIKLDLEEQQGTLLNNSILSKKGKEELKQLFEKYSALWQSWENQVGHRRIRPHKIATGTVKPTPQKQYHINPKAKPDIQIVINDLLKQGVLIQKESTMNTPVYPVPKPNGRWRMVLDYRAVNKVTPLIAVQNQHSYGILGSLFKGRYKTTIDLSNGFWAHPIVPEDYWITAFTWQGKQYCWTVLPQGFLNSPGLFNGDVVDLLQGIPNVEVYVDDVYISHDSEKEHLEYLDILFNRLKEAGYIISLKKSNIANSIVDFLGFQITNEGRGLTDTFKEKLENITAPTTLKQLQSILGLLNFARNFIPDFTELIAPLYALIPKSPKNYVPWQIEHSTTLETLITKLNGAEYLQGRKGDKTLIMKVNASYTTGYIRYYNEGEKKPISYVSIVFSKTELKFTELEKLLTTVHKGLLKALDLSMGQNIHVYSPIVSMQNIQKTPQTAKKALASRWLSWLSYLEDPRIRFFYDPQMPALKDLPAVDTGKDNKKHPSNFQHIFYTDGSAITSPTKEGHLNAGMGIVYFINKDGNLQKQQEWSISLGNHTAQFAEIAAFEFALKKCLPLGGNILVVTDSNYVAKAYNEELDVWASNGFVNNRKKPLKHISKWKSVADLKRLRPDVVVTHEPGHQKLDSSPHAYGNNLADQLATQASFKVHAGKRTADGSEFEKRTADGSEFESPKKKAKVE

SEQ ID NO: 6425 - protein, 2109 aa, synthetic construct
MPAAKRVKLDGGDKKYSIGLDIGTNSVGWAVITDEYKVPSKKFKVLGNTDRHSIKKNLIGALLFDSGETAEATRLKRTARRRYTRRKNRICYLQEIFSNEMAKVDDSFFHRLEESFLVEEDKKHERHPIFGNIVDEVAYHEKYPTIYHLRKKLVDSTDKADLRLIYLALAHMIKFRGHFLIEGDLNPDNSDVDKLFIQLVQTYNQLFEENPINASGVDAKAILSARLSKSRRLENLIAQLPGEKKNGLFGNLIALSLGLTPNFKSNFDLAEDAKLQLSKDTYDDDLDNLLAQIGDQYADLFLAAKNLSDAILLSDILRVNTEITKAPLSASMIKRYDEHHQDLTLLKALVRQQLPEKYKEIFFDQSKNGYAGYIDGGASQEEFYKFIKPILEKMDGTEELLVKLNREDLLRKQRTFDNGSIPHQIHLGELHAILRRQEDFYPFLKDNREKIEKILTFRIPYYVGPLARGNSRFAWMTRKSEETITPWNFEEVVDKGASAQSFIERMTNFDKNLPNEKVLPKHSLLYEYFTVYNELTKVKYVTEGMRKPAFLSGEQKKAIVDLLFKTNRKVTVKQLKEDYFKKIECFDSVEISGVEDRFNASLGTYHDLLKIIKDKDFLDNEENEDILEDIVLTLTLFEDREMIEERLKTYAHLFDDKVMKQLKRRRYTGWGRLSRKLINGIRDKQSGKTILDFLKSDGFANRNFMQLIHDDSLTFKEDIQKAQVSGQGDSLHEHIANLAGSPAIKKGILQTVKVVDELVKVMGRHKPENIVIEMARENQTTQKGQKNSRERMKRIEEGIKELGSQILKEHPVENTQLQNEKLYLYYLQNGRDMYVDQELDINRLSDYDVDHIVPQSFLKDDSIDNKVLTRSDKARGKSDNVPSEEVVKKMKNYWRQLLNAKLITQRKFDNLTKAERGGLSELDKAGFIKRQLVETRQITKHVAQILDSRMNTKYDENDKLIREVKVITLKSKLVSDFRKDFQFYKVREINNYHHAHDAYLNAVVGTALIKKYPKLESEFVYGDYKVYDVRKMIAKSEQEIGKATAKYFFYSNIMNFFKTEITLANGEIRKRPLIETNGETGEIVWDKGRDFATVRKVLSMPQVNIVKKTEVQTGGFSKESILPKRNSDKLIARKKDWDPKKYGGFDSPTVAYSVLVVAKVEKGKSKKLKSVKELLGITIMERSSFEKNPIDFLEAKGYKEVKKDLIIKLPKYSLFELENGRKRMLASAGELQKGNELALPSKYVNFLYLASHYEKLKGSPEDNEQKQLFVEQHKHYLDEIIEQISEFSKRVILADANLDKVLSAYNKHRDKPIREQAENIIHLFTLTNLGAPAAFKYFDTTIDRKRYTSTKEVLDATLIHQSITGLYETRIDLSQLGGDGGEAAAKEAAAKEAAAKEAAAKEAAAKGGTLQLEEEYRLFEPESTQKQEMDIWLKNFPQAWAETGGMGTAHCQAPVLIQLKATATPISIRQYPMPHEAYQGIKPHIRRMLDQGILKPCQSPWNTPLLPVKKPGTEDYRPVQDLREVNKRVEDIHPTVPNPYNLLSTLPPSHPWYTVLDLKDAFFCLRLHSESQLLFAFEWRDPEIGLSGQLTWTRLPQGFKNSPTLFNEALHSDLADFRVRYPALVLLQYVDDLLLAAATRTECLEGTKALLETLGNKGYRASAKKAQICLQEVTYLGYSLKDGQRWLTKARKEAILSIPVPKNSRQVREFLGKAGYCRLFIPGFAELAAPLYPLTRPGTLFQWGTEQQLAFEDIKKALLSSPALGLPDITKPFELFIDENSGFAKGVLVQKLGPWKRPVAYLSKKLDTVASGWPPCLRMVAAIAILVKDAGKLTLGQPLTILTSHPVEALVRQPPNKWLSNARMTHYQAMLLDAERVHFGPTVSLNPATLLPLPSGGNHHDCLQILAETHGTRPDLTDQPLPDADLTWYTDGSSFIRNGEREAGAAVTTESEVIWAAPLPPGTSAQRAELIALTQALKMAEGKKLTVYTDSRYAFATTHVHGEIYRRRGWLTSEGKEIKNKNEILALLEALFLPKRLSIIHCPGHQKGDSPQAKGNRLADDTAKKAATETHSSLTVLPAGKRTADGSEFEKRTADGSEFESPKKKAKVE

SEQ ID NO: 6426 - protein, 2101 aa, synthetic construct
MPAAKRVKLDGGDKKYSIGLDIGTNSVGWAVITDEYKVPSKKFKVLGNTDRHSIKKNLIGALLFDSGETAEATRLKRTARRRYTRRKNRICYLQEIFSNEMAKVDDSFFHRLEESFLVEEDKKHERHPIFGNIVDEVAYHEKYPTIYHLRKKLVDSTDKADLRLIYLALAHMIKFRGHFLIEGDLNPDNSDVDKLFIQLVQTYNQLFEENPINASGVDAKAILSARLSKSRRLENLIAQLPGEKKNGLFGNLIALSLGLTPNFKSNFDLAEDAKLQLSKDTYDDDLDNLLAQIGDQYADLFLAAKNLSDAILLSDILRVNTEITKAPLSASMIKRYDEHHQDLTLLKALVRQQLPEKYKEIFFDQSKNGYAGYIDGGASQEEFYKFIKPILEKMDGTEELLVKLNREDLLRKQRTFDNGSIPHQIHLGELHAILRRQEDFYPFLKDNREKIEKILTFRIPYYVGPLARGNSRFAWMTRKSEETITPWNFEEVVDKGASAQSFIERMTNFDKNLPNEKVLPKHSLLYEYFTVYNELTKVKYVTEGMRKPAFLSGEQKKAIVDLLFKTNRKVTVKQLKEDYFKKIECFDSVEISGVEDRFNASLGTYHDLLKIIKDKDFLDNEENEDILEDIVLTLTLFEDREMIEERLKTYAHLFDDKVMKQLKRRRYTGWGRLSRKLINGIRDKQSGKTILDFLKSDGFANRNFMQLIHDDSLTFKEDIQKAQVSGQGDSLHEHIANLAGSPAIKKGILQTVKVVDELVKVMGRHKPENIVIEMARENQTTQKGQKNSRERMKRIEEGIKELGSQILKEHPVENTQLQNEKLYLYYLQNGRDMYVDQELDINRLSDYDVDHIVPQSFLKDDSIDNKVLTRSDKARGKSDNVPSEEVVKKMKNYWRQLLNAKLITQRKFDNLTKAERGGLSELDKAGFIKRQLVETRQITKHVAQILDSRMNTKYDENDKLIREVKVITLKSKLVSDFRKDFQFYKVREINNYHHAHDAYLNAVVGTALIKKYPKLESEFVYGDYKVYDVRKMIAKSEQEIGKATAKYFFYSNIMNFFKTEITLANGEIRKRPLIETNGETGEIVWDKGRDFATVRKVLSMPQVNIVKKTEVQTGGFSKESILPKRNSDKLIARKKDWDPKKYGGFDSPTVAYSVLVVAKVEKGKSKKLKSVKELLGITIMERSSFEKNPIDFLEAKGYKEVKKDLIIKLPKYSLFELENGRKRMLASAGELQKGNELALPSKYVNFLYLASHYEKLKGSPEDNEQKQLFVEQHKHYLDEIIEQISEFSKRVILADANLDKVLSAYNKHRDKPIREQAENIIHLFTLTNLGAPAAFKYFDTTIDRKRYTSTKEVLDATLIHQSITGLYETRIDLSQLGGDGGEAAAKEAAAKEAAAKEAAAKEAAAKGGVPWLTQQPLQLTILVPLQEYQEKILSKTALPEDQKQQLKTLFVKYDNLWQHWENQVGHRKIRPHNIATGDYPPRPQKQYPINPKAKPSIQIVIDDLLKQGVLTPQNSTMNTPVYPVPKPDGRWRMVLDYREVNKTIPLTAAQNQHSAGILATIVRQKYKTTLDLANGFWAHPITPESYWLTAFTWQGKQYCWTRLPQGFLNSPALFNADVVDLLKEIPNVQVYVDDIYLSHDDPKEHVQQLEKVFQILLQAGYVVSLKKSEIGQKTVEFLGFNITKEGRGLTDTFKTKLLNITPPKDLKQLQSILGLLNFARNFIPNFAELVQPLYNLIAPAKGKYIEWSEENTKQLNMVIEALNTASNLEERLPEQRLVIKVNTSPSAGYVRYYNETGKKPIMYLNYVFSKAELKFSMLEKLLTTMHKALIKAMDLAMGQEILVYSPIVSMTKIQKTPLPERKALPIRWITWMTYLEDPRIQFHYDKTLPELKHIPDVYTSSQSPVKHPSQYEGVFYTDGSAIKSPDPTKSNNAGMGIVHATYKPEYQVLNQWSIPLGNHTAQMAEIAAVEFACKKALKIPGPVLVITDSFYVAESANKELPYWKSNGFVNNKKKPLKHISKWKSIAECLSMKPDITIQHEKGISLQIPVFILKGNALADKLATQGSYVVNAGKRTADGSEFEKRTADGSEFESPKKKAKVE

SEQ ID NO: 6427 - protein, 2101 aa, synthetic construct
MPAAKRVKLDGGDKKYSIGLDIGTNSVGWAVITDEYKVPSKKFKVLGNTDRHSIKKNLIGALLFDSGETAEATRLKRTARRRYTRRKNRICYLQEIFSNEMAKVDDSFFHRLEESFLVEEDKKHERHPIFGNIVDEVAYHEKYPTIYHLRKKLVDSTDKADLRLIYLALAHMIKFRGHFLIEGDLNPDNSDVDKLFIQLVQTYNQLFEENPINASGVDAKAILSARLSKSRRLENLIAQLPGEKKNGLFGNLIALSLGLTPNFKSNFDLAEDAKLQLSKDTYDDDLDNLLAQIGDQYADLFLAAKNLSDAILLSDILRVNTEITKAPLSASMIKRYDEHHQDLTLLKALVRQQLPEKYKEIFFDQSKNGYAGYIDGGASQEEFYKFIKPILEKMDGTEELLVKLNREDLLRKQRTFDNGSIPHQIHLGELHAILRRQEDFYPFLKDNREKIEKILTFRIPYYVGPLARGNSRFAWMTRKSEETITPWNFEEVVDKGASAQSFIERMTNFDKNLPNEKVLPKHSLLYEYFTVYNELTKVKYVTEGMRKPAFLSGEQKKAIVDLLFKTNRKVTVKQLKEDYFKKIECFDSVEISGVEDRFNASLGTYHDLLKIIKDKDFLDNEENEDILEDIVLTLTLFEDREMIEERLKTYAHLFDDKVMKQLKRRRYTGWGRLSRKLINGIRDKQSGKTILDFLKSDGFANRNFMQLIHDDSLTFKEDIQKAQVSGQGDSLHEHIANLAGSPAIKKGILQTVKVVDELVKVMGRHKPENIVIEMARENQTTQKGQKNSRERMKRIEEGIKELGSQILKEHPVENTQLQNEKLYLYYLQNGRDMYVDQELDINRLSDYDVDHIVPQSFLKDDSIDNKVLTRSDKARGKSDNVPSEEVVKKMKNYWRQLLNAKLITQRKFDNLTKAERGGLSELDKAGFIKRQLVETRQITKHVAQILDSRMNTKYDENDKLIREVKVITLKSKLVSDFRKDFQFYKVREINNYHHAHDAYLNAVVGTALIKKYPKLESEFVYGDYKVYDVRKMIAKSEQEIGKATAKYFFYSNIMNFFKTEITLANGEIRKRPLIETNGETGEIVWDKGRDFATVRKVLSMPQVNIVKKTEVQTGGFSKESILPKRNSDKLIARKKDWDPKKYGGFDSPTVAYSVLVVAKVEKGKSKKLKSVKELLGITIMERSSFEKNPIDFLEAKGYKEVKKDLIIKLPKYSLFELENGRKRMLASAGELQKGNELALPSKYVNFLYLASHYEKLKGSPEDNEQKQLFVEQHKHYLDEIIEQISEFSKRVILADANLDKVLSAYNKHRDKPIREQAENIIHLFTLTNLGAPAAFKYFDTTIDRKRYTSTKEVLDATLIHQSITGLYETRIDLSQLGGDGGEAAAKEAAAKEAAAKEAAAKEAAAKGGVPWLTQQPLQLTILVPLQEYQEKILSKTALPEDQKQQLKTLFVKYDNLWQHWENQVGHRKIRPHNIATGDYPPRPQKQYPINPKAKPSIQIVIDDLLKQGVLTPQNSTMNTPVYPVPKPDGRWRMVLDYREVNKTIPLTAAQNQHSAGILATIVRQKYKTTLDLANGFWAHPITPESYWLTAFTWQGKQYCWTRLPQGFLNSPALFNADVVDLLKEIPNVQVYVDDIYLSHDDPKEHVQQLEKVFQILLQAGYVVSLKKSEIGQKTVEFLGFNITKEGRGLTDTFKTKLLNITPPKDLKQLQSILGKLNFARNFIPNFAELVQPLYNLIAPAKGKYIEWSEENTKQLNMVIEALNTASNLEERLPEQRLVIKVNTSPSAGYVRYYNETGKKPIMYLNYVFSKAELKFSMLEKLLTTMHKALIKAMDLAMGQEILVYSPIVSMTKIQKTPLPERKALPIRWITWMTYLEDPRIQFHYDKTLPELKHIPDVYTSSQSPVKHPSQYEGVFYTDGSAIKSPDPTKSNNAGMGIVHATYKPEYQVLNQWSIPLGNHTAQMAEIAAVEFACKKALKIPGPVLVITDSFYVAESANKELPYWKSNGFVNNKKKPLKHISKWKSIAECLSMKPDITIQHEKGISLQIPVFILKGNALADKLATQGSYVVNAGKRTADGSEFEKRTADGSEFESPKKKAKVE

SEQ ID NO: 6428 - protein, 2190 aa, synthetic construct
MPAAKRVKLDGGDKKYSIGLDIGTNSVGWAVITDEYKVPSKKFKVLGNTDRHSIKKNLIGALLFDSGETAEATRLKRTARRRYTRRKNRICYLQEIFSNEMAKVDDSFFHRLEESFLVEEDKKHERHPIFGNIVDEVAYHEKYPTIYHLRKKLVDSTDKADLRLIYLALAHMIKFRGHFLIEGDLNPDNSDVDKLFIQLVQTYNQLFEENPINASGVDAKAILSARLSKSRRLENLIAQLPGEKKNGLFGNLIALSLGLTPNFKSNFDLAEDAKLQLSKDTYDDDLDNLLAQIGDQYADLFLAAKNLSDAILLSDILRVNTEITKAPLSASMIKRYDEHHQDLTLLKALVRQQLPEKYKEIFFDQSKNGYAGYIDGGASQEEFYKFIKPILEKMDGTEELLVKLNREDLLRKQRTFDNGSIPHQIHLGELHAILRRQEDFYPFLKDNREKIEKILTFRIPYYVGPLARGNSRFAWMTRKSEETITPWNFEEVVDKGASAQSFIERMTNFDKNLPNEKVLPKHSLLYEYFTVYNELTKVKYVTEGMRKPAFLSGEQKKAIVDLLFKTNRKVTVKQLKEDYFKKIECFDSVEISGVEDRFNASLGTYHDLLKIIKDKDFLDNEENEDILEDIVLTLTLFEDREMIEERLKTYAHLFDDKVMKQLKRRRYTGWGRLSRKLINGIRDKQSGKTILDFLKSDGFANRNFMQLIHDDSLTFKEDIQKAQVSGQGDSLHEHIANLAGSPAIKKGILQTVKVVDELVKVMGRHKPENIVIEMARENQTTQKGQKNSRERMKRIEEGIKELGSQILKEHPVENTQLQNEKLYLYYLQNGRDMYVDQELDINRLSDYDVDHIVPQSFLKDDSIDNKVLTRSDKARGKSDNVPSEEVVKKMKNYWRQLLNAKLITQRKFDNLTKAERGGLSELDKAGFIKRQLVETRQITKHVAQILDSRMNTKYDENDKLIREVKVITLKSKLVSDFRKDFQFYKVREINNYHHAHDAYLNAVVGTALIKKYPKLESEFVYGDYKVYDVRKMIAKSEQEIGKATAKYFFYSNIMNFFKTEITLANGEIRKRPLIETNGETGEIVWDKGRDFATVRKVLSMPQVNIVKKTEVQTGGFSKESILPKRNSDKLIARKKDWDPKKYGGFDSPTVAYSVLVVAKVEKGKSKKLKSVKELLGITIMERSSFEKNPIDFLEAKGYKEVKKDLIIKLPKYSLFELENGRKRMLASAGELQKGNELALPSKYVNFLYLASHYEKLKGSPEDNEQKQLFVEQHKHYLDEIIEQISEFSKRVILADANLDKVLSAYNKHRDKPIREQAENIIHLFTLTNLGAPAAFKYFDTTIDRKRYTSTKEVLDATLIHQSITGLYETRIDLSQLGGDGGEAAAKEAAAKEAAAKEAAAKEAAAKGGMNPLQLLQPLPAEIKGTKLLAHWNSGATITCIPESFLEDEQPIKKTLIKTIHGEKQQNVYYVTFKVKGRKVEAEVIASPYEYILLSPTDVPWLTQQPLQLTILVPLQEYQEKILSKTALPEDQKQQLKTLFVKYDNLWQHWENQVGHRKIRPHNIATGDYPPRPQKQYPINPKAKPSIQIVIDDLLKQGVLTPQNSTMNTPVYPVPKPDGRWRMVLDYREVNKTIPLTAAQNQHSAGILATIVRQKYKTTLDLANGFWAHPITPESYWLTAFTWQGKQYCWTRLPQGFLNSPALFNADVVDLLKEIPNVQVYVDDIYLSHDDPKEHVQQLEKVFQILLQAGYVVSLKKSEIGQKTVEFLGFNITKEGRGLTDTFKTKLLNITPPKDLKQLQSILGLLNFARNFIPNFAELVQPLYNLIAPAKGKYIEWSEENTKQLNMVIEALNTASNLEERLPEQRLVIKVNTSPSAGYVRYYNETGKKPIMYLNYVFSKAELKFSMLEKLLTTMHKALIKAMDLAMGQEILVYSPIVSMTKIQKTPLPERKALPIRWITWMTYLEDPRIQFHYDKTLPELKHIPDVYTSSQSPVKHPSQYEGVFYTDGSAIKSPDPTKSNNAGMGIVHATYKPEYQVLNQWSIPLGNHTAQMAEIAAVEFACKKALKIPGPVLVITDSFYVAESANKELPYWKSNGFVNNKKKPLKHISKWKSIAECLSMKPDITIQHEKGISLQIPVFILKGNALADKLATQGSYVVNAGKRTADGSEFEKRTADGSEFESPKKKAKVE

SEQ ID NO: 6429 - protein, 2190 aa, synthetic construct
MPAAKRVKLDGGDKKYSIGLDIGTNSVGWAVITDEYKVPSKKFKVLGNTDRHSIKKNLIGALLFDSGETAEATRLKRTARRRYTRRKNRICYLQEIFSNEMAKVDDSFFHRLEESFLVEEDKKHERHPIFGNIVDEVAYHEKYPTIYHLRKKLVDSTDKADLRLIYLALAHMIKFRGHFLIEGDLNPDNSDVDKLFIQLVQTYNQLFEENPINASGVDAKAILSARLSKSRRLENLIAQLPGEKKNGLFGNLIALSLGLTPNFKSNFDLAEDAKLQLSKDTYDDDLDNLLAQIGDQYADLFLAAKNLSDAILLSDILRVNTEITKAPLSASMIKRYDEHHQDLTLLKALVRQQLPEKYKEIFFDQSKNGYAGYIDGGASQEEFYKFIKPILEKMDGTEELLVKLNREDLLRKQRTFDNGSIPHQIHLGELHAILRRQEDFYPFLKDNREKIEKILTFRIPYYVGPLARGNSRFAWMTRKSEETITPWNFEEVVDKGASAQSFIERMTNFDKNLPNEKVLPKHSLLYEYFTVYNELTKVKYVTEGMRKPAFLSGEQKKAIVDLLFKTNRKVTVKQLKEDYFKKIECFDSVEISGVEDRFNASLGTYHDLLKIIKDKDFLDNEENEDILEDIVLTLTLFEDREMIEERLKTYAHLFDDKVMKQLKRRRYTGWGRLSRKLINGIRDKQSGKTILDFLKSDGFANRNFMQLIHDDSLTFKEDIQKAQVSGQGDSLHEHIANLAGSPAIKKGILQTVKVVDELVKVMGRHKPENIVIEMARENQTTQKGQKNSRERMKRIEEGIKELGSQILKEHPVENTQLQNEKLYLYYLQNGRDMYVDQELDINRLSDYDVDHIVPQSFLKDDSIDNKVLTRSDKARGKSDNVPSEEVVKKMKNYWRQLLNAKLITQRKFDNLTKAERGGLSELDKAGFIKRQLVETRQITKHVAQILDSRMNTKYDENDKLIREVKVITLKSKLVSDFRKDFQFYKVREINNYHHAHDAYLNAVVGTALIKKYPKLESEFVYGDYKVYDVRKMIAKSEQEIGKATAKYFFYSNIMNFFKTEITLANGEIRKRPLIETNGETGEIVWDKGRDFATVRKVLSMPQVNIVKKTEVQTGGFSKESILPKRNSDKLIARKKDWDPKKYGGFDSPTVAYSVLVVAKVEKGKSKKLKSVKELLGITIMERSSFEKNPIDFLEAKGYKEVKKDLIIKLPKYSLFELENGRKRMLASAGELQKGNELALPSKYVNFLYLASHYEKLKGSPEDNEQKQLFVEQHKHYLDEIIEQISEFSKRVILADANLDKVLSAYNKHRDKPIREQAENIIHLFTLTNLGAPAAFKYFDTTIDRKRYTSTKEVLDATLIHQSITGLYETRIDLSQLGGDGGEAAAKEAAAKEAAAKEAAAKEAAAKGGMNPLQLLQPLPAEIKGTKLLAHWNSGATITCIPESFLEDEQPIKKTLIKTIHGEKQQNVYYVTFKVKGRKVEAEVIASPYEYILLSPTDVPWLTQQPLQLTILVPLQEYQEKILSKTALPEDQKQQLKTLFVKYDNLWQHWENQVGHRKIRPHNIATGDYPPRPQKQYPINPKAKPSIQIVIDDLLKQGVLTPQNSTMNTPVYPVPKPDGRWRMVLDYREVNKTIPLTAAQNQHSAGILATIVRQKYKTTLDLANGFWAHPITPESYWLTAFTWQGKQYCWTRLPQGFLNSPALFNADVVDLLKEIPNVQVYVDDIYLSHDDPKEHVQQLEKVFQILLQAGYVVSLKKSEIGQKTVEFLGFNITKEGRGLTDTFKTKLLNITPPKDLKQLQSILGKLNFARNFIPNFAELVQPLYNLIAPAKGKYIEWSEENTKQLNMVIEALNTASNLEERLPEQRLVIKVNTSPSAGYVRYYNETGKKPIMYLNYVFSKAELKFSMLEKLLTTMHKALIKAMDLAMGQEILVYSPIVSMTKIQKTPLPERKALPIRWITWMTYLEDPRIQFHYDKTLPELKHIPDVYTSSQSPVKHPSQYEGVFYTDGSAIKSPDPTKSNNAGMGIVHATYKPEYQVLNQWSIPLGNHTAQMAEIAAVEFACKKALKIPGPVLVITDSFYVAESANKELPYWKSNGFVNNKKKPLKHISKWKSIAECLSMKPDITIQHEKGISLQIPVFILKGNALADKLATQGSYVVNAGKRTADGSEFEKRTADGSEFESPKKKAKVE

SEQ ID NO: 6430 - protein, 2108 aa, synthetic construct
MPAAKRVKLDGGDKKYSIGLDIGTNSVGWAVITDEYKVPSKKFKVLGNTDRHSIKKNLIGALLFDSGETAEATRLKRTARRRYTRRKNRICYLQEIFSNEMAKVDDSFFHRLEESFLVEEDKKHERHPIFGNIVDEVAYHEKYPTIYHLRKKLVDSTDKADLRLIYLALAHMIKFRGHFLIEGDLNPDNSDVDKLFIQLVQTYNQLFEENPINASGVDAKAILSARLSKSRRLENLIAQLPGEKKNGLFGNLIALSLGLTPNFKSNFDLAEDAKLQLSKDTYDDDLDNLLAQIGDQYADLFLAAKNLSDAILLSDILRVNTEITKAPLSASMIKRYDEHHQDLTLLKALVRQQLPEKYKEIFFDQSKNGYAGYIDGGASQEEFYKFIKPILEKMDGTEELLVKLNREDLLRKQRTFDNGSIPHQIHLGELHAILRRQEDFYPFLKDNREKIEKILTFRIPYYVGPLARGNSRFAWMTRKSEETITPWNFEEVVDKGASAQSFIERMTNFDKNLPNEKVLPKHSLLYEYFTVYNELTKVKYVTEGMRKPAFLSGEQKKAIVDLLFKTNRKVTVKQLKEDYFKKIECFDSVEISGVEDRFNASLGTYHDLLKIIKDKDFLDNEENEDILEDIVLTLTLFEDREMIEERLKTYAHLFDDKVMKQLKRRRYTGWGRLSRKLINGIRDKQSGKTILDFLKSDGFANRNFMQLIHDDSLTFKEDIQKAQVSGQGDSLHEHIANLAGSPAIKKGILQTVKVVDELVKVMGRHKPENIVIEMARENQTTQKGQKNSRERMKRIEEGIKELGSQILKEHPVENTQLQNEKLYLYYLQNGRDMYVDQELDINRLSDYDVDHIVPQSFLKDDSIDNKVLTRSDKARGKSDNVPSEEVVKKMKNYWRQLLNAKLITQRKFDNLTKAERGGLSELDKAGFIKRQLVETRQITKHVAQILDSRMNTKYDENDKLIREVKVITLKSKLVSDFRKDFQFYKVREINNYHHAHDAYLNAVVGTALIKKYPKLESEFVYGDYKVYDVRKMIAKSEQEIGKATAKYFFYSNIMNFFKTEITLANGEIRKRPLIETNGETGEIVWDKGRDFATVRKVLSMPQVNIVKKTEVQTGGFSKESILPKRNSDKLIARKKDWDPKKYGGFDSPTVAYSVLVVAKVEKGKSKKLKSVKELLGITIMERSSFEKNPIDFLEAKGYKEVKKDLIIKLPKYSLFELENGRKRMLASAGELQKGNELALPSKYVNFLYLASHYEKLKGSPEDNEQKQLFVEQHKHYLDEIIEQISEFSKRVILADANLDKVLSAYNKHRDKPIREQAENIIHLFTLTNLGAPAAFKYFDTTIDRKRYTSTKEVLDATLIHQSITGLYETRIDLSQLGGDGGEAAAKEAAAKEAAAKEAAAKEAAAKGGVLNLEEEYRLHEKPVPSSIDPSWLQLFPTVWAERAGMGLANQVPPVVVELRSGASPVAVRQYPMSKEAREGIRPHIQKFLDLGVLVPCRSPWNTPLLPVKKPGTNDYRPVQDLREINKRVQDIHPTVPNPYNLLSSLPPSYTWYSVLDLKDAFFCLRLHPNSQPLFAFEWKDPEKGNTGQLTWTRLPQGFKNSPTLFNEALHRDLAPFRALNPQVVLLQYVDDLLVAAPTYEDCKKGTQKLLQELSKLGYRVSAKKAQLCQREVTYLGYLLKEGKRWLTPARKATVMKIPVPTTPRQVREFLGTAGFCRLWIPGFASLAAPLYPLTKPSIPFIWTEEHQQAFDHIKKALLSAPALALPDLTKPFTLYIDERAGVARGVLTQTLGPWRRPVAYLSKKLDPVASGWPTCLKAVAAVALLLKDADKLTLGQNVTVIASHSLESIVRQPPDRWMTNARMTHYQSLLLNERVSFAPPAVLNPATLLPVESEATPVHRCSEILAEETGTRRDLEDQPLPGVPTWYTDGSSFITEGKRRAGAPIVDGKRTVWASSLPEGTSAQKAELVALTQALRLAEGKNINIYTDSRYAFATAHIHGAIYKQRGWLTSAGKDIKNKEEILALLEAIHLPRRVAIIHCPGHQRGSNPVATGNRRADEAAKQAALSTRVLAGTTKPAGKRTADGSEFEKRTADGSEFESPKKKAKVE

SEQ ID NO: 6431 - protein, 2108 aa, synthetic construct
MPAAKRVKLDGGDKKYSIGLDIGTNSVGWAVITDEYKVPSKKFKVLGNTDRHSIKKNLIGALLFDSGETAEATRLKRTARRRYTRRKNRICYLQEIFSNEMAKVDDSFFHRLEESFLVEEDKKHERHPIFGNIVDEVAYHEKYPTIYHLRKKLVDSTDKADLRLIYLALAHMIKFRGHFLIEGDLNPDNSDVDKLFIQLVQTYNQLFEENPINASGVDAKAILSARLSKSRRLENLIAQLPGEKKNGLFGNLIALSLGLTPNFKSNFDLAEDAKLQLSKDTYDDDLDNLLAQIGDQYADLFLAAKNLSDAILLSDILRVNTEITKAPLSASMIKRYDEHHQDLTLLKALVRQQLPEKYKEIFFDQSKNGYAGYIDGGASQEEFYKFIKPILEKMDGTEELLVKLNREDLLRKQRTFDNGSIPHQIHLGELHAILRRQEDFYPFLKDNREKIEKILTFRIPYYVGPLARGNSRFAWMTRKSEETITPWNFEEVVDKGASAQSFIERMTNFDKNLPNEKVLPKHSLLYEYFTVYNELTKVKYVTEGMRKPAFLSGEQKKAIVDLLFKTNRKVTVKQLKEDYFKKIECFDSVEISGVEDRFNASLGTYHDLLKIIKDKDFLDNEENEDILEDIVLTLTLFEDREMIEERLKTYAHLFDDKVMKQLKRRRYTGWGRLSRKLINGIRDKQSGKTILDFLKSDGFANRNFMQLIHDDSLTFKEDIQKAQVSGQGDSLHEHIANLAGSPAIKKGILQTVKVVDELVKVMGRHKPENIVIEMARENQTTQKGQKNSRERMKRIEEGIKELGSQILKEHPVENTQLQNEKLYLYYLQNGRDMYVDQELDINRLSDYDVDHIVPQSFLKDDSIDNKVLTRSDKARGKSDNVPSEEVVKKMKNYWRQLLNAKLITQRKFDNLTKAERGGLSELDKAGFIKRQLVETRQITKHVAQILDSRMNTKYDENDKLIREVKVITLKSKLVSDFRKDFQFYKVREINNYHHAHDAYLNAVVGTALIKKYPKLESEFVYGDYKVYDVRKMIAKSEQEIGKATAKYFFYSNIMNFFKTEITLANGEIRKRPLIETNGETGEIVWDKGRDFATVRKVLSMPQVNIVKKTEVQTGGFSKESILPKRNSDKLIARKKDWDPKKYGGFDSPTVAYSVLVVAKVEKGKSKKLKSVKELLGITIMERSSFEKNPIDFLEAKGYKEVKKDLIIKLPKYSLFELENGRKRMLASAGELQKGNELALPSKYVNFLYLASHYEKLKGSPEDNEQKQLFVEQHKHYLDEIIEQISEFSKRVILADANLDKVLSAYNKHRDKPIREQAENIIHLFTLTNLGAPAAFKYFDTTIDRKRYTSTKEVLDATLIHQSITGLYETRIDLSQLGGDGGEAAAKEAAAKEAAAKEAAAKEAAAKGGVLNLEEEYRLHEKPVPSSIDPSWLQLFPTVWAERAGMGLANQVPPVVVELRSGASPVAVRQYPMSKEAREGIRPHIQKFLDLGVLVPCRSPWNTPLLPVKKPGTNDYRPVQDLREINKRVQDIHPTVPNPYNLLSSLPPSYTWYSVLDLKDAFFCLRLHPNSQPLFAFEWKDPEKGNTGQLTWTRLPQGFKNSPTLFNEALHRDLAPFRALNPQVVLLQYVDDLLVAAPTYEDCKKGTQKLLQELSKLGYRVSAKKAQLCQREVTYLGYLLKEGKRWLTPARKATVMKIPVPTTPRQVREFLGKAGFCRLFIPGFASLAAPLYPLTKPSIPFIWTEEHQQAFDHIKKALLSAPALALPDLTKPFTLYIDERAGVARGVLTQTLGPWRRPVAYLSKKLDPVASGWPTCLKAVAAVALLLKDADKLTLGQNVTVIASHSLESIVRQPPDRWMTNARMTHYQSLLLNERVSFAPPAVLNPATLLPVESEATPVHRCSEILAEETGTRRDLEDQPLPGVPTWYTDGSSFITEGKRRAGAPIVDGKRTVWASSLPEGTSAQKAELVALTQALRLAEGKNINIYTDSRYAFATAHIHGAIYKQRGWLTSAGKDIKNKEEILALLEAIHLPRRVAIIHCPGHQRGSNPVATGNRRADEAAKQAALSTRVLAGTTKPAGKRTADGSEFEKRTADGSEFESPKKKAKVE

SEQ ID NO: 6432 - protein, 2232 aa, synthetic construct
MPAAKRVKLDGGDKKYSIGLDIGTNSVGWAVITDEYKVPSKKFKVLGNTDRHSIKKNLIGALLFDSGETAEATRLKRTARRRYTRRKNRICYLQEIFSNEMAKVDDSFFHRLEESFLVEEDKKHERHPIFGNIVDEVAYHEKYPTIYHLRKKLVDSTDKADLRLIYLALAHMIKFRGHFLIEGDLNPDNSDVDKLFIQLVQTYNQLFEENPINASGVDAKAILSARLSKSRRLENLIAQLPGEKKNGLFGNLIALSLGLTPNFKSNFDLAEDAKLQLSKDTYDDDLDNLLAQIGDQYADLFLAAKNLSDAILLSDILRVNTEITKAPLSASMIKRYDEHHQDLTLLKALVRQQLPEKYKEIFFDQSKNGYAGYIDGGASQEEFYKFIKPILEKMDGTEELLVKLNREDLLRKQRTFDNGSIPHQIHLGELHAILRRQEDFYPFLKDNREKIEKILTFRIPYYVGPLARGNSRFAWMTRKSEETITPWNFEEVVDKGASAQSFIERMTNFDKNLPNEKVLPKHSLLYEYFTVYNELTKVKYVTEGMRKPAFLSGEQKKAIVDLLFKTNRKVTVKQLKEDYFKKIECFDSVEISGVEDRFNASLGTYHDLLKIIKDKDFLDNEENEDILEDIVLTLTLFEDREMIEERLKTYAHLFDDKVMKQLKRRRYTGWGRLSRKLINGIRDKQSGKTILDFLKSDGFANRNFMQLIHDDSLTFKEDIQKAQVSGQGDSLHEHIANLAGSPAIKKGILQTVKVVDELVKVMGRHKPENIVIEMARENQTTQKGQKNSRERMKRIEEGIKELGSQILKEHPVENTQLQNEKLYLYYLQNGRDMYVDQELDINRLSDYDVDHIVPQSFLKDDSIDNKVLTRSDKARGKSDNVPSEEVVKKMKNYWRQLLNAKLITQRKFDNLTKAERGGLSELDKAGFIKRQLVETRQITKHVAQILDSRMNTKYDENDKLIREVKVITLKSKLVSDFRKDFQFYKVREINNYHHAHDAYLNAVVGTALIKKYPKLESEFVYGDYKVYDVRKMIAKSEQEIGKATAKYFFYSNIMNFFKTEITLANGEIRKRPLIETNGETGEIVWDKGRDFATVRKVLSMPQVNIVKKTEVQTGGFSKESILPKRNSDKLIARKKDWDPKKYGGFDSPTVAYSVLVVAKVEKGKSKKLKSVKELLGITIMERSSFEKNPIDFLEAKGYKEVKKDLIIKLPKYSLFELENGRKRMLASAGELQKGNELALPSKYVNFLYLASHYEKLKGSPEDNEQKQLFVEQHKHYLDEIIEQISEFSKRVILADANLDKVLSAYNKHRDKPIREQAENIIHLFTLTNLGAPAAFKYFDTTIDRKRYTSTKEVLDATLIHQSITGLYETRIDLSQLGGDGGEAAAKEAAAKEAAAKEAAAKEAAAKGGTLGDQGSRGSDPLPEPRVTLTVEGIPTEFLVNTGAEHSVLTKPMGKMGSKRTVVAGATGSKVYPWTTKRLLKIGQKQVTHSFLVIPECPAPLLGRDLLTKLKAQIQFSTEGPQVTWEDRPAMCLVLNLEEEYRLHEKPVPPSIDPSWLQLFPMVWAEKAGMGLANQVPPVVVELKSDASPVAVRQYPMSKEAREGIRPHIQRFLDLGILVPCQSPWNTPLLPVKKPGTNDYRPVQDLREVNKRVQDIHPTVPNPYNLLSSLPPSHTWYSVLDLKDAFFCLKLHPNSQPLFAFEWRDPEKGNTGQLTWTRLPQGFKNSPTLFNEALHRDLASFRALNPQVVMLQYVDDLLVAAPTYRDCKEGTRRLLQELSKLGYRVSAKKAQLCREEVTYLGYLLKGGKRWLTPARKATVMKIPTPTTPRQVREFLGTAGFCRLWIPGFASLAAPLYPLTRPKVPFTWTEAHQEAFGRIKEALLSAPALALPDLTKPFALYVDEKEGVARGVLTQTLGPWRRPVAYLSKKLDPVASGWPTCLKAIAAVALLLKDADKLTLGQNVLVIAPHNLESIVRQPPDRWMTNARMTHYQSLLLNERVSFAPPAILNPATLLPVESDDTPIHICSEILAEETGTRPDLRDQPLPGVPAWYTDGSSFIMDGRRQAGAAIVDNKRTVWASNLPEGTSAQKAELIALTQALRLAEGKSINIYTDSRYAFATAHVHGAIYKQRGWLTSAGKDIKNKEEILALLEAIHLPKRVAIIHCPGHQRGTDPVATGNRKADEAAKQAAQSTRILTETTKNAGKRTADGSEFEKRTADGSEFESPKKKAKVE

SEQ ID NO: 6433 - protein, 2110 aa, synthetic construct
MPAAKRVKLDGGDKKYSIGLDIGTNSVGWAVITDEYKVPSKKFKVLGNTDRHSIKKNLIGALLFDSGETAEATRLKRTARRRYTRRKNRICYLQEIFSNEMAKVDDSFFHRLEESFLVEEDKKHERHPIFGNIVDEVAYHEKYPTIYHLRKKLVDSTDKADLRLIYLALAHMIKFRGHFLIEGDLNPDNSDVDKLFIQLVQTYNQLFEENPINASGVDAKAILSARLSKSRRLENLIAQLPGEKKNGLFGNLIALSLGLTPNFKSNFDLAEDAKLQLSKDTYDDDLDNLLAQIGDQYADLFLAAKNLSDAILLSDILRVNTEITKAPLSASMIKRYDEHHQDLTLLKALVRQQLPEKYKEIFFDQSKNGYAGYIDGGASQEEFYKFIKPILEKMDGTEELLVKLNREDLLRKQRTFDNGSIPHQIHLGELHAILRRQEDFYPFLKDNREKIEKILTFRIPYYVGPLARGNSRFAWMTRKSEETITPWNFEEVVDKGASAQSFIERMTNFDKNLPNEKVLPKHSLLYEYFTVYNELTKVKYVTEGMRKPAFLSGEQKKAIVDLLFKTNRKVTVKQLKEDYFKKIECFDSVEISGVEDRFNASLGTYHDLLKIIKDKDFLDNEENEDILEDIVLTLTLFEDREMIEERLKTYAHLFDDKVMKQLKRRRYTGWGRLSRKLINGIRDKQSGKTILDFLKSDGFANRNFMQLIHDDSLTFKEDIQKAQVSGQGDSLHEHIANLAGSPAIKKGILQTVKVVDELVKVMGRHKPENIVIEMARENQTTQKGQKNSRERMKRIEEGIKELGSQILKEHPVENTQLQNEKLYLYYLQNGRDMYVDQELDINRLSDYDVDHIVPQSFLKDDSIDNKVLTRSDKARGKSDNVPSEEVVKKMKNYWRQLLNAKLITQRKFDNLTKAERGGLSELDKAGFIKRQLVETRQITKHVAQILDSRMNTKYDENDKLIREVKVITLKSKLVSDFRKDFQFYKVREINNYHHAHDAYLNAVVGTALIKKYPKLESEFVYGDYKVYDVRKMIAKSEQEIGKATAKYFFYSNIMNFFKTEITLANGEIRKRPLIETNGETGEIVWDKGRDFATVRKVLSMPQVNIVKKTEVQTGGFSKESILPKRNSDKLIARKKDWDPKKYGGFDSPTVAYSVLVVAKVEKGKSKKLKSVKELLGITIMERSSFEKNPIDFLEAKGYKEVKKDLIIKLPKYSLFELENGRKRMLASAGELQKGNELALPSKYVNFLYLASHYEKLKGSPEDNEQKQLFVEQHKHYLDEIIEQISEFSKRVILADANLDKVLSAYNKHRDKPIREQAENIIHLFTLTNLGAPAAFKYFDTTIDRKRYTSTKEVLDATLIHQSITGLYETRIDLSQLGGDGGEAAAKEAAAKEAAAKEAAAKEAAAKGGTLNLEDEYRLYETSAEPEVSPGSTWLSDFPQAWAETGGMGLAVRQAPLIIPLKATSTPVSIKQYPMSQEAKLGIKPHIQRLLDQGILVPCQSPWNTPLLPVKKPGTNDYRPVQDLREVNKRVEDIHPTVPNPYNLLSGLPPSHRWYTVLDLKDAFFCLRLHPTSQPLFAFEWRDPGMGISGQLTWTRLPQGFKNSPTLFNEALHRDLADFRIQHPDLILLQYVDDILLAATSELDCQQGTRALLLTLGNLGYRASAKKAQLCQKQVKYLGYLLKEGQRWLTEARKETVMGQPTPKTPRQLREFLGTAGFCRLWIPGFAEMAAPLYPLTKPGTLFNWGPDQQKAYQEIKQALLTAPALGLPDLTKPFELFVDEKQGYAKGVLTQKLGPWRRPVAYLSKKLDPVAAGWPPCLRMVAAIAVLRKDAGKLTMGQPLVILAPHAVEALVKQPPDRWLSNARMTHYQAMLLDTDRVQFGPVVALNPATLLPLPEEGAPHDCLEILAETHGTRPDLTDQPIPDADHTWYTDGSSFLQEGQRKAGAAVTTETEVIWARALPAGTSAQRAELIALTQALKMAEGKRLNVYTDSRYAFATAHIHGEIYRRRGWLTSEGREIKNKSEILALLKALFLPKRLSIIHCLGHQKGDSAEARGNRLADQAAREAAIKTPPDTSTLLAGKRTADGSEFEKRTADGSEFESPKKKAKVE

SEQ ID NO: 6434 - protein, 2110 aa, synthetic construct; identical to SEQ ID NO: 4507

SEQ ID NO: 6435 - protein, 2110 aa, synthetic construct
MPAAKRVKLDGGDKKYSIGLDIGTNSVGWAVITDEYKVPSKKFKVLGNTDRHSIKKNLIGALLFDSGETAEATRLKRTARRRYTRRKNRICYLQEIFSNEMAKVDDSFFHRLEESFLVEEDKKHERHPIFGNIVDEVAYHEKYPTIYHLRKKLVDSTDKADLRLIYLALAHMIKFRGHFLIEGDLNPDNSDVDKLFIQLVQTYNQLFEENPINASGVDAKAILSARLSKSRRLENLIAQLPGEKKNGLFGNLIALSLGLTPNFKSNFDLAEDAKLQLSKDTYDDDLDNLLAQIGDQYADLFLAAKNLSDAILLSDILRVNTEITKAPLSASMIKRYDEHHQDLTLLKALVRQQLPEKYKEIFFDQSKNGYAGYIDGGASQEEFYKFIKPILEKMDGTEELLVKLNREDLLRKQRTFDNGSIPHQIHLGELHAILRRQEDFYPFLKDNREKIEKILTFRIPYYVGPLARGNSRFAWMTRKSEETITPWNFEEVVDKGASAQSFIERMTNFDKNLPNEKVLPKHSLLYEYFTVYNELTKVKYVTEGMRKPAFLSGEQKKAIVDLLFKTNRKVTVKQLKEDYFKKIECFDSVEISGVEDRFNASLGTYHDLLKIIKDKDFLDNEENEDILEDIVLTLTLFEDREMIEERLKTYAHLFDDKVMKQLKRRRYTGWGRLSRKLINGIRDKQSGKTILDFLKSDGFANRNFMQLIHDDSLTFKEDIQKAQVSGQGDSLHEHIANLAGSPAIKKGILQTVKVVDELVKVMGRHKPENIVIEMARENQTTQKGQKNSRERMKRIEEGIKELGSQILKEHPVENTQLQNEKLYLYYLQNGRDMYVDQELDINRLSDYDVDHIVPQSFLKDDSIDNKVLTRSDKARGKSDNVPSEEVVKKMKNYWRQLLNAKLITQRKFDNLTKAERGGLSELDKAGFIKRQLVETRQITKHVAQILDSRMNTKYDENDKLIREVKVITLKSKLVSDFRKDFQFYKVREINNYHHAHDAYLNAVVGTALIKKYPKLESEFVYGDYKVYDVRKMIAKSEQEIGKATAKYFFYSNIMNFFKTEITLANGEIRKRPLIETNGETGEIVWDKGRDFATVRKVLSMPQVNIVKKTEVQTGGFSKESILPKRNSDKLIARKKDWDPKKYGGFDSPTVAYSVLVVAKVEKGKSKKLKSVKELLGITIMERSSFEKNPIDFLEAKGYKEVKKDLIIKLPKYSLFELENGRKRMLASAGELQKGNELALPSKYVNFLYLASHYEKLKGSPEDNEQKQLFVEQHKHYLDEIIEQISEFSKRVILADANLDKVLSAYNKHRDKPIREQAENIIHLFTLTNLGAPAAFKYFDTTIDRKRYTSTKEVLDATLIHQSITGLYETRIDLSQLGGDGGEAAAKEAAAKEAAAKEAAAKEAAAKGGTLNIEDEYRLHETSKGPDVPLGSTWLSDFPQAWAETGGMGLAVRQAPLIIPLKATSTPVSIKQYPMSQEARLGIKPHIQRLLDQGILVPCQSPWNTPLLPVKKPGTNDYRPVQDLREVNKRVEDIHPTVPNPYNLLSGLPPSHQWYTVLDLKDAFFCLRLHPTSQSLFAFEWRDPEMGISGQLTWTRLPQGFKNSPTLFDEALHRDLADFRIQHPDLILLQYVDDLLLAATSELDCQQGTRALLQTLGDLGYRASAKKAQICQKQVKYLGYLLKEGQRWLTEARKETVMGQPTPKTPRQLREFLGTAGFCRLWIPGFAEMAAPLYPLTKTGTLFEWGPDQQKAYQEIKQALLTAPALGLPDLTKPFELFVDEKQGYAKGVLTQKLGPWRRPVAYLSKKLDPVAAGWPPCLRMVAAIAVLTKDAGKLTMGQPLVILAPHAVEALVKQPPDRWLSNARMTHYQALLLDTDRVQFGPIVALNPATLLPLPEEGLQHDCLDILAEAHGTRPDLTDQPLPDADHTWYTDGSSFLQEGQRKAGAAVTTETEVVWAKALPAGTSAQRAELIALTQALKMAEGKKLNVYTDSRYAFATAHIHGEIYRRRGLLTSEGKEIKNKDEILALLKALFLPKRLSIIHCPGHQKGNRAEARGNRMADQAAREVATRETPETSTLLAGKRTADGSEFEKRTADGSEFESPKKKAKVE

SEQ ID NO: 6436 - protein, 2110 aa, synthetic construct
MPAAKRVKLDGGDKKYSIGLDIGTNSVGWAVITDEYKVPSKKFKVLGNTDRHSIKKNLIGALLFDSGETAEATRLKRTARRRYTRRKNRICYLQEIFSNEMAKVDDSFFHRLEESFLVEEDKKHERHPIFGNIVDEVAYHEKYPTIYHLRKKLVDSTDKADLRLIYLALAHMIKFRGHFLIEGDLNPDNSDVDKLFIQLVQTYNQLFEENPINASGVDAKAILSARLSKSRRLENLIAQLPGEKKNGLFGNLIALSLGLTPNFKSNFDLAEDAKLQLSKDTYDDDLDNLLAQIGDQYADLFLAAKNLSDAILLSDILRVNTEITKAPLSASMIKRYDEHHQDLTLLKALVRQQLPEKYKEIFFDQSKNGYAGYIDGGASQEEFYKFIKPILEKMDGTEELLVKLNREDLLRKQRTFDNGSIPHQIHLGELHAILRRQEDFYPFLKDNREKIEKILTFRIPYYVGPLARGNSRFAWMTRKSEETITPWNFEEVVDKGASAQSFIERMTNFDKNLPNEKVLPKHSLLYEYFTVYNELTKVKYVTEGMRKPAFLSGEQKKAIVDLLFKTNRKVTVKQLKEDYFKKIECFDSVEISGVEDRFNASLGTYHDLLKIIKDKDFLDNEENEDILEDIVLTLTLFEDREMIEERLKTYAHLFDDKVMKQLKRRRYTGWGRLSRKLINGIRDKQSGKTILDFLKSDGFANRNFMQLIHDDSLTFKEDIQKAQVSGQGDSLHEHIANLAGSPAIKKGILQTVKVVDELVKVMGRHKPENIVIEMARENQTTQKGQKNSRERMKRIEEGIKELGSQILKEHPVENTQLQNEKLYLYYLQNGRDMYVDQELDINRLSDYDVDHIVPQSFLKDDSIDNKVLTRSDKARGKSDNVPSEEVVKKMKNYWRQLLNAKLITQRKFDNLTKAERGGLSELDKAGFIKRQLVETRQITKHVAQILDSRMNTKYDENDKLIREVKVITLKSKLVSDFRKDFQFYKVREINNYHHAHDAYLNAVVGTALIKKYPKLESEFVYGDYKVYDVRKMIAKSEQEIGKATAKYFFYSNIMNFFKTEITLANGEIRKRPLIETNGETGEIVWDKGRDFATVRKVLSMPQVNIVKKTEVQTGGFSKESILPKRNSDKLIARKKDWDPKKYGGFDSPTVAYSVLVVAKVEKGKSKKLKSVKELLGITIMERSSFEKNPIDFLEAKGYKEVKKDLIIKLPKYSLFELENGRKRMLASAGELQKGNELALPSKYVNFLYLASHYEKLKGSPEDNEQKQLFVEQHKHYLDEIIEQISEFSKRVILADANLDKVLSAYNKHRDKPIREQAENIIHLFTLTNLGAPAAFKYFDTTIDRKRYTSTKEVLDATLIHQSITGLYETRIDLSQLGGDGGEAAAKEAAAKEAAAKEAAAKEAAAKGGTLNIEDEHRLHETSKEPDVSLGSTWLSDFPQAWAETGGMGLAVRQAPLIIPLKATSTPVSIKQYPMSQEARLGIKPHIQRLLDQGILVPCQSPWNTPLLPVKKPGTNDYRPVQDLREVNKRVEDIHPTVPNPYNLLSGLPPSHQWYTVLDLKDAFFCLRLHPTSQPLFAFEWRDPEMGISGQLTWTRLPQGFKNSPTLFDEALHRDLADFRIQHPDLILLQYVDDLLLAATSELDCQQGTRALLQTLGNLGYRASAKKAQICQKQVKYLGYLLKEGQRWLTEARKETVMGQPTPKTPRQLREFLGTAGFCRLWIPGFAEMAAPLYPLTKTGTLFNWGPDQQKAYQEIKQALLTAPALGLPDLTKPFELFVDEKQGYAKGVLTQKLGPWRRPVAYLSKKLDPVAAGWPPCLRMVAAIAVLTKDAGKLTMGQPLVILAPHAVEALVKQPPDRWLSNARMTHYQALLLDTDRVQFGPVVALNPATLLPLPEEGLQHNCLDILAEAHGTRPDLTDQPLPDADHTWYTDGSSLLQEGQRKAGAAVTTETEVIWAKALPAGTSAQRAELIALTQALKMAEGKKLNVYTDSRYAFATAHIHGEIYRRRGLLTSEGKEIKNKDEILALLKALFLPKRLSIIHCPGHQKGHSAEARGNRMADQAARKAAITETPDTSTLLAGKRTADGSEFEKRTADGSEFESPKKKAKVE

SEQ ID NO: 6437 - protein, 2190 aa, synthetic construct
MPAAKRVKLDGGDKKYSIGLDIGTNSVGWAVITDEYKVPSKKFKVLGNTDRHSIKKNLIGALLFDSGETAEATRLKRTARRRYTRRKNRICYLQEIFSNEMAKVDDSFFHRLEESFLVEEDKKHERHPIFGNIVDEVAYHEKYPTIYHLRKKLVDSTDKADLRLIYLALAHMIKFRGHFLIEGDLNPDNSDVDKLFIQLVQTYNQLFEENPINASGVDAKAILSARLSKSRRLENLIAQLPGEKKNGLFGNLIALSLGLTPNFKSNFDLAEDAKLQLSKDTYDDDLDNLLAQIGDQYADLFLAAKNLSDAILLSDILRVNTEITKAPLSASMIKRYDEHHQDLTLLKALVRQQLPEKYKEIFFDQSKNGYAGYIDGGASQEEFYKFIKPILEKMDGTEELLVKLNREDLLRKQRTFDNGSIPHQIHLGELHAILRRQEDFYPFLKDNREKIEKILTFRIPYYVGPLARGNSRFAWMTRKSEETITPWNFEEVVDKGASAQSFIERMTNFDKNLPNEKVLPKHSLLYEYFTVYNELTKVKYVTEGMRKPAFLSGEQKKAIVDLLFKTNRKVTVKQLKEDYFKKIECFDSVEISGVEDRFNASLGTYHDLLKIIKDKDFLDNEENEDILEDIVLTLTLFEDREMIEERLKTYAHLFDDKVMKQLKRRRYTGWGRLSRKLINGIRDKQSGKTILDFLKSDGFANRNFMQLIHDDSLTFKEDIQKAQVSGQGDSLHEHIANLAGSPAIKKGILQTVKVVDELVKVMGRHKPENIVIEMARENQTTQKGQKNSRERMKRIEEGIKELGSQILKEHPVENTQLQNEKLYLYYLQNGRDMYVDQELDINRLSDYDVDHIVPQSFLKDDSIDNKVLTRSDKARGKSDNVPSEEVVKKMKNYWRQLLNAKLITQRKFDNLTKAERGGLSELDKAGFIKRQLVETRQITKHVAQILDSRMNTKYDENDKLIREVKVITLKSKLVSDFRKDFQFYKVREINNYHHAHDAYLNAVVGTALIKKYPKLESEFVYGDYKVYDVRKMIAKSEQEIGKATAKYFFYSNIMNFFKTEITLANGEIRKRPLIETNGETGEIVWDKGRDFATVRKVLSMPQVNIVKKTEVQTGGFSKESILPKRNSDKLIARKKDWDPKKYGGFDSPTVAYSVLVVAKVEKGKSKKLKSVKELLGITIMERSSFEKNPIDFLEAKGYKEVKKDLIIKLPKYSLFELENGRKRMLASAGELQKGNELALPSKYVNFLYLASHYEKLKGSPEDNEQKQLFVEQHKHYLDEIIEQISEFSKRVILADANLDKVLSAYNKHRDKPIREQAENIIHLFTLTNLGAPAAFKYFDTTIDRKRYTSTKEVLDATLIHQSITGLYETRIDLSQLGGDGGEAAAKEAAAKEAAAKEAAAKEAAAKGGMDPLQLLQPLEAEIKGTKLKAHWNSGATITCVPEAFLEDERPIQTMLIKTIHGEKQQDVYYLTFKVQGRKVEAEVLASPYDYILLNPSDVPWLMKKPLQLTVLVPLHEYQERLLQQTALPKEQKELLQKLFLKYDALWQHWENQVGHRRIKPHNIATGTLAPRPQKQYPINPKAKPSIQIVIDDLLKQGVLIQQNSTMNTPVYPVPKPDGKWRMVLDYREVNKTIPLIAAQNQHSAGILSSIYRGKYKTTLDLTNGFWAHPITPESYWLTAFTWQGKQYCWTRLPQGFLNSPALFTADVVDLLKEIPNVQAYVDDIYISHDDPQEHLEQLEKIFSILLNAGYVVSLKKSEIAQREVEFLGFNITKEGRGLTDTFKQKLLNITPPKDLKQLQSILGLLNFARNFIPNYSELVKPLYTIVANANGKFISWTEDNSNQLQHIISVLNQADNLEERNPETRLIIKVNSSPSAGYIRYYNEGSKRPIMYVNYIFSKAEAKFTQTEKLLTTMHKGLIKAMDLAMGQEILVYSPIVSMTKIQRTPLPERKALPVRWITWMTYLEDPRIQFHYDKSLPELQQIPNVTEDVIAKTKHPSEFAMVFYTDGSAIKHPDVNKSHSAGMGIAQVQFIPEYKIVHQWSIPLGDHTAQLAEIAAVEFACKKALKISGPVLIVTDSFYVAESANKELPYWKSNGFLNNKKKPLRHVSKWKSIAECLQLKPDIIIMHEKGHQQPMTTLHTEGNNLADKLATQGSYVVHAGKRTADGSEFEKRTADGSEFESPKKKAKVE

SEQ ID NO: 6438 - protein, 2110 aa, synthetic construct
MPAAKRVKLDGGDKKYSIGLDIGTNSVGWAVITDEYKVPSKKFKVLGNTDRHSIKKNLIGALLFDSGETAEATRLKRTARRRYTRRKNRICYLQEIFSNEMAKVDDSFFHRLEESFLVEEDKKHERHPIFGNIVDEVAYHEKYPTIYHLRKKLVDSTDKADLRLIYLALAHMIKFRGHFLIEGDLNPDNSDVDKLFIQLVQTYNQLFEENPINASGVDAKAILSARLSKSRRLENLIAQLPGEKKNGLFGNLIALSLGLTPNFKSNFDLAEDAKLQLSKDTYDDDLDNLLAQIGDQYADLFLAAKNLSDAILLSDILRVNTEITKAPLSASMIKRYDEHHQDLTLLKALVRQQLPEKYKEIFFDQSKNGYAGYIDGGASQEEFYKFIKPILEKMDGTEELLVKLNREDLLRKQRTFDNGSIPHQIHLGELHAILRRQEDFYPFLKDNREKIEKILTFRIPYYVGPLARGNSRFAWMTRKSEETITPWNFEEVVDKGASAQSFIERMTNFDKNLPNEKVLPKHSLLYEYFTVYNELTKVKYVTEGMRKPAFLSGEQKKAIVDLLFKTNRKVTVKQLKEDYFKKIECFDSVEISGVEDRFNASLGTYHDLLKIIKDKDFLDNEENEDILEDIVLTLTLFEDREMIEERLKTYAHLFDDKVMKQLKRRRYTGWGRLSRKLINGIRDKQSGKTILDFLKSDGFANRNFMQLIHDDSLTFKEDIQKAQVSGQGDSLHEHIANLAGSPAIKKGILQTVKVVDELVKVMGRHKPENIVIEMARENQTTQKGQKNSRERMKRIEEGIKELGSQILKEHPVENTQLQNEKLYLYYLQNGRDMYVDQELDINRLSDYDVDHIVPQSFLKDDSIDNKVLTRSDKARGKSDNVPSEEVVKKMKNYWRQLLNAKLITQRKFDNLTKAERGGLSELDKAGFIKRQLVETRQITKHVAQILDSRMNTKYDENDKLIREVKVITLKSKLVSDFRKDFQFYKVREINNYHHAHDAYLNAVVGTALIKKYPKLESEFVYGDYKVYDVRKMIAKSEQEIGKATAKYFFYSNIMNFFKTEITLANGEIRKRPLIETNGETGEIVWDKGRDFATVRKVLSMPQVNIVKKTEVQTGGFSKESILPKRNSDKLIARKKDWDPKKYGGFDSPTVAYSVLVVAKVEKGKSKKLKSVKELLGITIMERSSFEKNPIDFLEAKGYKEVKKDLIIKLPKYSLFELENGRKRMLASAGELQKGNELALPSKYVNFLYLASHYEKLKGSPEDNEQKQLFVEQHKHYLDEIIEQISEFSKRVILADANLDKVLSAYNKHRDKPIREQAENIIHLFTLTNLGAPAAFKYFDTTIDRKRYTSTKEVLDATLIHQSITGLYETRIDLSQLGGDGGEAAAKEAAAKEAAAKEAAAKEAAAKGGTLNIEDEYRLHETSKEPDVPLGSTWLSDFPQAWAETGGMGLAVRQAPLIIPLKATSTPVSIKQYPMSQEARLGIKPHIQRLLDQGILVPCQSPWNTPLLPVKKPGTNDYRPVQDLREVNKRVEDIHPTVPNPYNLLSGLPPSHQWYTVLDLKDAFFCLRLHPTSQPLFAFEWRDPEMGISGQLTWTRLPQGFKNSPTLFDEALHRDLADFRIQHPDLILLQYVDDLLLAATSEQDCQRGTRALLQTLGNLGYRASAKKAQICQKQVKYLGYLLKEGQRWLTEARKETVMGQPTPKTPRQLREFLGTAGFCRLWIPGFAEMAAPLYPLTKTGTLFNWGPDQQKAYQEIKQALLTAPALGLPDLTKPFELFVDEKQGYAKGVLTQKLGPWRRPVAYLSKKLDPVAAGWPPCLRMVAAIAVLTKDAGKLTMGQPLVILAPHAVEALVKQPPDRWLSNARMTHYQAMLLDTDRVQFGPVVALNPATLLPLPEKEAPHDCLEILAETHGTRPDLTDQPIPDADYTWYTDGSSFLQEGQRRAGAAVTTETEVIWARALPAGTSAQRAELIALTQALKMAEGKKLNVYTDSRYAFATAHVHGEIYRRRGLLTSEGREIKNKNEILALLKALFLPKRLSIIHCPGHQKGNSAEARGNRMADQAAREAAMKAVLETSTLLAGKRTADGSEFEKRTADGSEFESPKKKAKVE

SEQ ID NO: 6439 - protein, 2110 aa, synthetic construct
MPAAKRVKLDGGDKKYSIGLDIGTNSVGWAVITDEYKVPSKKFKVLGNTDRHSIKKNLIGALLFDSGETAEATRLKRTARRRYTRRKNRICYLQEIFSNEMAKVDDSFFHRLEESFLVEEDKKHERHPIFGNIVDEVAYHEKYPTIYHLRKKLVDSTDKADLRLIYLALAHMIKFRGHFLIEGDLNPDNSDVDKLFIQLVQTYNQLFEENPINASGVDAKAILSARLSKSRRLENLIAQLPGEKKNGLFGNLIALSLGLTPNFKSNFDLAEDAKLQLSKDTYDDDLDNLLAQIGDQYADLFLAAKNLSDAILLSDILRVNTEITKAPLSASMIKRYDEHHQDLTLLKALVRQQLPEKYKEIFFDQSKNGYAGYIDGGASQEEFYKFIKPILEKMDGTEELLVKLNREDLLRKQRTFDNGSIPHQIHLGELHAILRRQEDFYPFLKDNREKIEKILTFRIPYYVGPLARGNSRFAWMTRKSEETITPWNFEEVVDKGASAQSFIERMTNFDKNLPNEKVLPKHSLLYEYFTVYNELTKVKYVTEGMRKPAFLSGEQKKAIVDLLFKTNRKVTVKQLKEDYFKKIECFDSVEISGVEDRFNASLGTYHDLLKIIKDKDFLDNEENEDILEDIVLTLTLFEDREMIEERLKTYAHLFDDKVMKQLKRRRYTGWGRLSRKLINGIRDKQSGKTILDFLKSDGFANRNFMQLIHDDSLTFKEDIQKAQVSGQGDSLHEHIANLAGSPAIKKGILQTVKVVDELVKVMGRHKPENIVIEMARENQTTQKGQKNSRERMKRIEEGIKELGSQILKEHPVENTQLQNEKLYLYYLQNGRDMYVDQELDINRLSDYDVDHIVPQSFLKDDSIDNKVLTRSDKARGKSDNVPSEEVVKKMKNYWRQLLNAKLITQRKFDNLTKAERGGLSELDKAGFIKRQLVETRQITKHVAQILDSRMNTKYDENDKLIREVKVITLKSKLVSDFRKDFQFYKVREINNYHHAHDAYLNAVVGTALIKKYPKLESEFVYGDYKVYDVRKMIAKSEQEIGKATAKYFFYSNIMNFFKTEITLANGEIRKRPLIETNGETGEIVWDKGRDFATVRKVLSMPQVNIVKKTEVQTGGFSKESILPKRNSDKLIARKKDWDPKKYGGFDSPTVAYSVLVVAKVEKGKSKKLKSVKELLGITIMERSSFEKNPIDFLEAKGYKEVKKDLIIKLPKYSLFELENGRKRMLASAGELQKGNELALPSKYVNFLYLASHYEKLKGSPEDNEQKQLFVEQHKHYLDEIIEQISEFSKRVILADANLDKVLSAYNKHRDKPIREQAENIIHLFTLTNLGAPAAFKYFDTTIDRKRYTSTKEVLDATLIHQSITGLYETRIDLSQLGGDGGEAAAKEAAAKEAAAKEAAAKEAAAKGGTLNIEDEYRLHETSKEPDVPLGSTWLSDFPQAWAETGGMGLAVRQAPLIIPLKATSTPVSIKQYPMSQEARLGIKPHIQRLLDQGILVPCQSPWNTPLLPVKKPGTNDYRPVQDLREVNKRVEDIHPTVPNPYNLLSGLPPSHQWYTVLDLKDAFFCLRLHPTSQPLFAFEWRDPEMGISGQLTWTRLPQGFKNSPTLFNEALHRDLADFRIQHPDLILLQYVDDLLLAATSEQDCQRGTRALLQTLGNLGYRASAKKAQICQKQVKYLGYLLKEGQRWLTEARKETVMGQPTPKTPRQLREFLGTAGFCRLWIPGFAEMAAPLYPLTKPGTLFNWGPDQQKAYQEIKQALLTAPALGLPDLTKPFELFVDEKQGYAKGVLTQKLGPWRRPVAYLSKKLDPVAAGWPPCLRMVAAIAVLTKDAGKLTMGQPLVILAPHAVEALVKQPPDRWLSNARMTHYQAMLLDTDRVQFGPVVALNPATLLPLPEKEAPHDCLEILAETHGTRPDLTDQPIPDADYTWYTDGSSFLQEGQRRAGAAVTTETEVIWARALPAGTSAQRAELIALTQALKMAEGKKLNVYTDSRYAFATAHVHGEIYRRRGWLTSEGREIKNKNEILALLKALFLPKRLSIIHCPGHQKGNSAEARGNRMADQAAREAAMKAVLETSTLLAGKRTADGSEFEKRTADGSEFESPKKKAKVE

SEQ ID NO: 6440 - protein, 2117 aa, synthetic construct
MPAAKRVKLDGGDKKYSIGLDIGTNSVGWAVITDEYKVPSKKFKVLGNTDRHSIKKNLIGALLFDSGETAEATRLKRTARRRYTRRKNRICYLQEIFSNEMAKVDDSFFHRLEESFLVEEDKKHERHPIFGNIVDEVAYHEKYPTIYHLRKKLVDSTDKADLRLIYLALAHMIKFRGHFLIEGDLNPDNSDVDKLFIQLVQTYNQLFEENPINASGVDAKAILSARLSKSRRLENLIAQLPGEKKNGLFGNLIALSLGLTPNFKSNFDLAEDAKLQLSKDTYDDDLDNLLAQIGDQYADLFLAAKNLSDAILLSDILRVNTEITKAPLSASMIKRYDEHHQDLTLLKALVRQQLPEKYKEIFFDQSKNGYAGYIDGGASQEEFYKFIKPILEKMDGTEELLVKLNREDLLRKQRTFDNGSIPHQIHLGELHAILRRQEDFYPFLKDNREKIEKILTFRIPYYVGPLARGNSRFAWMTRKSEETITPWNFEEVVDKGASAQSFIERMTNFDKNLPNEKVLPKHSLLYEYFTVYNELTKVKYVTEGMRKPAFLSGEQKKAIVDLLFKTNRKVTVKQLKEDYFKKIECFDSVEISGVEDRFNASLGTYHDLLKIIKDKDFLDNEENEDILEDIVLTLTLFEDREMIEERLKTYAHLFDDKVMKQLKRRRYTGWGRLSRKLINGIRDKQSGKTILDFLKSDGFANRNFMQLIHDDSLTFKEDIQKAQVSGQGDSLHEHIANLAGSPAIKKGILQTVKVVDELVKVMGRHKPENIVIEMARENQTTQKGQKNSRERMKRIEEGIKELGSQILKEHPVENTQLQNEKLYLYYLQNGRDMYVDQELDINRLSDYDVDHIVPQSFLKDDSIDNKVLTRSDKARGKSDNVPSEEVVKKMKNYWRQLLNAKLITQRKFDNLTKAERGGLSELDKAGFIKRQLVETRQITKHVAQILDSRMNTKYDENDKLIREVKVITLKSKLVSDFRKDFQFYKVREINNYHHAHDAYLNAVVGTALIKKYPKLESEFVYGDYKVYDVRKMIAKSEQEIGKATAKYFFYSNIMNFFKTEITLANGEIRKRPLIETNGETGEIVWDKGRDFATVRKVLSMPQVNIVKKTEVQTGGFSKESILPKRNSDKLIARKKDWDPKKYGGFDSPTVAYSVLVVAKVEKGKSKKLKSVKELLGITIMERSSFEKNPIDFLEAKGYKEVKKDLIIKLPKYSLFELENGRKRMLASAGELQKGNELALPSKYVNFLYLASHYEKLKGSPEDNEQKQLFVEQHKHYLDEIIEQISEFSKRVILADANLDKVLSAYNKHRDKPIREQAENIIHLFTLTNLGAPAAFKYFDTTIDRKRYTSTKEVLDATLIHQSITGLYETRIDLSQLGGDGGEAAAKEAAAKEAAAKEAAAKEAAAKEAAAKGGTAPLEEEYRLFLEAPIQNVTLLEQWKREIPKVWAEINPPGLASTQAPIHVQLLSTALPVRVRQYPITLEAKRSLRETIRKFRAAGILRPVHSPWNTPLLPVRKSGTSEYRMVQDLREVNKRVETIHPTVPNPYTLLSLLPPDRIWYSVLDLKDAFFCIPLAPESQLIFAFEWADAEEGESGQLTWTRLPQGFKNSPTLFDEALNRDLQGFRLDHPSVSLLQYVDDLLIAADTQAACLSATRDLLMTLAELGYRVSGKKAQLCQEEVTYLGFKIHKGSRSLSNSRTQAILQIPVPKTKRQVREFLGTIGYCRLWIPGFAELAQPLYAATRGGNDPLVWGEKEEEAFQSLKLALTQPPALALPSLDKPFQLFVEETSGAAKGVLTQALGPWKRPVAYLSKRLDPVAAGWPRCLRAIAAAALLTREASKLTFGQDIEITSSHNLESLLRSPPDKWLTNARITQYQVLLLDPPRVRFKQTAALNPATLLPETDDTLPIHHCLDTLDSLTSTRPDLTDQPLAQAEATLFTDGSSYIRDGKRYAGAAVVTLDSVIWAEPLPIGTSAQKAELIALTKALEWSKDKSVNIYTDSRYAFATLHVHGMIYRERGLLTAGGKAIKNAPEILALLTAVWLPKRVAVMHCKGHQKDDAPTSTGNRRADEVAREVAIRPLSTQATISAGKRTADGSEFEKRTADGSEFESPKKKAKVE

SEQ ID NO: 6441 - protein, 2117 aa, synthetic construct
MPAAKRVKLDGGDKKYSIGLDIGTNSVGWAVITDEYKVPSKKFKVLGNTDRHSIKKNLIGALLFDSGETAEATRLKRTARRRYTRRKNRICYLQEIFSNEMAKVDDSFFHRLEESFLVEEDKKHERHPIFGNIVDEVAYHEKYPTIYHLRKKLVDSTDKADLRLIYLALAHMIKFRGHFLIEGDLNPDNSDVDKLFIQLVQTYNQLFEENPINASGVDAKAILSARLSKSRRLENLIAQLPGEKKNGLFGNLIALSLGLTPNFKSNFDLAEDAKLQLSKDTYDDDLDNLLAQIGDQYADLFLAAKNLSDAILLSDILRVNTEITKAPLSASMIKRYDEHHQDLTLLKALVRQQLPEKYKEIFFDQSKNGYAGYIDGGASQEEFYKFIKPILEKMDGTEELLVKLNREDLLRKQRTFDNGSIPHQIHLGELHAILRRQEDFYPFLKDNREKIEKILTFRIPYYVGPLARGNSRFAWMTRKSEETITPWNFEEVVDKGASAQSFIERMTNFDKNLPNEKVLPKHSLLYEYFTVYNELTKVKYVTEGMRKPAFLSGEQKKAIVDLLFKTNRKVTVKQLKEDYFKKIECFDSVEISGVEDRFNASLGTYHDLLKIIKDKDFLDNEENEDILEDIVLTLTLFEDREMIEERLKTYAHLFDDKVMKQLKRRRYTGWGRLSRKLINGIRDKQSGKTILDFLKSDGFANRNFMQLIHDDSLTFKEDIQKAQVSGQGDSLHEHIANLAGSPAIKKGILQTVKVVDELVKVMGRHKPENIVIEMARENQTTQKGQKNSRERMKRIEEGIKELGSQILKEHPVENTQLQNEKLYLYYLQNGRDMYVDQELDINRLSDYDVDHIVPQSFLKDDSIDNKVLTRSDKARGKSDNVPSEEVVKKMKNYWRQLLNAKLITQRKFDNLTKAERGGLSELDKAGFIKRQLVETRQITKHVAQILDSRMNTKYDENDKLIREVKVITLKSKLVSDFRKDFQFYKVREINNYHHAHDAYLNAVVGTALIKKYPKLESEFVYGDYKVYDVRKMIAKSEQEIGKATAKYFFYSNIMNFFKTEITLANGEIRKRPLIETNGETGEIVWDKGRDFATVRKVLSMPQVNIVKKTEVQTGGFSKESILPKRNSDKLIARKKDWDPKKYGGFDSPTVAYSVLVVAKVEKGKSKKLKSVKELLGITIMERSSFEKNPIDFLEAKGYKEVKKDLIIKLPKYSLFELENGRKRMLASAGELQKGNELALPSKYVNFLYLASHYEKLKGSPEDNEQKQLFVEQHKHYLDEIIEQISEFSKRVILADANLDKVLSAYNKHRDKPIREQAENIIHLFTLTNLGAPAAFKYFDTTIDRKRYTSTKEVLDATLIHQSITGLYETRIDLSQLGGDGGEAAAKEAAAKEAAAKEAAAKEAAAKEAAAKGGTAPLEEEYRLFLEAPIQNVTLLEQWKREIPKVWAEINPPGLASTQAPIHVQLLSTALPVRVRQYPITLEAKRSLRETIRKFRAAGILRPVHSPWNTPLLPVRKSGTSEYRMVQDLREVNKRVETIHPTVPNPYTLLSLLPPDRIWYSVLDLKDAFFCIPLAPESQLIFAFEWADAEEGESGQLTWTRLPQGFKNSPTLFNEALNRDLQGFRLDHPSVSLLQYVDDLLIAADTQAACLSATRDLLMTLAELGYRVSGKKAQLCQEEVTYLGFKIHKGSRSLSNSRTQAILQIPVPKTKRQVREFLGTIGYCRLWIPGFAELAQPLYAATRPGNDPLVWGEKEEEAFQSLKLALTQPPALALPSLDKPFQLFVEETSGAAKGVLTQALGPWKRPVAYLSKRLDPVAAGWPRCLRAIAAAALLTREASKLTFGQDIEITSSHNLESLLRSPPDKWLTNARITQYQVLLLDPPRVRFKQTAALNPATLLPETDDTLPIHHCLDTLDSLTSTRPDLTDQPLAQAEATLFTDGSSYIRDGKRYAGAAVVTLDSVIWAEPLPIGTSAQKAELIALTKALEWSKDKSVNIYTDSRYAFATLHVHGMIYRERGWLTAGGKAIKNAPEILALLTAVWLPKRVAVMHCKGHQKDDAPTSTGNRRADEVAREVAIRPLSTQATISAGKRTADGSEFEKRTADGSEFESPKKKAKVE

SEQ ID NO: 6442 - protein, 2121 aa, synthetic construct
MPAAKRVKLDGGDKKYSIGLDIGTNSVGWAVITDEYKVPSKKFKVLGNTDRHSIKKNLIGALLFDSGETAEATRLKRTARRRYTRRKNRICYLQEIFSNEMAKVDDSFFHRLEESFLVEEDKKHERHPIFGNIVDEVAYHEKYPTIYHLRKKLVDSTDKADLRLIYLALAHMIKFRGHFLIEGDLNPDNSDVDKLFIQLVQTYNQLFEENPINASGVDAKAILSARLSKSRRLENLIAQLPGEKKNGLFGNLIALSLGLTPNFKSNFDLAEDAKLQLSKDTYDDDLDNLLAQIGDQYADLFLAAKNLSDAILLSDILRVNTEITKAPLSASMIKRYDEHHQDLTLLKALVRQQLPEKYKEIFFDQSKNGYAGYIDGGASQEEFYKFIKPILEKMDGTEELLVKLNREDLLRKQRTFDNGSIPHQIHLGELHAILRRQEDFYPFLKDNREKIEKILTFRIPYYVGPLARGNSRFAWMTRKSEETITPWNFEEVVDKGASAQSFIERMTNFDKNLPNEKVLPKHSLLYEYFTVYNELTKVKYVTEGMRKPAFLSGEQKKAIVDLLFKTNRKVTVKQLKEDYFKKIECFDSVEISGVEDRFNASLGTYHDLLKIIKDKDFLDNEENEDILEDIVLTLTLFEDREMIEERLKTYAHLFDDKVMKQLKRRRYTGWGRLSRKLINGIRDKQSGKTILDFLKSDGFANRNFMQLIHDDSLTFKEDIQKAQVSGQGDSLHEHIANLAGSPAIKKGILQTVKVVDELVKVMGRHKPENIVIEMARENQTTQKGQKNSRERMKRIEEGIKELGSQILKEHPVENTQLQNEKLYLYYLQNGRDMYVDQELDINRLSDYDVDHIVPQSFLKDDSIDNKVLTRSDKARGKSDNVPSEEVVKKMKNYWRQLLNAKLITQRKFDNLTKAERGGLSELDKAGFIKRQLVETRQITKHVAQILDSRMNTKYDENDKLIREVKVITLKSKLVSDFRKDFQFYKVREINNYHHAHDAYLNAVVGTALIKKYPKLESEFVYGDYKVYDVRKMIAKSEQEIGKATAKYFFYSNIMNFFKTEITLANGEIRKRPLIETNGETGEIVWDKGRDFATVRKVLSMPQVNIVKKTEVQTGGFSKESILPKRNSDKLIARKKDWDPKKYGGFDSPTVAYSVLVVAKVEKGKSKKLKSVKELLGITIMERSSFEKNPIDFLEAKGYKEVKKDLIIKLPKYSLFELENGRKRMLASAGELQKGNELALPSKYVNFLYLASHYEKLKGSPEDNEQKQLFVEQHKHYLDEIIEQISEFSKRVILADANLDKVLSAYNKHRDKPIREQAENIIHLFTLTNLGAPAAFKYFDTTIDRKRYTSTKEVLDATLIHQSITGLYETRIDLSQLGGDGGEAAAKEAAAKEAAAKEAAAKEAAAKEAAAKGGTVSLQDEHRLFDIPVTTSLPDVWLQDFPQAWAETGGLGRAKCQAPIIIDLKPTAVPVSIKQYPMSLEAHMGIRQHIIKFLELGVLRPCRSPWNTPLLPVKKPGTQDYRPVQDLREINKRTVDIHPTVPNPYNLLSTLKPDYSWYTVLDLKDAFFCLPLAPQSQELFAFEWKDPERGISGQLTWTRLPQGFKNSPTLFDEALHRDLTDFRTQHPEVTLLQYVDDLLLAAPTKKACTQGTRHLLQELGEKGYRASAKKAQICQTKVTYLGYILSEGKRWLTPGRIETVARIPPPRNPREVREFLGTAGFCRLWIPGFAELAAPLYALTKESTPFTWQTEHQLAFEALKKALLSAPALGLPDTSKPFTLFLDERQGIAKGVLTQKLGPWKRPVAYLSKKLDPVAAGWPPCLRIMAATAMLVKDSAKLTLGQPLTVITPHTLEAIVRQPPDRWITNARLTHYQALLLDTDRVQFGPPVTLNPATLLPVPENQPSPHDCRQVLAETHGTREDLKDQELPDADHTWYTDGSSYLDSGTRRAGAAVVDGHNTIWAQSLPPGTSAQKAELIALTKALELSKGKKANIYTDSRYAFATAHTHGSIYERRGLLTSEGKEIKNKAEIIALLKALFLPQEVAIIHCPGHQKGQDPVAVGNRQADRVARQAAMAEVLTLATEPDNTSHITAGKRTADGSEFEKRTADGSEFESPKKKAKVE

SEQ ID NO: 6443 - protein, 2192 aa, synthetic construct
MPAAKRVKLDGGDKKYSIGLDIGTNSVGWAVITDEYKVPSKKFKVLGNTDRHSIKKNLIGALLFDSGETAEATRLKRTARRRYTRRKNRICYLQEIFSNEMAKVDDSFFHRLEESFLVEEDKKHERHPIFGNIVDEVAYHEKYPTIYHLRKKLVDSTDKADLRLIYLALAHMIKFRGHFLIEGDLNPDNSDVDKLFIQLVQTYNQLFEENPINASGVDAKAILSARLSKSRRLENLIAQLPGEKKNGLFGNLIALSLGLTPNFKSNFDLAEDAKLQLSKDTYDDDLDNLLAQIGDQYADLFLAAKNLSDAILLSDILRVNTEITKAPLSASMIKRYDEHHQDLTLLKALVRQQLPEKYKEIFFDQSKNGYAGYIDGGASQEEFYKFIKPILEKMDGTEELLVKLNREDLLRKQRTFDNGSIPHQIHLGELHAILRRQEDFYPFLKDNREKIEKILTFRIPYYVGPLARGNSRFAWMTRKSEETITPWNFEEVVDKGASAQSFIERMTNFDKNLPNEKVLPKHSLLYEYFTVYNELTKVKYVTEGMRKPAFLSGEQKKAIVDLLFKTNRKVTVKQLKEDYFKKIECFDSVEISGVEDRFNASLGTYHDLLKIIKDKDFLDNEENEDILEDIVLTLTLFEDREMIEERLKTYAHLFDDKVMKQLKRRRYTGWGRLSRKLINGIRDKQSGKTILDFLKSDGFANRNFMQLIHDDSLTFKEDIQKAQVSGQGDSLHEHIANLAGSPAIKKGILQTVKVVDELVKVMGRHKPENIVIEMARENQTTQKGQKNSRERMKRIEEGIKELGSQILKEHPVENTQLQNEKLYLYYLQNGRDMYVDQELDINRLSDYDVDHIVPQSFLKDDSIDNKVLTRSDKARGKSDNVPSEEVVKKMKNYWRQLLNAKLITQRKFDNLTKAERGGLSELDKAGFIKRQLVETRQITKHVAQILDSRMNTKYDENDKLIREVKVITLKSKLVSDFRKDFQFYKVREINNYHHAHDAYLNAVVGTALIKKYPKLESEFVYGDYKVYDVRKMIAKSEQEIGKATAKYFFYSNIMNFFKTEITLANGEIRKRPLIETNGETGEIVWDKGRDFATVRKVLSMPQVNIVKKTEVQTGGFSKESILPKRNSDKLIARKKDWDPKKYGGFDSPTVAYSVLVVAKVEKGKSKKLKSVKELLGITIMERSSFEKNPIDFLEAKGYKEVKKDLIIKLPKYSLFELENGRKRMLASAGELQKGNELALPSKYVNFLYLASHYEKLKGSPEDNEQKQLFVEQHKHYLDEIIEQISEFSKRVILADANLDKVLSAYNKHRDKPIREQAENIIHLFTLTNLGAPAAFKYFDTTIDRKRYTSTKEVLDATLIHQSITGLYETRIDLSQLGGDGGEAAAKEAAAKEAAAKEAAAKEAAAKEAAAKGGMDLLKPLTVERKGVKIKGYWNSQADITCVPKDLLQGEEPVRQQNVTTIHGTQEGDVYYVNLKIDGRRINTEVIGTTLDYAIITPGDVPWILKKPLELTIKLDLEEQQGTLLNNSILSKKGKEELKQLFEKYSALWQSWENQVGHRRIRPHKIATGTVKPTPQKQYHINPKAKPDIQIVINDLLKQGVLIQKESTMNTPVYPVPKPNGRWRMVLDYRAVNKVTPLIAVQNQHSYGILGSLFKGRYKTTIDLSNGFWAHPIVPEDYWITAFTWQGKQYCWTVLPQGFLNSPGLFTGDVVDLLQGIPNVEVYVDDVYISHDSEKEHLEYLDILFNRLKEAGYIISLKKSNIANSIVDFLGFQITNEGRGLTDTFKEKLENITAPTTLKQLQSILGLLNFARNFIPDFTELIAPLYALIPKSTKNYVPWQIEHSTTLETLITKLNGAEYLQGRKGDKTLIMKVNASYTTGYIRYYNEGEKKPISYVSIVFSKTELKFTELEKLLTTVHKGLLKALDLSMGQNIHVYSPIVSMQNIQKTPQTAKKALASRWLSWLSYLEDPRIRFFYDPQMPALKDLPAVDTGKDNKKHPSNFQHIFYTDGSAITSPTKEGHLNAGMGIVYFINKDGNLQKQQEWSISLGNHTAQFAEIAAFEFALKKCLPLGGNILVVTDSNYVAKAYNEELDVWASNGFVNNRKKPLKHISKWKSVADLKRLRPDVVVTHEPGHQKLDSSPHAYGNNLADQLATQASFKVHAGKRTADGSEFEKRTADGSEFESPKKKAKVE

SEQ ID NO: 6444 - protein, 2106 aa, synthetic construct
MPAAKRVKLDGGDKKYSIGLDIGTNSVGWAVITDEYKVPSKKFKVLGNTDRHSIKKNLIGALLFDSGETAEATRLKRTARRRYTRRKNRICYLQEIFSNEMAKVDDSFFHRLEESFLVEEDKKHERHPIFGNIVDEVAYHEKYPTIYHLRKKLVDSTDKADLRLIYLALAHMIKFRGHFLIEGDLNPDNSDVDKLFIQLVQTYNQLFEENPINASGVDAKAILSARLSKSRRLENLIAQLPGEKKNGLFGNLIALSLGLTPNFKSNFDLAEDAKLQLSKDTYDDDLDNLLAQIGDQYADLFLAAKNLSDAILLSDILRVNTEITKAPLSASMIKRYDEHHQDLTLLKALVRQQLPEKYKEIFFDQSKNGYAGYIDGGASQEEFYKFIKPILEKMDGTEELLVKLNREDLLRKQRTFDNGSIPHQIHLGELHAILRRQEDFYPFLKDNREKIEKILTFRIPYYVGPLARGNSRFAWMTRKSEETITPWNFEEVVDKGASAQSFIERMTNFDKNLPNEKVLPKHSLLYEYFTVYNELTKVKYVTEGMRKPAFLSGEQKKAIVDLLFKTNRKVTVKQLKEDYFKKIECFDSVEISGVEDRFNASLGTYHDLLKIIKDKDFLDNEENEDILEDIVLTLTLFEDREMIEERLKTYAHLFDDKVMKQLKRRRYTGWGRLSRKLINGIRDKQSGKTILDFLKSDGFANRNFMQLIHDDSLTFKEDIQKAQVSGQGDSLHEHIANLAGSPAIKKGILQTVKVVDELVKVMGRHKPENIVIEMARENQTTQKGQKNSRERMKRIEEGIKELGSQILKEHPVENTQLQNEKLYLYYLQNGRDMYVDQELDINRLSDYDVDHIVPQSFLKDDSIDNKVLTRSDKARGKSDNVPSEEVVKKMKNYWRQLLNAKLITQRKFDNLTKAERGGLSELDKAGFIKRQLVETRQITKHVAQILDSRMNTKYDENDKLIREVKVITLKSKLVSDFRKDFQFYKVREINNYHHAHDAYLNAVVGTALIKKYPKLESEFVYGDYKVYDVRKMIAKSEQEIGKATAKYFFYSNIMNFFKTEITLANGEIRKRPLIETNGETGEIVWDKGRDFATVRKVLSMPQVNIVKKTEVQTGGFSKESILPKRNSDKLIARKKDWDPKKYGGFDSPTVAYSVLVVAKVEKGKSKKLKSVKELLGITIMERSSFEKNPIDFLEAKGYKEVKKDLIIKLPKYSLFELENGRKRMLASAGELQKGNELALPSKYVNFLYLASHYEKLKGSPEDNEQKQLFVEQHKHYLDEIIEQISEFSKRVILADANLDKVLSAYNKHRDKPIREQAENIIHLFTLTNLGAPAAFKYFDTTIDRKRYTSTKEVLDATLIHQSITGLYETRIDLSQLGGDGGEAAAKEAAAKEAAAKEAAAKEAAAKEAAAKGGVPWILKKPLELTIKLDLEEQQGTLLNNSILSKKGKEELKQLFEKYSALWQSWENQVGHRRIRPHKIATGTVKPTPQKQYHINPKAKPDIQIVINDLLKQGVLIQKESTMNTPVYPVPKPNGRWRMVLDYRAVNKVTPLIAVQNQHSYGILGSLFKGRYKTTIDLSNGFWAHPIVPEDYWITAFTWQGKQYCWTVLPQGFLNSPGLFTGDVVDLLQGIPNVEVYVDDVYISHDSEKEHLEYLDILFNRLKEAGYIISLKKSNIANSIVDFLGFQITNEGRGLTDTFKEKLENITAPTTLKQLQSILGLLNFARNFIPDFTELIAPLYALIPKSTKNYVPWQIEHSTTLETLITKLNGAEYLQGRKGDKTLIMKVNASYTTGYIRYYNEGEKKPISYVSIVFSKTELKFTELEKLLTTVHKGLLKALDLSMGQNIHVYSPIVSMQNIQKTPQTAKKALASRWLSWLSYLEDPRIRFFYDPQMPALKDLPAVDTGKDNKKHPSNFQHIFYTDGSAITSPTKEGHLNAGMGIVYFINKDGNLQKQQEWSISLGNHTAQFAEIAAFEFALKKCLPLGGNILVVTDSNYVAKAYNEELDVWASNGFVNNRKKPLKHISKWKSVADLKRLRPDVVVTHEPGHQKLDSSPHAYGNNLADQLATQASFKVHAGKRTADGSEFEKRTADGSEFESPKKKAKVE

SEQ ID NO: 6445 - protein, 2192 aa, synthetic construct
MPAAKRVKLDGGDKKYSIGLDIGTNSVGWAVITDEYKVPSKKFKVLGNTDRHSIKKNLIGALLFDSGETAEATRLKRTARRRYTRRKNRICYLQEIFSNEMAKVDDSFFHRLEESFLVEEDKKHERHPIFGNIVDEVAYHEKYPTIYHLRKKLVDSTDKADLRLIYLALAHMIKFRGHFLIEGDLNPDNSDVDKLFIQLVQTYNQLFEENPINASGVDAKAILSARLSKSRRLENLIAQLPGEKKNGLFGNLIALSLGLTPNFKSNFDLAEDAKLQLSKDTYDDDLDNLLAQIGDQYADLFLAAKNLSDAILLSDILRVNTEITKAPLSASMIKRYDEHHQDLTLLKALVRQQLPEKYKEIFFDQSKNGYAGYIDGGASQEEFYKFIKPILEKMDGTEELLVKLNREDLLRKQRTFDNGSIPHQIHLGELHAILRRQEDFYPFLKDNREKIEKILTFRIPYYVGPLARGNSRFAWMTRKSEETITPWNFEEVVDKGASAQSFIERMTNFDKNLPNEKVLPKHSLLYEYFTVYNELTKVKYVTEGMRKPAFLSGEQKKAIVDLLFKTNRKVTVKQLKEDYFKKIECFDSVEISGVEDRFNASLGTYHDLLKIIKDKDFLDNEENEDILEDIVLTLTLFEDREMIEERLKTYAHLFDDKVMKQLKRRRYTGWGRLSRKLINGIRDKQSGKTILDFLKSDGFANRNFMQLIHDDSLTFKEDIQKAQVSGQGDSLHEHIANLAGSPAIKKGILQTVKVVDELVKVMGRHKPENIVIEMARENQTTQKGQKNSRERMKRIEEGIKELGSQILKEHPVENTQLQNEKLYLYYLQNGRDMYVDQELDINRLSDYDVDHIVPQSFLKDDSIDNKVLTRSDKARGKSDNVPSEEVVKKMKNYWRQLLNAKLITQRKFDNLTKAERGGLSELDKAGFIKRQLVETRQITKHVAQILDSRMNTKYDENDKLIREVKVITLKSKLVSDFRKDFQFYKVREINNYHHAHDAYLNAVVGTALIKKYPKLESEFVYGDYKVYDVRKMIAKSEQEIGKATAKYFFYSNIMNFFKTEITLANGEIRKRPLIETNGETGEIVWDKGRDFATVRKVLSMPQVNIVKKTEVQTGGFSKESILPKRNSDKLIARKKDWDPKKYGGFDSPTVAYSVLVVAKVEKGKSKKLKSVKELLGITIMERSSFEKNPIDFLEAKGYKEVKKDLIIKLPKYSLFELENGRKRMLASAGELQKGNELALPSKYVNFLYLASHYEKLKGSPEDNEQKQLFVEQHKHYLDEIIEQISEFSKRVILADANLDKVLSAYNKHRDKPIREQAENIIHLFTLTNLGAPAAFKYFDTTIDRKRYTSTKEVLDATLIHQSITGLYETRIDLSQLGGDGGEAAAKEAAAKEAAAKEAAAKEAAAKEAAAKGGMDLLKPLTVERKGVKIKGYWNSQADITCVPKDLLQGEEPVRQQNVTTIHGTQEGDVYYVNLKIDGRRINTEVIGTTLDYAIITPGDVPWILKKPLELTIKLDLEEQQGTLLNNSILSKKGKEELKQLFEKYSALWQSWENQVGHRRIRPHKIATGTVKPTPQKQYHINPKAKPDIQIVINDLLKQGVLIQKESTMNTPVYPVPKPNGRWRMVLDYRAVNKVTPLIAVQNQHSYGILGSLFKGRYKTTIDLSNGFWAHPIVPEDYWITAFTWQGKQYCWTVLPQGFLNSPGLFNGDVVDLLQGIPNVEVYVDDVYISHDSEKEHLEYLDILFNRLKEAGYIISLKKSNIANSIVDFLGFQITNEGRGLTDTFKEKLENITAPTTLKQLQSILGLLNFARNFIPDFTELIAPLYALIPKSPKNYVPWQIEHSTTLETLITKLNGAEYLQGRKGDKTLIMKVNASYTTGYIRYYNEGEKKPISYVSIVFSKTELKFTELEKLLTTVHKGLLKALDLSMGQNIHVYSPIVSMQNIQKTPQTAKKALASRWLSWLSYLEDPRIRFFYDPQMPALKDLPAVDTGKDNKKHPSNFQHIFYTDGSAITSPTKEGHLNAGMGIVYFINKDGNLQKQQEWSISLGNHTAQFAEIAAFEFALKKCLPLGGNILVVTDSNYVAKAYNEELDVWASNGFVNNRKKPLKHISKWKSVADLKRLRPDVVVTHEPGHQKLDSSPHAYGNNLADQLATQASFKVHAGKRTADGSEFEKRTADGSEFESPKKKAKVE

SEQ ID NO: 6446 - protein, 2192 aa, synthetic construct
MPAAKRVKLDGGDKKYSIGLDIGTNSVGWAVITDEYKVPSKKFKVLGNTDRHSIKKNLIGALLFDSGETAEATRLKRTARRRYTRRKNRICYLQEIFSNEMAKVDDSFFHRLEESFLVEEDKKHERHPIFGNIVDEVAYHEKYPTIYHLRKKLVDSTDKADLRLIYLALAHMIKFRGHFLIEGDLNPDNSDVDKLFIQLVQTYNQLFEENPINASGVDAKAILSARLSKSRRLENLIAQLPGEKKNGLFGNLIALSLGLTPNFKSNFDLAEDAKLQLSKDTYDDDLDNLLAQIGDQYADLFLAAKNLSDAILLSDILRVNTEITKAPLSASMIKRYDEHHQDLTLLKALVRQQLPEKYKEIFFDQSKNGYAGYIDGGASQEEFYKFIKPILEKMDGTEELLVKLNREDLLRKQRTFDNGSIPHQIHLGELHAILRRQEDFYPFLKDNREKIEKILTFRIPYYVGPLARGNSRFAWMTRKSEETITPWNFEEVVDKGASAQSFIERMTNFDKNLPNEKVLPKHSLLYEYFTVYNELTKVKYVTEGMRKPAFLSGEQKKAIVDLLFKTNRKVTVKQLKEDYFKKIECFDSVEISGVEDRFNASLGTYHDLLKIIKDKDFLDNEENEDILEDIVLTLTLFEDREMIEERLKTYAHLFDDKVMKQLKRRRYTGWGRLSRKLINGIRDKQSGKTILDFLKSDGFANRNFMQLIHDDSLTFKEDIQKAQVSGQGDSLHEHIANLAGSPAIKKGILQTVKVVDELVKVMGRHKPENIVIEMARENQTTQKGQKNSRERMKRIEEGIKELGSQILKEHPVENTQLQNEKLYLYYLQNGRDMYVDQELDINRLSDYDVDHIVPQSFLKDDSIDNKVLTRSDKARGKSDNVPSEEVVKKMKNYWRQLLNAKLITQRKFDNLTKAERGGLSELDKAGFIKRQLVETRQITKHVAQILDSRMNTKYDENDKLIREVKVITLKSKLVSDFRKDFQFYKVREINNYHHAHDAYLNAVVGTALIKKYPKLESEFVYGDYKVYDVRKMIAKSEQEIGKATAKYFFYSNIMNFFKTEITLANGEIRKRPLIETNGETGEIVWDKGRDFATVRKVLSMPQVNIVKKTEVQTGGFSKESILPKRNSDKLIARKKDWDPKKYGGFDSPTVAYSVLVVAKVEKGKSKKLKSVKELLGITIMERSSFEKNPIDFLEAKGYKEVKKDLIIKLPKYSLFELENGRKRMLASAGELQKGNELALPSKYVNFLYLASHYEKLKGSPEDNEQKQLFVEQHKHYLDEIIEQISEFSKRVILADANLDKVLSAYNKHRDKPIREQAENIIHLFTLTNLGAPAAFKYFDTTIDRKRYTSTKEVLDATLIHQSITGLYETRIDLSQLGGDGGEAAAKEAAAKEAAAKEAAAKEAAAKEAAAKGGMDLLKPLTVERKGVKIKGYWNSQADITCVPKDLLQGEEPVRQQNVTTIHGTQEGDVYYVNLKIDGRRINTEVIGTTLDYAIITPGDVPWILKKPLELTIKLDLEEQQGTLLNNSILSKKGKEELKQLFEKYSALWQSWENQVGHRRIRPHKIATGTVKPTPQKQYHINPKAKPDIQIVINDLLKQGVLIQKESTMNTPVYPVPKPNGRWRMVLDYRAVNKVTPLIAVQNQHSYGILGSLFKGRYKTTIDLSNGFWAHPIVPEDYWITAFTWQGKQYCWTVLPQGFLNSPGLFNGDVVDLLQGIPNVEVYVDDVYISHDSEKEHLEYLDILFNRLKEAGYIISLKKSNIANSIVDFLGFQITNEGRGLTDTFKEKLENITAPTTLKQLQSILGKLNFARNFIPDFTELIAPLYALIPKSPKNYVPWQIEHSTTLETLITKLNGAEYLQGRKGDKTLIMKVNASYTTGYIRYYNEGEKKPISYVSIVFSKTELKFTELEKLLTTVHKGLLKALDLSMGQNIHVYSPIVSMQNIQKTPQTAKKALASRWLSWLSYLEDPRIRFFYDPQMPALKDLPAVDTGKDNKKHPSNFQHIFYTDGSAITSPTKEGHLNAGMGIVYFINKDGNLQKQQEWSISLGNHTAQFAEIAAFEFALKKCLPLGGNILVVTDSNYVAKAYNEELDVWASNGFVNNRKKPLKHISKWKSVADLKRLRPDVVVTHEPGHQKLDSSPHAYGNNLADQLATQASFKVHAGKRTADGSEFEKRTADGSEFESPKKKAKVE

SEQ ID NO: 6447 - protein, 2195 aa, synthetic construct
MPAAKRVKLDGGDKKYSIGLDIGTNSVGWAVITDEYKVPSKKFKVLGNTDRHSIKKNLIGALLFDSGETAEATRLKRTARRRYTRRKNRICYLQEIFSNEMAKVDDSFFHRLEESFLVEEDKKHERHPIFGNIVDEVAYHEKYPTIYHLRKKLVDSTDKADLRLIYLALAHMIKFRGHFLIEGDLNPDNSDVDKLFIQLVQTYNQLFEENPINASGVDAKAILSARLSKSRRLENLIAQLPGEKKNGLFGNLIALSLGLTPNFKSNFDLAEDAKLQLSKDTYDDDLDNLLAQIGDQYADLFLAAKNLSDAILLSDILRVNTEITKAPLSASMIKRYDEHHQDLTLLKALVRQQLPEKYKEIFFDQSKNGYAGYIDGGASQEEFYKFIKPILEKMDGTEELLVKLNREDLLRKQRTFDNGSIPHQIHLGELHAILRRQEDFYPFLKDNREKIEKILTFRIPYYVGPLARGNSRFAWMTRKSEETITPWNFEEVVDKGASAQSFIERMTNFDKNLPNEKVLPKHSLLYEYFTVYNELTKVKYVTEGMRKPAFLSGEQKKAIVDLLFKTNRKVTVKQLKEDYFKKIECFDSVEISGVEDRFNASLGTYHDLLKIIKDKDFLDNEENEDILEDIVLTLTLFEDREMIEERLKTYAHLFDDKVMKQLKRRRYTGWGRLSRKLINGIRDKQSGKTILDFLKSDGFANRNFMQLIHDDSLTFKEDIQKAQVSGQGDSLHEHIANLAGSPAIKKGILQTVKVVDELVKVMGRHKPENIVIEMARENQTTQKGQKNSRERMKRIEEGIKELGSQILKEHPVENTQLQNEKLYLYYLQNGRDMYVDQELDINRLSDYDVDHIVPQSFLKDDSIDNKVLTRSDKARGKSDNVPSEEVVKKMKNYWRQLLNAKLITQRKFDNLTKAERGGLSELDKAGFIKRQLVETRQITKHVAQILDSRMNTKYDENDKLIREVKVITLKSKLVSDFRKDFQFYKVREINNYHHAHDAYLNAVVGTALIKKYPKLESEFVYGDYKVYDVRKMIAKSEQEIGKATAKYFFYSNIMNFFKTEITLANGEIRKRPLIETNGETGEIVWDKGRDFATVRKVLSMPQVNIVKKTEVQTGGFSKESILPKRNSDKLIARKKDWDPKKYGGFDSPTVAYSVLVVAKVEKGKSKKLKSVKELLGITIMERSSFEKNPIDFLEAKGYKEVKKDLIIKLPKYSLFELENGRKRMLASAGELQKGNELALPSKYVNFLYLASHYEKLKGSPEDNEQKQLFVEQHKHYLDEIIEQISEFSKRVILADANLDKVLSAYNKHRDKPIREQAENIIHLFTLTNLGAPAAFKYFDTTIDRKRYTSTKEVLDATLIHQSITGLYETRIDLSQLGGDGGEAAAKEAAAKEAAAKEAAAKEAAAKEAAAKGGMNPLQLLQPLPAEIKGTKLLAHWNSGATITCIPESFLEDEQPIKKTLIKTIHGEKQQNVYYVTFKVKGRKVEAEVIASPYEYILLSPTDVPWLTQQPLQLTILVPLQEYQEKILSKTALPEDQKQQLKTLFVKYDNLWQHWENQVGHRKIRPHNIATGDYPPRPQKQYPINPKAKPSIQIVIDDLLKQGVLTPQNSTMNTPVYPVPKPDGRWRMVLDYREVNKTIPLTAAQNQHSAGILATIVRQKYKTTLDLANGFWAHPITPESYWLTAFTWQGKQYCWTRLPQGFLNSPALFTADVVDLLKEIPNVQVYVDDIYLSHDDPKEHVQQLEKVFQILLQAGYVVSLKKSEIGQKTVEFLGFNITKEGRGLTDTFKTKLLNITPPKDLKQLQSILGLLNFARNFIPNFAELVQPLYNLIASAKGKYIEWSEENTKQLNMVIEALNTASNLEERLPEQRLVIKVNTSPSAGYVRYYNETGKKPIMYLNYVFSKAELKFSMLEKLLTTMHKALIKAMDLAMGQEILVYSPIVSMTKIQKTPLPERKALPIRWITWMTYLEDPRIQFHYDKTLPELKHIPDVYTSSQSPVKHPSQYEGVFYTDGSAIKSPDPTKSNNAGMGIVHATYKPEYQVLNQWSIPLGNHTAQMAEIAAVEFACKKALKIPGPVLVITDSFYVAESANKELPYWKSNGFVNNKKKPLKHISKWKSIAECLSMKPDITIQHEKGISLQIPVFILKGNALADKLATQGSYVVNAGKRTADGSEFEKRTADGSEFESPKKKAKVE

SEQ ID NO: 6448 - protein, 2106 aa, synthetic construct
MPAAKRVKLDGGDKKYSIGLDIGTNSVGWAVITDEYKVPSKKFKVLGNTDRHSIKKNLIGALLFDSGETAEATRLKRTARRRYTRRKNRICYLQEIFSNEMAKVDDSFFHRLEESFLVEEDKKHERHPIFGNIVDEVAYHEKYPTIYHLRKKLVDSTDKADLRLIYLALAHMIKFRGHFLIEGDLNPDNSDVDKLFIQLVQTYNQLFEENPINASGVDAKAILSARLSKSRRLENLIAQLPGEKKNGLFGNLIALSLGLTPNFKSNFDLAEDAKLQLSKDTYDDDLDNLLAQIGDQYADLFLAAKNLSDAILLSDILRVNTEITKAPLSASMIKRYDEHHQDLTLLKALVRQQLPEKYKEIFFDQSKNGYAGYIDGGASQEEFYKFIKPILEKMDGTEELLVKLNREDLLRKQRTFDNGSIPHQIHLGELHAILRRQEDFYPFLKDNREKIEKILTFRIPYYVGPLARGNSRFAWMTRKSEETITPWNFEEVVDKGASAQSFIERMTNFDKNLPNEKVLPKHSLLYEYFTVYNELTKVKYVTEGMRKPAFLSGEQKKAIVDLLFKTNRKVTVKQLKEDYFKKIECFDSVEISGVEDRFNASLGTYHDLLKIIKDKDFLDNEENEDILEDIVLTLTLFEDREMIEERLKTYAHLFDDKVMKQLKRRRYTGWGRLSRKLINGIRDKQSGKTILDFLKSDGFANRNFMQLIHDDSLTFKEDIQKAQVSGQGDSLHEHIANLAGSPAIKKGILQTVKVVDELVKVMGRHKPENIVIEMARENQTTQKGQKNSRERMKRIEEGIKELGSQILKEHPVENTQLQNEKLYLYYLQNGRDMYVDQELDINRLSDYDVDHIVPQSFLKDDSIDNKVLTRSDKARGKSDNVPSEEVVKKMKNYWRQLLNAKLITQRKFDNLTKAERGGLSELDKAGFIKRQLVETRQITKHVAQILDSRMNTKYDENDKLIREVKVITLKSKLVSDFRKDFQFYKVREINNYHHAHDAYLNAVVGTALIKKYPKLESEFVYGDYKVYDVRKMIAKSEQEIGKATAKYFFYSNIMNFFKTEITLANGEIRKRPLIETNGETGEIVWDKGRDFATVRKVLSMPQVNIVKKTEVQTGGFSKESILPKRNSDKLIARKKDWDPKKYGGFDSPTVAYSVLVVAKVEKGKSKKLKSVKELLGITIMERSSFEKNPIDFLEAKGYKEVKKDLIIKLPKYSLFELENGRKRMLASAGELQKGNELALPSKYVNFLYLASHYEKLKGSPEDNEQKQLFVEQHKHYLDEIIEQISEFSKRVILADANLDKVLSAYNKHRDKPIREQAENIIHLFTLTNLGAPAAFKYFDTTIDRKRYTSTKEVLDATLIHQSITGLYETRIDLSQLGGDGGEAAAKEAAAKEAAAKEAAAKEAAAKEAAAKGGVPWLTQQPLQLTILVPLQEYQEKILSKTALPEDQKQQLKTLFVKYDNLWQHWENQVGHRKIRPHNIATGDYPPRPQKQYPINPKAKPSIQIVIDDLLKQGVLTPQNSTMNTPVYPVPKPDGRWRMVLDYREVNKTIPLTAAQNQHSAGILATIVRQKYKTTLDLANGFWAHPITPESYWLTAFTWQGKQYCWTRLPQGFLNSPALFNADVVDLLKEIPNVQVYVDDIYLSHDDPKEHVQQLEKVFQILLQAGYVVSLKKSEIGQKTVEFLGFNITKEGRGLTDTFKTKLLNITPPKDLKQLQSILGKLNFARNFIPNFAELVQPLYNLIAPAKGKYIEWSEENTKQLNMVIEALNTASNLEERLPEQRLVIKVNTSPSAGYVRYYNETGKKPIMYLNYVFSKAELKFSMLEKLLTTMHKALIKAMDLAMGQEILVYSPIVSMTKIQKTPLPERKALPIRWITWMTYLEDPRIQFHYDKTLPELKHIPDVYTSSQSPVKHPSQYEGVFYTDGSAIKSPDPTKSNNAGMGIVHATYKPEYQVLNQWSIPLGNHTAQMAEIAAVEFACKKALKIPGPVLVITDSFYVAESANKELPYWKSNGFVNNKKKPLKHISKWKSIAECLSMKPDITIQHEKGISLQIPVFILKGNALADKLATQGSYVVNAGKRTADGSEFEKRTADGSEFESPKKKAKVE

SEQ ID NO: 6449 - protein, 2195 aa, synthetic construct
MPAAKRVKLDGGDKKYSIGLDIGTNSVGWAVITDEYKVPSKKFKVLGNTDRHSIKKNLIGALLFDSGETAEATRLKRTARRRYTRRKNRICYLQEIFSNEMAKVDDSFFHRLEESFLVEEDKKHERHPIFGNIVDEVAYHEKYPTIYHLRKKLVDSTDKADLRLIYLALAHMIKFRGHFLIEGDLNPDNSDVDKLFIQLVQTYNQLFEENPINASGVDAKAILSARLSKSRRLENLIAQLPGEKKNGLFGNLIALSLGLTPNFKSNFDLAEDAKLQLSKDTYDDDLDNLLAQIGDQYADLFLAAKNLSDAILLSDILRVNTEITKAPLSASMIKRYDEHHQDLTLLKALVRQQLPEKYKEIFFDQSKNGYAGYIDGGASQEEFYKFIKPILEKMDGTEELLVKLNREDLLRKQRTFDNGSIPHQIHLGELHAILRRQEDFYPFLKDNREKIEKILTFRIPYYVGPLARGNSRFAWMTRKSEETITPWNFEEVVDKGASAQSFIERMTNFDKNLPNEKVLPKHSLLYEYFTVYNELTKVKYVTEGMRKPAFLSGEQKKAIVDLLFKTNRKVTVKQLKEDYFKKIECFDSVEISGVEDRFNASLGTYHDLLKIIKDKDFLDNEENEDILEDIVLTLTLFEDREMIEERLKTYAHLFDDKVMKQLKRRRYTGWGRLSRKLINGIRDKQSGKTILDFLKSDGFANRNFMQLIHDDSLTFKEDIQKAQVSGQGDSLHEHIANLAGSPAIKKGILQTVKVVDELVKVMGRHKPENIVIEMARENQTTQKGQKNSRERMKRIEEGIKELGSQILKEHPVENTQLQNEKLYLYYLQNGRDMYVDQELDINRLSDYDVDHIVPQSFLKDDSIDNKVLTRSDKARGKSDNVPSEEVVKKMKNYWRQLLNAKLITQRKFDNLTKAERGGLSELDKAGFIKRQLVETRQITKHVAQILDSRMNTKYDENDKLIREVKVITLKSKLVSDFRKDFQFYKVREINNYHHAHDAYLNAVVGTALIKKYPKLESEFVYGDYKVYDVRKMIAKSEQEIGKATAKYFFYSNIMNFFKTEITLANGEIRKRPLIETNGETGEIVWDKGRDFATVRKVLSMPQVNIVKKTEVQTGGFSKESILPKRNSDKLIARKKDWDPKKYGGFDSPTVAYSVLVVAKVEKGKSKKLKSVKELLGITIMERSSFEKNPIDFLEAKGYKEVKKDLIIKLPKYSLFELENGRKRMLASAGELQKGNELALPSKYVNFLYLASHYEKLKGSPEDNEQKQLFVEQHKHYLDEIIEQISEFSKRVILADANLDKVLSAYNKHRDKPIREQAENIIHLFTLTNLGAPAAFKYFDTTIDRKRYTSTKEVLDATLIHQSITGLYETRIDLSQLGGDGGEAAAKEAAAKEAAAKEAAAKEAAAKEAAAKGGMNPLQLLQPLPAEIKGTKLLAHWNSGATITCIPESFLEDEQPIKKTLIKTIHGEKQQNVYYVTFKVKGRKVEAEVIASPYEYILLSPTDVPWLTQQPLQLTILVPLQEYQEKILSKTALPEDQKQQLKTLFVKYDNLWQHWENQVGHRKIRPHNIATGDYPPRPQKQYPINPKAKPSIQIVIDDLLKQGVLTPQNSTMNTPVYPVPKPDGRWRMVLDYREVNKTIPLTAAQNQHSAGILATIVRQKYKTTLDLANGFWAHPITPESYWLTAFTWQGKQYCWTRLPQGFLNSPALFNADVVDLLKEIPNVQVYVDDIYLSHDDPKEHVQQLEKVFQILLQAGYVVSLKKSEIGQKTVEFLGFNITKEGRGLTDTFKTKLLNITPPKDLKQLQSILGLLNFARNFIPNFAELVQPLYNLIAPAKGKYIEWSEENTKQLNMVIEALNTASNLEERLPEQRLVIKVNTSPSAGYVRYYNETGKKPIMYLNYVFSKAELKFSMLEKLLTTMHKALIKAMDLAMGQEILVYSPIVSMTKIQKTPLPERKALPIRWITWMTYLEDPRIQFHYDKTLPELKHIPDVYTSSQSPVKHPSQYEGVFYTDGSAIKSPDPTKSNNAGMGIVHATYKPEYQVLNQWSIPLGNHTAQMAEIAAVEFACKKALKIPGPVLVITDSFYVAESANKELPYWKSNGFVNNKKKPLKHISKWKSIAECLSMKPDITIQHEKGISLQIPVFILKGNALADKLATQGSYVVNAGKRTADGSEFEKRTADGSEFESPKKKAKVE

SEQ ID NO: 6450 - protein, 2113 aa, synthetic construct
MPAAKRVKLDGGDKKYSIGLDIGTNSVGWAVITDEYKVPSKKFKVLGNTDRHSIKKNLIGALLFDSGETAEATRLKRTARRRYTRRKNRICYLQEIFSNEMAKVDDSFFHRLEESFLVEEDKKHERHPIFGNIVDEVAYHEKYPTIYHLRKKLVDSTDKADLRLIYLALAHMIKFRGHFLIEGDLNPDNSDVDKLFIQLVQTYNQLFEENPINASGVDAKAILSARLSKSRRLENLIAQLPGEKKNGLFGNLIALSLGLTPNFKSNFDLAEDAKLQLSKDTYDDDLDNLLAQIGDQYADLFLAAKNLSDAILLSDILRVNTEITKAPLSASMIKRYDEHHQDLTLLKALVRQQLPEKYKEIFFDQSKNGYAGYIDGGASQEEFYKFIKPILEKMDGTEELLVKLNREDLLRKQRTFDNGSIPHQIHLGELHAILRRQEDFYPFLKDNREKIEKILTFRIPYYVGPLARGNSRFAWMTRKSEETITPWNFEEVVDKGASAQSFIERMTNFDKNLPNEKVLPKHSLLYEYFTVYNELTKVKYVTEGMRKPAFLSGEQKKAIVDLLFKTNRKVTVKQLKEDYFKKIECFDSVEISGVEDRFNASLGTYHDLLKIIKDKDFLDNEENEDILEDIVLTLTLFEDREMIEERLKTYAHLFDDKVMKQLKRRRYTGWGRLSRKLINGIRDKQSGKTILDFLKSDGFANRNFMQLIHDDSLTFKEDIQKAQVSGQGDSLHEHIANLAGSPAIKKGILQTVKVVDELVKVMGRHKPENIVIEMARENQTTQKGQKNSRERMKRIEEGIKELGSQILKEHPVENTQLQNEKLYLYYLQNGRDMYVDQELDINRLSDYDVDHIVPQSFLKDDSIDNKVLTRSDKARGKSDNVPSEEVVKKMKNYWRQLLNAKLITQRKFDNLTKAERGGLSELDKAGFIKRQLVETRQITKHVAQILDSRMNTKYDENDKLIREVKVITLKSKLVSDFRKDFQFYKVREINNYHHAHDAYLNAVVGTALIKKYPKLESEFVYGDYKVYDVRKMIAKSEQEIGKATAKYFFYSNIMNFFKTEITLANGEIRKRPLIETNGETGEIVWDKGRDFATVRKVLSMPQVNIVKKTEVQTGGFSKESILPKRNSDKLIARKKDWDPKKYGGFDSPTVAYSVLVVAKVEKGKSKKLKSVKELLGITIMERSSFEKNPIDFLEAKGYKEVKKDLIIKLPKYSLFELENGRKRMLASAGELQKGNELALPSKYVNFLYLASHYEKLKGSPEDNEQKQLFVEQHKHYLDEIIEQISEFSKRVILADANLDKVLSAYNKHRDKPIREQAENIIHLFTLTNLGAPAAFKYFDTTIDRKRYTSTKEVLDATLIHQSITGLYETRIDLSQLGGDGGEAAAKEAAAKEAAAKEAAAKEAAAKEAAAKGGVLNLEEEYRLHEKPVPSSIDPSWLQLFPTVWAERAGMGLANQVPPVVVELRSGASPVAVRQYPMSKEAREGIRPHIQKFLDLGVLVPCRSPWNTPLLPVKKPGTNDYRPVQDLREINKRVQDIHPTVPNPYNLLSSLPPSYTWYSVLDLKDAFFCLRLHPNSQPLFAFEWKDPEKGNTGQLTWTRLPQGFKNSPTLFDEALHRDLAPFRALNPQVVLLQYVDDLLVAAPTYEDCKKGTQKLLQELSKLGYRVSAKKAQLCQREVTYLGYLLKEGKRWLTPARKATVMKIPVPTTPRQVREFLGTAGFCRLWIPGFASLAAPLYPLTKESIPFIWTEEHQQAFDHIKKALLSAPALALPDLTKPFTLYIDERAGVARGVLTQTLGPWRRPVAYLSKKLDPVASGWPTCLKAVAAVALLLKDADKLTLGQNVTVIASHSLESIVRQPPDRWMTNARMTHYQSLLLNERVSFAPPAVLNPATLLPVESEATPVHRCSEILAEETGTRRDLEDQPLPGVPTWYTDGSSFITEGKRRAGAPIVDGKRTVWASSLPEGTSAQKAELVALTQALRLAEGKNINIYTDSRYAFATAHIHGAIYKQRGLLTSAGKDIKNKEEILALLEAIHLPRRVAIIHCPGHQRGSNPVATGNRRADEAAKQAALSTRVLAGTTKPAGKRTADGSEFEKRTADGSEFESPKKKAKVE

SEQ ID NO: 6451 - protein, 2113 aa, synthetic construct
MPAAKRVKLDGGDKKYSIGLDIGTNSVGWAVITDEYKVPSKKFKVLGNTDRHSIKKNLIGALLFDSGETAEATRLKRTARRRYTRRKNRICYLQEIFSNEMAKVDDSFFHRLEESFLVEEDKKHERHPIFGNIVDEVAYHEKYPTIYHLRKKLVDSTDKADLRLIYLALAHMIKFRGHFLIEGDLNPDNSDVDKLFIQLVQTYNQLFEENPINASGVDAKAILSARLSKSRRLENLIAQLPGEKKNGLFGNLIALSLGLTPNFKSNFDLAEDAKLQLSKDTYDDDLDNLLAQIGDQYADLFLAAKNLSDAILLSDILRVNTEITKAPLSASMIKRYDEHHQDLTLLKALVRQQLPEKYKEIFFDQSKNGYAGYIDGGASQEEFYKFIKPILEKMDGTEELLVKLNREDLLRKQRTFDNGSIPHQIHLGELHAILRRQEDFYPFLKDNREKIEKILTFRIPYYVGPLARGNSRFAWMTRKSEETITPWNFEEVVDKGASAQSFIERMTNFDKNLPNEKVLPKHSLLYEYFTVYNELTKVKYVTEGMRKPAFLSGEQKKAIVDLLFKTNRKVTVKQLKEDYFKKIECFDSVEISGVEDRFNASLGTYHDLLKIIKDKDFLDNEENEDILEDIVLTLTLFEDREMIEERLKTYAHLFDDKVMKQLKRRRYTGWGRLSRKLINGIRDKQSGKTILDFLKSDGFANRNFMQLIHDDSLTFKEDIQKAQVSGQGDSLHEHIANLAGSPAIKKGILQTVKVVDELVKVMGRHKPENIVIEMARENQTTQKGQKNSRERMKRIEEGIKELGSQILKEHPVENTQLQNEKLYLYYLQNGRDMYVDQELDINRLSDYDVDHIVPQSFLKDDSIDNKVLTRSDKARGKSDNVPSEEVVKKMKNYWRQLLNAKLITQRKFDNLTKAERGGLSELDKAGFIKRQLVETRQITKHVAQILDSRMNTKYDENDKLIREVKVITLKSKLVSDFRKDFQFYKVREINNYHHAHDAYLNAVVGTALIKKYPKLESEFVYGDYKVYDVRKMIAKSEQEIGKATAKYFFYSNIMNFFKTEITLANGEIRKRPLIETNGETGEIVWDKGRDFATVRKVLSMPQVNIVKKTEVQTGGFSKESILPKRNSDKLIARKKDWDPKKYGGFDSPTVAYSVLVVAKVEKGKSKKLKSVKELLGITIMERSSFEKNPIDFLEAKGYKEVKKDLIIKLPKYSLFELENGRKRMLASAGELQKGNELALPSKYVNFLYLASHYEKLKGSPEDNEQKQLFVEQHKHYLDEIIEQISEFSKRVILADANLDKVLSAYNKHRDKPIREQAENIIHLFTLTNLGAPAAFKYFDTTIDRKRYTSTKEVLDATLIHQSITGLYETRIDLSQLGGDGGEAAAKEAAAKEAAAKEAAAKEAAAKEAAAKGGVLNLEEEYRLHEKPVPSSIDPSWLQLFPTVWAERAGMGLANQVPPVVVELRSGASPVAVRQYPMSKEAREGIRPHIQKFLDLGVLVPCRSPWNTPLLPVKKPGTNDYRPVQDLREINKRVQDIHPTVPNPYNLLSSLPPSYTWYSVLDLKDAFFCLRLHPNSQPLFAFEWKDPEKGNTGQLTWTRLPQGFKNSPTLFNEALHRDLAPFRALNPQVVLLQYVDDLLVAAPTYEDCKKGTQKLLQELSKLGYRVSAKKAQLCQREVTYLGYLLKEGKRWLTPARKATVMKIPVPTTPRQVREFLGTAGFCRLWIPGFASLAAPLYPLTKPSIPFIWTEEHQQAFDHIKKALLSAPALALPDLTKPFTLYIDERAGVARGVLTQTLGPWRRPVAYLSKKLDPVASGWPTCLKAVAAVALLLKDADKLTLGQNVTVIASHSLESIVRQPPDRWMTNARMTHYQSLLLNERVSFAPPAVLNPATLLPVESEATPVHRCSEILAEETGTRRDLEDQPLPGVPTWYTDGSSFITEGKRRAGAPIVDGKRTVWASSLPEGTSAQKAELVALTQALRLAEGKNINIYTDSRYAFATAHIHGAIYKQRGWLTSAGKDIKNKEEILALLEAIHLPRRVAIIHCPGHQRGSNPVATGNRRADEAAKQAALSTRVLAGTTKPAGKRTADGSEFEKRTADGSEFESPKKKAKVE

SEQ ID NO: 6452 - protein, 2237 aa, synthetic construct
MPAAKRVKLDGGDKKYSIGLDIGTNSVGWAVITDEYKVPSKKFKVLGNTDRHSIKKNLIGALLFDSGETAEATRLKRTARRRYTRRKNRICYLQEIFSNEMAKVDDSFFHRLEESFLVEEDKKHERHPIFGNIVDEVAYHEKYPTIYHLRKKLVDSTDKADLRLIYLALAHMIKFRGHFLIEGDLNPDNSDVDKLFIQLVQTYNQLFEENPINASGVDAKAILSARLSKSRRLENLIAQLPGEKKNGLFGNLIALSLGLTPNFKSNFDLAEDAKLQLSKDTYDDDLDNLLAQIGDQYADLFLAAKNLSDAILLSDILRVNTEITKAPLSASMIKRYDEHHQDLTLLKALVRQQLPEKYKEIFFDQSKNGYAGYIDGGASQEEFYKFIKPILEKMDGTEELLVKLNREDLLRKQRTFDNGSIPHQIHLGELHAILRRQEDFYPFLKDNREKIEKILTFRIPYYVGPLARGNSRFAWMTRKSEETITPWNFEEVVDKGASAQSFIERMTNFDKNLPNEKVLPKHSLLYEYFTVYNELTKVKYVTEGMRKPAFLSGEQKKAIVDLLFKTNRKVTVKQLKEDYFKKIECFDSVEISGVEDRFNASLGTYHDLLKIIKDKDFLDNEENEDILEDIVLTLTLFEDREMIEERLKTYAHLFDDKVMKQLKRRRYTGWGRLSRKLINGIRDKQSGKTILDFLKSDGFANRNFMQLIHDDSLTFKEDIQKAQVSGQGDSLHEHIANLAGSPAIKKGILQTVKVVDELVKVMGRHKPENIVIEMARENQTTQKGQKNSRERMKRIEEGIKELGSQILKEHPVENTQLQNEKLYLYYLQNGRDMYVDQELDINRLSDYDVDHIVPQSFLKDDSIDNKVLTRSDKARGKSDNVPSEEVVKKMKNYWRQLLNAKLITQRKFDNLTKAERGGLSELDKAGFIKRQLVETRQITKHVAQILDSRMNTKYDENDKLIREVKVITLKSKLVSDFRKDFQFYKVREINNYHHAHDAYLNAVVGTALIKKYPKLESEFVYGDYKVYDVRKMIAKSEQEIGKATAKYFFYSNIMNFFKTEITLANGEIRKRPLIETNGETGEIVWDKGRDFATVRKVLSMPQVNIVKKTEVQTGGFSKESILPKRNSDKLIARKKDWDPKKYGGFDSPTVAYSVLVVAKVEKGKSKKLKSVKELLGITIMERSSFEKNPIDFLEAKGYKEVKKDLIIKLPKYSLFELENGRKRMLASAGELQKGNELALPSKYVNFLYLASHYEKLKGSPEDNEQKQLFVEQHKHYLDEIIEQISEFSKRVILADANLDKVLSAYNKHRDKPIREQAENIIHLFTLTNLGAPAAFKYFDTTIDRKRYTSTKEVLDATLIHQSITGLYETRIDLSQLGGDGGEAAAKEAAAKEAAAKEAAAKEAAAKEAAAKGGTLGDQGSRGSDPLPEPRVTLTVEGIPTEFLVNTGAEHSVLTKPMGKMGSKRTVVAGATGSKVYPWTTKRLLKIGQKQVTHSFLVIPECPAPLLGRDLLTKLKAQIQFSTEGPQVTWEDRPAMCLVLNLEEEYRLHEKPVPPSIDPSWLQLFPMVWAEKAGMGLANQVPPVVVELKSDASPVAVRQYPMSKEAREGIRPHIQRFLDLGILVPCQSPWNTPLLPVKKPGTNDYRPVQDLREVNKRVQDIHPTVPNPYNLLSSLPPSHTWYSVLDLKDAFFCLKLHPNSQPLFAFEWRDPEKGNTGQLTWTRLPQGFKNSPTLFDEALHRDLASFRALNPQVVMLQYVDDLLVAAPTYRDCKEGTRRLLQELSKLGYRVSAKKAQLCREEVTYLGYLLKGGKRWLTPARKATVMKIPTPTTPRQVREFLGTAGFCRLWIPGFASLAAPLYPLTREKVPFTWTEAHQEAFGRIKEALLSAPALALPDLTKPFALYVDEKEGVARGVLTQTLGPWRRPVAYLSKKLDPVASGWPTCLKAIAAVALLLKDADKLTLGQNVLVIAPHNLESIVRQPPDRWMTNARMTHYQSLLLNERVSFAPPAILNPATLLPVESDDTPIHICSEILAEETGTRPDLRDQPLPGVPAWYTDGSSFIMDGRRQAGAAIVDNKRTVWASNLPEGTSAQKAELIALTQALRLAEGKSINIYTDSRYAFATAHVHGAIYKQRGLLTSAGKDIKNKEEILALLEAIHLPKRVAIIHCPGHQRGTDPVATGNRKADEAAKQAAQSTRILTETTKNAGKRTADGSEFEKRTADGSEFESPKKKAKVE

SEQ ID NO: 6453 - protein, 2237 aa, synthetic construct
MPAAKRVKLDGGDKKYSIGLDIGTNSVGWAVITDEYKVPSKKFKVLGNTDRHSIKKNLIGALLFDSGETAEATRLKRTARRRYTRRKNRICYLQEIFSNEMAKVDDSFFHRLEESFLVEEDKKHERHPIFGNIVDEVAYHEKYPTIYHLRKKLVDSTDKADLRLIYLALAHMIKFRGHFLIEGDLNPDNSDVDKLFIQLVQTYNQLFEENPINASGVDAKAILSARLSKSRRLENLIAQLPGEKKNGLFGNLIALSLGLTPNFKSNFDLAEDAKLQLSKDTYDDDLDNLLAQIGDQYADLFLAAKNLSDAILLSDILRVNTEITKAPLSASMIKRYDEHHQDLTLLKALVRQQLPEKYKEIFFDQSKNGYAGYIDGGASQEEFYKFIKPILEKMDGTEELLVKLNREDLLRKQRTFDNGSIPHQIHLGELHAILRRQEDFYPFLKDNREKIEKILTFRIPYYVGPLARGNSRFAWMTRKSEETITPWNFEEVVDKGASAQSFIERMTNFDKNLPNEKVLPKHSLLYEYFTVYNELTKVKYVTEGMRKPAFLSGEQKKAIVDLLFKTNRKVTVKQLKEDYFKKIECFDSVEISGVEDRFNASLGTYHDLLKIIKDKDFLDNEENEDILEDIVLTLTLFEDREMIEERLKTYAHLFDDKVMKQLKRRRYTGWGRLSRKLINGIRDKQSGKTILDFLKSDGFANRNFMQLIHDDSLTFKEDIQKAQVSGQGDSLHEHIANLAGSPAIKKGILQTVKVVDELVKVMGRHKPENIVIEMARENQTTQKGQKNSRERMKRIEEGIKELGSQILKEHPVENTQLQNEKLYLYYLQNGRDMYVDQELDINRLSDYDVDHIVPQSFLKDDSIDNKVLTRSDKARGKSDNVPSEEVVKKMKNYWRQLLNAKLITQRKFDNLTKAERGGLSELDKAGFIKRQLVETRQITKHVAQILDSRMNTKYDENDKLIREVKVITLKSKLVSDFRKDFQFYKVREINNYHHAHDAYLNAVVGTALIKKYPKLESEFVYGDYKVYDVRKMIAKSEQEIGKATAKYFFYSNIMNFFKTEITLANGEIRKRPLIETNGETGEIVWDKGRDFATVRKVLSMPQVNIVKKTEVQTGGFSKESILPKRNSDKLIARKKDWDPKKYGGFDSPTVAYSVLVVAKVEKGKSKKLKSVKELLGITIMERSSFEKNPIDFLEAKGYKEVKKDLIIKLPKYSLFELENGRKRMLASAGELQKGNELALPSKYVNFLYLASHYEKLKGSPEDNEQKQLFVEQHKHYLDEIIEQISEFSKRVILADANLDKVLSAYNKHRDKPIREQAENIIHLFTLTNLGAPAAFKYFDTTIDRKRYTSTKEVLDATLIHQSITGLYETRIDLSQLGGDGGEAAAKEAAAKEAAAKEAAAKEAAAKEAAAKGGTLGDQGSRGSDPLPEPRVTLTVEGIPTEFLVNTGAEHSVLTKPMGKMGSKRTVVAGATGSKVYPWTTKRLLKIGQKQVTHSFLVIPECPAPLLGRDLLTKLKAQIQFSTEGPQVTWEDRPAMCLVLNLEEEYRLHEKPVPPSIDPSWLQLFPMVWAEKAGMGLANQVPPVVVELKSDASPVAVRQYPMSKEAREGIRPHIQRFLDLGILVPCQSPWNTPLLPVKKPGTNDYRPVQDLREVNKRVQDIHPTVPNPYNLLSSLPPSHTWYSVLDLKDAFFCLKLHPNSQPLFAFEWRDPEKGNTGQLTWTRLPQGFKNSPTLFNEALHRDLASFRALNPQVVMLQYVDDLLVAAPTYRDCKEGTRRLLQELSKLGYRVSAKKAQLCREEVTYLGYLLKGGKRWLTPARKATVMKIPTPTTPRQVREFLGTAGFCRLWIPGFASLAAPLYPLTRPKVPFTWTEAHQEAFGRIKEALLSAPALALPDLTKPFALYVDEKEGVARGVLTQTLGPWRRPVAYLSKKLDPVASGWPTCLKAIAAVALLLKDADKLTLGQNVLVIAPHNLESIVRQPPDRWMTNARMTHYQSLLLNERVSFAPPAILNPATLLPVESDDTPIHICSEILAEETGTRPDLRDQPLPGVPAWYTDGSSFIMDGRRQAGAAIVDNKRTVWASNLPEGTSAQKAELIALTQALRLAEGKSINIYTDSRYAFATAHVHGAIYKQRGWLTSAGKDIKNKEEILALLEAIHLPKRVAIIHCPGHQRGTDPVATGNRKADEAAKQAAQSTRILTETTKNAGKRTADGSEFEKRTADGSEFESPKKKAKVE

SEQ ID NO: 6454 - protein, 2115 aa, synthetic construct
MPAAKRVKLDGGDKKYSIGLDIGTNSVGWAVITDEYKVPSKKFKVLGNTDRHSIKKNLIGALLFDSGETAEATRLKRTARRRYTRRKNRICYLQEIFSNEMAKVDDSFFHRLEESFLVEEDKKHERHPIFGNIVDEVAYHEKYPTIYHLRKKLVDSTDKADLRLIYLALAHMIKFRGHFLIEGDLNPDNSDVDKLFIQLVQTYNQLFEENPINASGVDAKAILSARLSKSRRLENLIAQLPGEKKNGLFGNLIALSLGLTPNFKSNFDLAEDAKLQLSKDTYDDDLDNLLAQIGDQYADLFLAAKNLSDAILLSDILRVNTEITKAPLSASMIKRYDEHHQDLTLLKALVRQQLPEKYKEIFFDQSKNGYAGYIDGGASQEEFYKFIKPILEKMDGTEELLVKLNREDLLRKQRTFDNGSIPHQIHLGELHAILRRQEDFYPFLKDNREKIEKILTFRIPYYVGPLARGNSRFAWMTRKSEETITPWNFEEVVDKGASAQSFIERMTNFDKNLPNEKVLPKHSLLYEYFTVYNELTKVKYVTEGMRKPAFLSGEQKKAIVDLLFKTNRKVTVKQLKEDYFKKIECFDSVEISGVEDRFNASLGTYHDLLKIIKDKDFLDNEENEDILEDIVLTLTLFEDREMIEERLKTYAHLFDDKVMKQLKRRRYTGWGRLSRKLINGIRDKQSGKTILDFLKSDGFANRNFMQLIHDDSLTFKEDIQKAQVSGQGDSLHEHIANLAGSPAIKKGILQTVKVVDELVKVMGRHKPENIVIEMARENQTTQKGQKNSRERMKRIEEGIKELGSQILKEHPVENTQLQNEKLYLYYLQNGRDMYVDQELDINRLSDYDVDHIVPQSFLKDDSIDNKVLTRSDKARGKSDNVPSEEVVKKMKNYWRQLLNAKLITQRKFDNLTKAERGGLSELDKAGFIKRQLVETRQITKHVAQILDSRMNTKYDENDKLIREVKVITLKSKLVSDFRKDFQFYKVREINNYHHAHDAYLNAVVGTALIKKYPKLESEFVYGDYKVYDVRKMIAKSEQEIGKATAKYFFYSNIMNFFKTEITLANGEIRKRPLIETNGETGEIVWDKGRDFATVRKVLSMPQVNIVKKTEVQTGGFSKESILPKRNSDKLIARKKDWDPKKYGGFDSPTVAYSVLVVAKVEKGKSKKLKSVKELLGITIMERSSFEKNPIDFLEAKGYKEVKKDLIIKLPKYSLFELENGRKRMLASAGELQKGNELALPSKYVNFLYLASHYEKLKGSPEDNEQKQLFVEQHKHYLDEIIEQISEFSKRVILADANLDKVLSAYNKHRDKPIREQAENIIHLFTLTNLGAPAAFKYFDTTIDRKRYTSTKEVLDATLIHQSITGLYETRIDLSQLGGDGGEAAAKEAAAKEAAAKEAAAKEAAAKEAAAKGGTLNLEDEYRLYETSAEPEVSPGSTWLSDFPQAWAETGGMGLAVRQAPLIIPLKATSTPVSIKQYPMSQEAKLGIKPHIQRLLDQGILVPCQSPWNTPLLPVKKPGTNDYRPVQDLREVNKRVEDIHPTVPNPYNLLSGLPPSHRWYTVLDLKDAFFCLRLHPTSQPLFAFEWRDPGMGISGQLTWTRLPQGFKNSPTLFNEALHRDLADFRIQHPDLILLQYVDDILLAATSELDCQQGTRALLLTLGNLGYRASAKKAQLCQKQVKYLGYLLKEGQRWLTEARKETVMGQPTPKTPRQLREFLGTAGFCRLWIPGFAEMAAPLYPLTKPGTLFNWGPDQQKAYQEIKQALLTAPALGLPDLTKPFELFVDEKQGYAKGVLTQKLGPWRRPVAYLSKKLDPVAAGWPPCLRMVAAIAVLRKDAGKLTMGQPLVILAPHAVEALVKQPPDRWLSNARMTHYQAMLLDTDRVQFGPVVALNPATLLPLPEEGAPHDCLEILAETHGTRPDLTDQPIPDADHTWYTDGSSFLQEGQRKAGAAVTTETEVIWARALPAGTSAQRAELIALTQALKMAEGKRLNVYTDSRYAFATAHIHGEIYRRRGWLTSEGREIKNKSEILALLKALFLPKRLSIIHCLGHQKGDSAEARGNRLADQAAREAAIKTPPDTSTLLAGKRTADGSEFEKRTADGSEFESPKKKAKVE

SEQ ID NO: 6455 - protein, 2115 aa, synthetic construct
MPAAKRVKLDGGDKKYSIGLDIGTNSVGWAVITDEYKVPSKKFKVLGNTDRHSIKKNLIGALLFDSGETAEATRLKRTARRRYTRRKNRICYLQEIFSNEMAKVDDSFFHRLEESFLVEEDKKHERHPIFGNIVDEVAYHEKYPTIYHLRKKLVDSTDKADLRLIYLALAHMIKFRGHFLIEGDLNPDNSDVDKLFIQLVQTYNQLFEENPINASGVDAKAILSARLSKSRRLENLIAQLPGEKKNGLFGNLIALSLGLTPNFKSNFDLAEDAKLQLSKDTYDDDLDNLLAQIGDQYADLFLAAKNLSDAILLSDILRVNTEITKAPLSASMIKRYDEHHQDLTLLKALVRQQLPEKYKEIFFDQSKNGYAGYIDGGASQEEFYKFIKPILEKMDGTEELLVKLNREDLLRKQRTFDNGSIPHQIHLGELHAILRRQEDFYPFLKDNREKIEKILTFRIPYYVGPLARGNSRFAWMTRKSEETITPWNFEEVVDKGASAQSFIERMTNFDKNLPNEKVLPKHSLLYEYFTVYNELTKVKYVTEGMRKPAFLSGEQKKAIVDLLFKTNRKVTVKQLKEDYFKKIECFDSVEISGVEDRFNASLGTYHDLLKIIKDKDFLDNEENEDILEDIVLTLTLFEDREMIEERLKTYAHLFDDKVMKQLKRRRYTGWGRLSRKLINGIRDKQSGKTILDFLKSDGFANRNFMQLIHDDSLTFKEDIQKAQVSGQGDSLHEHIANLAGSPAIKKGILQTVKVVDELVKVMGRHKPENIVIEMARENQTTQKGQKNSRERMKRIEEGIKELGSQILKEHPVENTQLQNEKLYLYYLQNGRDMYVDQELDINRLSDYDVDHIVPQSFLKDDSIDNKVLTRSDKARGKSDNVPSEEVVKKMKNYWRQLLNAKLITQRKFDNLTKAERGGLSELDKAGFIKRQLVETRQITKHVAQILDSRMNTKYDENDKLIREVKVITLKSKLVSDFRKDFQFYKVREINNYHHAHDAYLNAVVGTALIKKYPKLESEFVYGDYKVYDVRKMIAKSEQEIGKATAKYFFYSNIMNFFKTEITLANGEIRKRPLIETNGETGEIVWDKGRDFATVRKVLSMPQVNIVKKTEVQTGGFSKESILPKRNSDKLIARKKDWDPKKYGGFDSPTVAYSVLVVAKVEKGKSKKLKSVKELLGITIMERSSFEKNPIDFLEAKGYKEVKKDLIIKLPKYSLFELENGRKRMLASAGELQKGNELALPSKYVNFLYLASHYEKLKGSPEDNEQKQLFVEQHKHYLDEIIEQISEFSKRVILADANLDKVLSAYNKHRDKPIREQAENIIHLFTLTNLGAPAAFKYFDTTIDRKRYTSTKEVLDATLIHQSITGLYETRIDLSQLGGDGGEAAAKEAAAKEAAAKEAAAKEAAAKEAAAKGGTLGIEDEYRLHETSTEPDVSLGSTWLSDFPQAWAETGGMGLAVRQAPLIIPLKATSTPVSIQQYPMSHEARLGIKPHIQRLLDQGILVPCQSPWNTPLLPVKKPGTNDYRPVQDLREVNKRVEDIHPTVPNPYNLLSGLPPSHQWYTVLDLKDAFFCLRLHPTSQPLFAFEWRDPGMGISGQLTWTRLPQGFKNSPTLFDEALHRDLADFRIQHPDLILLQYVDDILLAATSELDCQQGTRALLQTLGDLGYRASAKKAQICQKQVKYLGYLLREGQRWLTEARKETVMGQPVPKTPRQLREFLGTAGFCRLWIPGFAEMAAPLYPLTKTGTLFSWGPDQQKAYQEIKQALLTAPALGLPDLTKPFELFVDEKQGYAKGVLTQKLGPWRRPVAYLSKKLDPVAAGWPPCLRMVAAIAVLTKDAGKLTMGQPLVILAPHAVEALVKQPPDRWLSNARMTHYQAMLLDTDRVQFGPVVALNPATLLPLPEEGAPHDCLEILAETHGTRPDLTDQPIPDADHTWYTDGSSFLQEGQRKAGAAVTTETEVIWAGALPAGTSAQRAELIALTQALKMAEGKRLNVYTDSRYAFATAHIHGEIYRRRGLLTSEGREIKNKSEILALLKALFLPKRLSIIHCLGHQKGDSAEARGNRLADQAAREAAIKTPPDTSTLLAGKRTADGSEFEKRTADGSEFESPKKKAKVE

SEQ ID NO: 6456 - protein, 2115 aa, synthetic construct; identical to SEQ ID NO: 6455

SEQ ID NO: 6457 - protein, 2115 aa, synthetic construct
MPAAKRVKLDGGDKKYSIGLDIGTNSVGWAVITDEYKVPSKKFKVLGNTDRHSIKKNLIGALLFDSGETAEATRLKRTARRRYTRRKNRICYLQEIFSNEMAKVDDSFFHRLEESFLVEEDKKHERHPIFGNIVDEVAYHEKYPTIYHLRKKLVDSTDKADLRLIYLALAHMIKFRGHFLIEGDLNPDNSDVDKLFIQLVQTYNQLFEENPINASGVDAKAILSARLSKSRRLENLIAQLPGEKKNGLFGNLIALSLGLTPNFKSNFDLAEDAKLQLSKDTYDDDLDNLLAQIGDQYADLFLAAKNLSDAILLSDILRVNTEITKAPLSASMIKRYDEHHQDLTLLKALVRQQLPEKYKEIFFDQSKNGYAGYIDGGASQEEFYKFIKPILEKMDGTEELLVKLNREDLLRKQRTFDNGSIPHQIHLGELHAILRRQEDFYPFLKDNREKIEKILTFRIPYYVGPLARGNSRFAWMTRKSEETITPWNFEEVVDKGASAQSFIERMTNFDKNLPNEKVLPKHSLLYEYFTVYNELTKVKYVTEGMRKPAFLSGEQKKAIVDLLFKTNRKVTVKQLKEDYFKKIECFDSVEISGVEDRFNASLGTYHDLLKIIKDKDFLDNEENEDILEDIVLTLTLFEDREMIEERLKTYAHLFDDKVMKQLKRRRYTGWGRLSRKLINGIRDKQSGKTILDFLKSDGFANRNFMQLIHDDSLTFKEDIQKAQVSGQGDSLHEHIANLAGSPAIKKGILQTVKVVDELVKVMGRHKPENIVIEMARENQTTQKGQKNSRERMKRIEEGIKELGSQILKEHPVENTQLQNEKLYLYYLQNGRDMYVDQELDINRLSDYDVDHIVPQSFLKDDSIDNKVLTRSDKARGKSDNVPSEEVVKKMKNYWRQLLNAKLITQRKFDNLTKAERGGLSELDKAGFIKRQLVETRQITKHVAQILDSRMNTKYDENDKLIREVKVITLKSKLVSDFRKDFQFYKVREINNYHHAHDAYLNAVVGTALIKKYPKLESEFVYGDYKVYDVRKMIAKSEQEIGKATAKYFFYSNIMNFFKTEITLANGEIRKRPLIETNGETGEIVWDKGRDFATVRKVLSMPQVNIVKKTEVQTGGFSKESILPKRNSDKLIARKKDWDPKKYGGFDSPTVAYSVLVVAKVEKGKSKKLKSVKELLGITIMERSSFEKNPIDFLEAKGYKEVKKDLIIKLPKYSLFELENGRKRMLASAGELQKGNELALPSKYVNFLYLASHYEKLKGSPEDNEQKQLFVEQHKHYLDEIIEQISEFSKRVILADANLDKVLSAYNKHRDKPIREQAENIIHLFTLTNLGAPAAFKYFDTTIDRKRYTSTKEVLDATLIHQSITGLYETRIDLSQLGGDGGEAAAKEAAAKEAAAKEAAAKEAAAKEAAAKGGTLNIEDEYRLHETSKEPDVSLGSTWLSDFPQAWAETGGMGLAVRQAPLIIPLKATSTPVSIKQYPMSQEARLGIKPHIQRLLDQGILVPCQSPWNTPLLPVKKPGTNDYRPVQDLREVNKRVEDIHPTVPNPYNLLSGLPPSHQWYTVLDLKDAFFCLRLHPTSQPLFAFEWRDPEMGISGQLTWTRLPQGFKNSPTLFDEALHRDLAGFRIQHPDLILLQYVDDLLLAATSELDCQQGTRALLQTLGDLGYRASAKKAQICQKQVKYLGYLLKEGQRWLTEARKETVMGQPIPKTPRQLREFLGTAGFCRLWIPGFAEMAAPLYPLTKTGTLFNWGPDQQKAFQEIKQALLTAPALGLPDLTKPFELFVDEKQGYAKGVLTQKLGPWRRPVAYLSKKLDPVAAGWPPCLRMVAAIAVLTKDAGKLTMGQPLVILAPHAVEALVKQPPDRWLSNARMTHYQALLLDTDRVQFGPVVALNPATLLPLPEEGLQHDCLDILAEAHGTRSDLMDQPLPDADHTWYTDGSSFLQEGQRKAGAAVTTETEVIWARALPAGTSAQRAELIALTQALKMAEGKKLNVYTDSRYAFATAHIHGEIYRRRGLLTSEGKEIKNKDEILALLKALFLPKRLSIIHCPGHQKGNSAEARGNRMADQAAREVATRETPETSTLLAGKRTADGSEFEKRTADGSEFESPKKKAKVE

SEQ ID NO: 6458 - protein, 2115 aa, synthetic construct
MPAAKRVKLDGGDKKYSIGLDIGTNSVGWAVITDEYKVPSKKFKVLGNTDRHSIKKNLIGALLFDSGETAEATRLKRTARRRYTRRKNRICYLQEIFSNEMAKVDDSFFHRLEESFLVEEDKKHERHPIFGNIVDEVAYHEKYPTIYHLRKKLVDSTDKADLRLIYLALAHMIKFRGHFLIEGDLNPDNSDVDKLFIQLVQTYNQLFEENPINASGVDAKAILSARLSKSRRLENLIAQLPGEKKNGLFGNLIALSLGLTPNFKSNFDLAEDAKLQLSKDTYDDDLDNLLAQIGDQYADLFLAAKNLSDAILLSDILRVNTEITKAPLSASMIKRYDEHHQDLTLLKALVRQQLPEKYKEIFFDQSKNGYAGYIDGGASQEEFYKFIKPILEKMDGTEELLVKLNREDLLRKQRTFDNGSIPHQIHLGELHAILRRQEDFYPFLKDNREKIEKILTFRIPYYVGPLARGNSRFAWMTRKSEETITPWNFEEVVDKGASAQSFIERMTNFDKNLPNEKVLPKHSLLYEYFTVYNELTKVKYVTEGMRKPAFLSGEQKKAIVDLLFKTNRKVTVKQLKEDYFKKIECFDSVEISGVEDRFNASLGTYHDLLKIIKDKDFLDNEENEDILEDIVLTLTLFEDREMIEERLKTYAHLFDDKVMKQLKRRRYTGWGRLSRKLINGIRDKQSGKTILDFLKSDGFANRNFMQLIHDDSLTFKEDIQKAQVSGQGDSLHEHIANLAGSPAIKKGILQTVKVVDELVKVMGRHKPENIVIEMARENQTTQKGQKNSRERMKRIEEGIKELGSQILKEHPVENTQLQNEKLYLYYLQNGRDMYVDQELDINRLSDYDVDHIVPQSFLKDDSIDNKVLTRSDKARGKSDNVPSEEVVKKMKNYWRQLLNAKLITQRKFDNLTKAERGGLSELDKAGFIKRQLVETRQITKHVAQILDSRMNTKYDENDKLIREVKVITLKSKLVSDFRKDFQFYKVREINNYHHAHDAYLNAVVGTALIKKYPKLESEFVYGDYKVYDVRKMIAKSEQEIGKATAKYFFYSNIMNFFKTEITLANGEIRKRPLIETNGETGEIVWDKGRDFATVRKVLSMPQVNIVKKTEVQTGGFSKESILPKRNSDKLIARKKDWDPKKYGGFDSPTVAYSVLVVAKVEKGKSKKLKSVKELLGITIMERSSFEKNPIDFLEAKGYKEVKKDLIIKLPKYSLFELENGRKRMLASAGELQKGNELALPSKYVNFLYLASHYEKLKGSPEDNEQKQLFVEQHKHYLDEIIEQISEFSKRVILADANLDKVLSAYNKHRDKPIREQAENIIHLFTLTNLGAPAAFKYFDTTIDRKRYTSTKEVLDATLIHQSITGLYETRIDLSQLGGDGGEAAAKEAAAKEAAAKEAAAKEAAAKEAAAKGGTLNIEDEHRLHETSKEPDVSLGSTWLSDFPQAWAETGGMGLAVRQAPLIIPLKATSTPVSIKQYPMSQEARLGIKPHIQRLLDQGILVPCQSPWNTPLLPVKKPGTNDYRPVQDLREVNKRVEDIHPTVPNPYNLLSGLPPSHQWYTVLDLKDAFFCLRLHPTSQPLFAFEWRDPEMGISGQLTWTRLPQGFKNSPTLFDEALHRDLADFRIQHPDLILLQYVDDLLLAATSELDCQQGTRALLQTLGNLGYRASAKKAQICQKQVKYLGYLLKEGQRWLTEARKETVMGQPTPKTPRQLREFLGTAGFCRLWIPGFAEMAAPLYPLTKTGTLFNWGPDQQKAYQEIKQALLTAPALGLPDLTKPFELFVDEKQGYAKGVLTQKLGPWRRPVAYLSKKLDPVAAGWPPCLRMVAAIAVLTKDAGKLTMGQPLVILAPHAVEALVKQPPDRWLSNARMTHYQALLLDTDRVQFGPVVALNPATLLPLPEEGLQHNCLDILAEAHGTRPDLTDQPLPDADHTWYTDGSSLLQEGQRKAGAAVTTETEVIWAKALPAGTSAQRAELIALTQALKMAEGKKLNVYTDSRYAFATAHIHGEIYRRRGLLTSEGKEIKNKDEILALLKALFLPKRLSIIHCPGHQKGHSAEARGNRMADQAARKAAITETPDTSTLLAGKRTADGSEFEKRTADGSEFESPKKKAKVE

SEQ ID NO: 6459 - protein, 2115 aa, synthetic construct; identical to SEQ ID NO: 6458

SEQ ID NO: 6460 - protein, 2115 aa, synthetic construct
MPAAKRVKLDGGDKKYSIGLDIGTNSVGWAVITDEYKVPSKKFKVLGNTDRHSIKKNLIGALLFDSGETAEATRLKRTARRRYTRRKNRICYLQEIFSNEMAKVDDSFFHRLEESFLVEEDKKHERHPIFGNIVDEVAYHEKYPTIYHLRKKLVDSTDKADLRLIYLALAHMIKFRGHFLIEGDLNPDNSDVDKLFIQLVQTYNQLFEENPINASGVDAKAILSARLSKSRRLENLIAQLPGEKKNGLFGNLIALSLGLTPNFKSNFDLAEDAKLQLSKDTYDDDLDNLLAQIGDQYADLFLAAKNLSDAILLSDILRVNTEITKAPLSASMIKRYDEHHQDLTLLKALVRQQLPEKYKEIFFDQSKNGYAGYIDGGASQEEFYKFIKPILEKMDGTEELLVKLNREDLLRKQRTFDNGSIPHQIHLGELHAILRRQEDFYPFLKDNREKIEKILTFRIPYYVGPLARGNSRFAWMTRKSEETITPWNFEEVVDKGASAQSFIERMTNFDKNLPNEKVLPKHSLLYEYFTVYNELTKVKYVTEGMRKPAFLSGEQKKAIVDLLFKTNRKVTVKQLKEDYFKKIECFDSVEISGVEDRFNASLGTYHDLLKIIKDKDFLDNEENEDILEDIVLTLTLFEDREMIEERLKTYAHLFDDKVMKQLKRRRYTGWGRLSRKLINGIRDKQSGKTILDFLKSDGFANRNFMQLIHDDSLTFKEDIQKAQVSGQGDSLHEHIANLAGSPAIKKGILQTVKVVDELVKVMGRHKPENIVIEMARENQTTQKGQKNSRERMKRIEEGIKELGSQILKEHPVENTQLQNEKLYLYYLQNGRDMYVDQELDINRLSDYDVDHIVPQSFLKDDSIDNKVLTRSDKARGKSDNVPSEEVVKKMKNYWRQLLNAKLITQRKFDNLTKAERGGLSELDKAGFIKRQLVETRQITKHVAQILDSRMNTKYDENDKLIREVKVITLKSKLVSDFRKDFQFYKVREINNYHHAHDAYLNAVVGTALIKKYPKLESEFVYGDYKVYDVRKMIAKSEQEIGKATAKYFFYSNIMNFFKTEITLANGEIRKRPLIETNGETGEIVWDKGRDFATVRKVLSMPQVNIVKKTEVQTGGFSKESILPKRNSDKLIARKKDWDPKKYGGFDSPTVAYSVLVVAKVEKGKSKKLKSVKELLGITIMERSSFEKNPIDFLEAKGYKEVKKDLIIKLPKYSLFELENGRKRMLASAGELQKGNELALPSKYVNFLYLASHYEKLKGSPEDNEQKQLFVEQHKHYLDEIIEQISEFSKRVILADANLDKVLSAYNKHRDKPIREQAENIIHLFTLTNLGAPAAFKYFDTTIDRKRYTSTKEVLDATLIHQSITGLYETRIDLSQLGGDGGEAAAKEAAAKEAAAKEAAAKEAAAKEAAAKGGTLNIEDEYRLHEISTEPDVSPGSTWLSDFPQAWAETGGMGLAVRQAPLIIPLKATSTPVSIKQYPMSQEAKLGIKPHIQRLLDQGILVPCQSPWNTPLLPVKKPGTNDYRPVQGLREVNKRVEDIHPTVPNPYNLLSGLPTSHRWYTVLDLKDAFFCLRLHPTSQPLFASEWRDPGMGISGQLTWTRLPQGFKNSPTLFDEALHRGLADFRIQHPDLILLQYVDDLLLAATSELDCQQGTRALLKTLGNLGYRASAKKAQICQKQVKYLGYLLREGQRWLTEARKETVMGQPTPKTPRQLREFLGTAGFCRLWIPRFAEMAAPLYPLTKTGTLFNWGPDQQKAYHEIKQALLTAPALGLPDLTKPFELFVDEKQGYAKGVLTQKLGPWRRPVAYLSKKLDPVAAGWPPCLRMVAAIAVLTKDAGKLTMGQPLVILAPHAVEALVKQPPDRWLSNARMTHYQAMLLDTDRVQFGPVVALNPATLLPLPEEGAPHDCLEILAETHGTEPDLTDQPIPDADHTWYTDGSSFLQEGQRKAGAAVTTETEVIWARALPAGTSAQRAELIALTQALKMAEGKRLNVYTDSRYAFATAHIHGEIYKRRGLLTSEGREIKNKSEILALLKALFLPKRLSIIHCLGHQKGDSAEARGNRLADQAAREAAIKTPPDTSTLLAGKRTADGSEFEKRTADGSEFESPKKKAKVE

SEQ ID NO: 6461 - protein, 2115 aa, synthetic construct
MPAAKRVKLDGGDKKYSIGLDIGTNSVGWAVITDEYKVPSKKFKVLGNTDRHSIKKNLIGALLFDSGETAEATRLKRTARRRYTRRKNRICYLQEIFSNEMAKVDDSFFHRLEESFLVEEDKKHERHPIFGNIVDEVAYHEKYPTIYHLRKKLVDSTDKADLRLIYLALAHMIKFRGHFLIEGDLNPDNSDVDKLFIQLVQTYNQLFEENPINASGVDAKAILSARLSKSRRLENLIAQLPGEKKNGLFGNLIALSLGLTPNFKSNFDLAEDAKLQLSKDTYDDDLDNLLAQIGDQYADLFLAAKNLSDAILLSDILRVNTEITKAPLSASMIKRYDEHHQDLTLLKALVRQQLPEKYKEIFFDQSKNGYAGYIDGGASQEEFYKFIKPILEKMDGTEELLVKLNREDLLRKQRTFDNGSIPHQIHLGELHAILRRQEDFYPFLKDNREKIEKILTFRIPYYVGPLARGNSRFAWMTRKSEETITPWNFEEVVDKGASAQSFIERMTNFDKNLPNEKVLPKHSLLYEYFTVYNELTKVKYVTEGMRKPAFLSGEQKKAIVDLLFKTNRKVTVKQLKEDYFKKIECFDSVEISGVEDRFNASLGTYHDLLKIIKDKDFLDNEENEDILEDIVLTLTLFEDREMIEERLKTYAHLFDDKVMKQLKRRRYTGWGRLSRKLINGIRDKQSGKTILDFLKSDGFANRNFMQLIHDDSLTFKEDIQKAQVSGQGDSLHEHIANLAGSPAIKKGILQTVKVVDELVKVMGRHKPENIVIEMARENQTTQKGQKNSRERMKRIEEGIKELGSQILKEHPVENTQLQNEKLYLYYLQNGRDMYVDQELDINRLSDYDVDHIVPQSFLKDDSIDNKVLTRSDKARGKSDNVPSEEVVKKMKNYWRQLLNAKLITQRKFDNLTKAERGGLSELDKAGFIKRQLVETRQITKHVAQILDSRMNTKYDENDKLIREVKVITLKSKLVSDFRKDFQFYKVREINNYHHAHDAYLNAVVGTALIKKYPKLESEFVYGDYKVYDVRKMIAKSEQEIGKATAKYFFYSNIMNFFKTEITLANGEIRKRPLIETNGETGEIVWDKGRDFATVRKVLSMPQVNIVKKTEVQTGGFSKESILPKRNSDKLIARKKDWDPKKYGGFDSPTVAYSVLVVAKVEKGKSKKLKSVKELLGITIMERSSFEKNPIDFLEAKGYKEVKKDLIIKLPKYSLFELENGRKRMLASAGELQKGNELALPSKYVNFLYLASHYEKLKGSPEDNEQKQLFVEQHKHYLDEIIEQISEFSKRVILADANLDKVLSAYNKHRDKPIREQAENIIHLFTLTNLGAPAAFKYFDTTIDRKRYTSTKEVLDATLIHQSITGLYETRIDLSQLGGDGGEAAAKEAAAKEAAAKEAAAKEAAAKEAAAKGGTLNIEDEYRLHEISTEPDVSPGSTWLSDFPQAWAETGGMGLAVRQAPLIIPLKATSTPVSIKQYPMSQEAKLGIKPHIQRLLDQGILVPCQSPWNTPLLPVKKPGTNDYRPVQGLREVNKRVEDIHPTVPNPYNLLSGLPTSHRWYTVLDLKDAFFCLRLHPTSQPLFASEWRDPGMGISGQLTWTRLPQGFKNSPTLFNEALHRGLADFRIQHPDLILLQYVDDLLLAATSELDCQQGTRALLKTLGNLGYRASAKKAQICQKQVKYLGYLLREGQRWLTEARKETVMGQPTPKTPRQLREFLGKAGFCRLFIPRFAEMAAPLYPLTKPGTLFNWGPDQQKAYHEIKQALLTAPALGLPDLTKPFELFVDEKQGYAKGVLTQKLGPWRRPVAYLSKKLDPVAAGWPPCLRMVAAIAVLTKDAGKLTMGQPLVILAPHAVEALVKQPPDRWLSNARMTHYQAMLLDTDRVQFGPVVALNPATLLPLPEEGAPHDCLEILAETHGTEPDLTDQPIPDADHTWYTDGSSFLQEGQRKAGAAVTTETEVIWARALPAGTSAQRAELIALTQALKMAEGKRLNVYTDSRYAFATAHIHGEIYKRRGWLTSEGREIKNKSEILALLKALFLPKRLSIIHCLGHQKGDSAEARGNRLADQAAREAAIKTPPDTSTLLAGKRTADGSEFEKRTADGSEFESPKKKAKVE

SEQ ID NO: 6462 - protein, 2195 aa, synthetic construct
MPAAKRVKLDGGDKKYSIGLDIGTNSVGWAVITDEYKVPSKKFKVLGNTDRHSIKKNLIGALLFDSGETAEATRLKRTARRRYTRRKNRICYLQEIFSNEMAKVDDSFFHRLEESFLVEEDKKHERHPIFGNIVDEVAYHEKYPTIYHLRKKLVDSTDKADLRLIYLALAHMIKFRGHFLIEGDLNPDNSDVDKLFIQLVQTYNQLFEENPINASGVDAKAILSARLSKSRRLENLIAQLPGEKKNGLFGNLIALSLGLTPNFKSNFDLAEDAKLQLSKDTYDDDLDNLLAQIGDQYADLFLAAKNLSDAILLSDILRVNTEITKAPLSASMIKRYDEHHQDLTLLKALVRQQLPEKYKEIFFDQSKNGYAGYIDGGASQEEFYKFIKPILEKMDGTEELLVKLNREDLLRKQRTFDNGSIPHQIHLGELHAILRRQEDFYPFLKDNREKIEKILTFRIPYYVGPLARGNSRFAWMTRKSEETITPWNFEEVVDKGASAQSFIERMTNFDKNLPNEKVLPKHSLLYEYFTVYNELTKVKYVTEGMRKPAFLSGEQKKAIVDLLFKTNRKVTVKQLKEDYFKKIECFDSVEISGVEDRFNASLGTYHDLLKIIKDKDFLDNEENEDILEDIVLTLTLFEDREMIEERLKTYAHLFDDKVMKQLKRRRYTGWGRLSRKLINGIRDKQSGKTILDFLKSDGFANRNFMQLIHDDSLTFKEDIQKAQVSGQGDSLHEHIANLAGSPAIKKGILQTVKVVDELVKVMGRHKPENIVIEMARENQTTQKGQKNSRERMKRIEEGIKELGSQILKEHPVENTQLQNEKLYLYYLQNGRDMYVDQELDINRLSDYDVDHIVPQSFLKDDSIDNKVLTRSDKARGKSDNVPSEEVVKKMKNYWRQLLNAKLITQRKFDNLTKAERGGLSELDKAGFIKRQLVETRQITKHVAQILDSRMNTKYDENDKLIREVKVITLKSKLVSDFRKDFQFYKVREINNYHHAHDAYLNAVVGTALIKKYPKLESEFVYGDYKVYDVRKMIAKSEQEIGKATAKYFFYSNIMNFFKTEITLANGEIRKRPLIETNGETGEIVWDKGRDFATVRKVLSMPQVNIVKKTEVQTGGFSKESILPKRNSDKLIARKKDWDPKKYGGFDSPTVAYSVLVVAKVEKGKSKKLKSVKELLGITIMERSSFEKNPIDFLEAKGYKEVKKDLIIKLPKYSLFELENGRKRMLASAGELQKGNELALPSKYVNFLYLASHYEKLKGSPEDNEQKQLFVEQHKHYLDEIIEQISEFSKRVILADANLDKVLSAYNKHRDKPIREQAENIIHLFTLTNLGAPAAFKYFDTTIDRKRYTSTKEVLDATLIHQSITGLYETRIDLSQLGGDGGEAAAKEAAAKEAAAKEAAAKEAAAKEAAAKGGMDPLQLLQPLEAEIKGTKLKAHWNSGATITCVPEAFLEDERPIQTMLIKTIHGEKQQDVYYLTFKVQGRKVEAEVLASPYDYILLNPSDVPWLMKKPLQLTVLVPLHEYQERLLQQTALPKEQKELLQKLFLKYDALWQHWENQVGHRRIKPHNIATGTLAPRPQKQYPINPKAKPSIQIVIDDLLKQGVLIQQNSTMNTPVYPVPKPDGKWRMVLDYREVNKTIPLIAAQNQHSAGILSSIYRGKYKTTLDLTNGFWAHPITPESYWLTAFTWQGKQYCWTRLPQGFLNSPALFTADVVDLLKEIPNVQAYVDDIYISHDDPQEHLEQLEKIFSILLNAGYVVSLKKSEIAQREVEFLGFNITKEGRGLTDTFKQKLLNITPPKDLKQLQSILGLLNFARNFIPNYSELVKPLYTIVANANGKFISWTEDNSNQLQHIISVLNQADNLEERNPETRLIIKVNSSPSAGYIRYYNEGSKRPIMYVNYIFSKAEAKFTQTEKLLTTMHKGLIKAMDLAMGQEILVYSPIVSMTKIQRTPLPERKALPVRWITWMTYLEDPRIQFHYDKSLPELQQIPNVTEDVIAKTKHPSEFAMVFYTDGSAIKHPDVNKSHSAGMGIAQVQFIPEYKIVHQWSIPLGDHTAQLAEIAAVEFACKKALKISGPVLIVTDSFYVAESANKELPYWKSNGFLNNKKKPLRHVSKWKSIAECLQLKPDIIIMHEKGHQQPMTTLHTEGNNLADKLATQGSYVVHAGKRTADGSEFEKRTADGSEFESPKKKAKVE

SEQ ID NO: 6463 - protein, 2106 aa, synthetic construct
MPAAKRVKLDGGDKKYSIGLDIGTNSVGWAVITDEYKVPSKKFKVLGNTDRHSIKKNLIGALLFDSGETAEATRLKRTARRRYTRRKNRICYLQEIFSNEMAKVDDSFFHRLEESFLVEEDKKHERHPIFGNIVDEVAYHEKYPTIYHLRKKLVDSTDKADLRLIYLALAHMIKFRGHFLIEGDLNPDNSDVDKLFIQLVQTYNQLFEENPINASGVDAKAILSARLSKSRRLENLIAQLPGEKKNGLFGNLIALSLGLTPNFKSNFDLAEDAKLQLSKDTYDDDLDNLLAQIGDQYADLFLAAKNLSDAILLSDILRVNTEITKAPLSASMIKRYDEHHQDLTLLKALVRQQLPEKYKEIFFDQSKNGYAGYIDGGASQEEFYKFIKPILEKMDGTEELLVKLNREDLLRKQRTFDNGSIPHQIHLGELHAILRRQEDFYPFLKDNREKIEKILTFRIPYYVGPLARGNSRFAWMTRKSEETITPWNFEEVVDKGASAQSFIERMTNFDKNLPNEKVLPKHSLLYEYFTVYNELTKVKYVTEGMRKPAFLSGEQKKAIVDLLFKTNRKVTVKQLKEDYFKKIECFDSVEISGVEDRFNASLGTYHDLLKIIKDKDFLDNEENEDILEDIVLTLTLFEDREMIEERLKTYAHLFDDKVMKQLKRRRYTGWGRLSRKLINGIRDKQSGKTILDFLKSDGFANRNFMQLIHDDSLTFKEDIQKAQVSGQGDSLHEHIANLAGSPAIKKGILQTVKVVDELVKVMGRHKPENIVIEMARENQTTQKGQKNSRERMKRIEEGIKELGSQILKEHPVENTQLQNEKLYLYYLQNGRDMYVDQELDINRLSDYDVDHIVPQSFLKDDSIDNKVLTRSDKARGKSDNVPSEEVVKKMKNYWRQLLNAKLITQRKFDNLTKAERGGLSELDKAGFIKRQLVETRQITKHVAQILDSRMNTKYDENDKLIREVKVITLKSKLVSDFRKDFQFYKVREINNYHHAHDAYLNAVVGTALIKKYPKLESEFVYGDYKVYDVRKMIAKSEQEIGKATAKYFFYSNIMNFFKTEITLANGEIRKRPLIETNGETGEIVWDKGRDFATVRKVLSMPQVNIVKKTEVQTGGFSKESILPKRNSDKLIARKKDWDPKKYGGFDSPTVAYSVLVVAKVEKGKSKKLKSVKELLGITIMERSSFEKNPIDFLEAKGYKEVKKDLIIKLPKYSLFELENGRKRMLASAGELQKGNELALPSKYVNFLYLASHYEKLKGSPEDNEQKQLFVEQHKHYLDEIIEQISEFSKRVILADANLDKVLSAYNKHRDKPIREQAENIIHLFTLTNLGAPAAFKYFDTTIDRKRYTSTKEVLDATLIHQSITGLYETRIDLSQLGGDGGEAAAKEAAAKEAAAKEAAAKEAAAKEAAAKGGVPWLMKKPLQLTVLVPLHEYQERLLQQTALPKEQKELLQKLFLKYDALWQHWENQVGHRRIKPHNIATGTLAPRPQKQYPINPKAKPSIQIVIDDLLKQGVLIQQNSTMNTPVYPVPKPDGKWRMVLDYREVNKTIPLIAAQNQHSAGILSSIYRGKYKTTLDLTNGFWAHPITPESYWLTAFTWQGKQYCWTRLPQGFLNSPALFTADVVDLLKEIPNVQAYVDDIYISHDDPQEHLEQLEKIFSILLNAGYVVSLKKSEIAQREVEFLGFNITKEGRGLTDTFKQKLLNITPPKDLKQLQSILGLLNFARNFIPNYSELVKPLYTIVANANGKFISWTEDNSNQLQHIISVLNQADNLEERNPETRLIIKVNSSPSAGYIRYYNEGSKRPIMYVNYIFSKAEAKFTQTEKLLTTMHKGLIKAMDLAMGQEILVYSPIVSMTKIQRTPLPERKALPVRWITWMTYLEDPRIQFHYDKSLPELQQIPNVTEDVIAKTKHPSEFAMVFYTDGSAIKHPDVNKSHSAGMGIAQVQFIPEYKIVHQWSIPLGDHTAQLAEIAAVEFACKKALKISGPVLIVTDSFYVAESANKELPYWKSNGFLNNKKKPLRHVSKWKSIAECLQLKPDIIIMHEKGHQQPMTTLHTEGNNLADKLATQGSYVVHAGKRTADGSEFEKRTADGSEFESPKKKAKVE

SEQ ID NO: 6464 - protein, 2106 aa, synthetic construct
MPAAKRVKLDGGDKKYSIGLDIGTNSVGWAVITDEYKVPSKKFKVLGNTDRHSIKKNLIGALLFDSGETAEATRLKRTARRRYTRRKNRICYLQEIFSNEMAKVDDSFFHRLEESFLVEEDKKHERHPIFGNIVDEVAYHEKYPTIYHLRKKLVDSTDKADLRLIYLALAHMIKFRGHFLIEGDLNPDNSDVDKLFIQLVQTYNQLFEENPINASGVDAKAILSARLSKSRRLENLIAQLPGEKKNGLFGNLIALSLGLTPNFKSNFDLAEDAKLQLSKDTYDDDLDNLLAQIGDQYADLFLAAKNLSDAILLSDILRVNTEITKAPLSASMIKRYDEHHQDLTLLKALVRQQLPEKYKEIFFDQSKNGYAGYIDGGASQEEFYKFIKPILEKMDGTEELLVKLNREDLLRKQRTFDNGSIPHQIHLGELHAILRRQEDFYPFLKDNREKIEKILTFRIPYYVGPLARGNSRFAWMTRKSEETITPWNFEEVVDKGASAQSFIERMTNFDKNLPNEKVLPKHSLLYEYFTVYNELTKVKYVTEGMRKPAFLSGEQKKAIVDLLFKTNRKVTVKQLKEDYFKKIECFDSVEISGVEDRFNASLGTYHDLLKIIKDKDFLDNEENEDILEDIVLTLTLFEDREMIEERLKTYAHLFDDKVMKQLKRRRYTGWGRLSRKLINGIRDKQSGKTILDFLKSDGFANRNFMQLIHDDSLTFKEDIQKAQVSGQGDSLHEHIANLAGSPAIKKGILQTVKVVDELVKVMGRHKPENIVIEMARENQTTQKGQKNSRERMKRIEEGIKELGSQILKEHPVENTQLQNEKLYLYYLQNGRDMYVDQELDINRLSDYDVDHIVPQSFLKDDSIDNKVLTRSDKARGKSDNVPSEEVVKKMKNYWRQLLNAKLITQRKFDNLTKAERGGLSELDKAGFIKRQLVETRQITKHVAQILDSRMNTKYDENDKLIREVKVITLKSKLVSDFRKDFQFYKVREINNYHHAHDAYLNAVVGTALIKKYPKLESEFVYGDYKVYDVRKMIAKSEQEIGKATAKYFFYSNIMNFFKTEITLANGEIRKRPLIETNGETGEIVWDKGRDFATVRKVLSMPQVNIVKKTEVQTGGFSKESILPKRNSDKLIARKKDWDPKKYGGFDSPTVAYSVLVVAKVEKGKSKKLKSVKELLGITIMERSSFEKNPIDFLEAKGYKEVKKDLIIKLPKYSLFELENGRKRMLASAGELQKGNELALPSKYVNFLYLASHYEKLKGSPEDNEQKQLFVEQHKHYLDEIIEQISEFSKRVILADANLDKVLSAYNKHRDKPIREQAENIIHLFTLTNLGAPAAFKYFDTTIDRKRYTSTKEVLDATLIHQSITGLYETRIDLSQLGGDGGEAAAKEAAAKEAAAKEAAAKEAAAKEAAAKGGVPWLMKKPLQLTVLVPLHEYQERLLQQTALPKEQKELLQKLFLKYDALWQHWENQVGHRRIKPHNIATGTLAPRPQKQYPINPKAKPSIQIVIDDLLKQGVLIQQNSTMNTPVYPVPKPDGKWRMVLDYREVNKTIPLIAAQNQHSAGILSSIYRGKYKTTLDLTNGFWAHPITPESYWLTAFTWQGKQYCWTRLPQGFLNSPALFNADVVDLLKEIPNVQAYVDDIYISHDDPQEHLEQLEKIFSILLNAGYVVSLKKSEIAQREVEFLGFNITKEGRGLTDTFKQKLLNITPPKDLKQLQSILGKLNFARNFIPNYSELVKPLYTIVAPANGKFISWTEDNSNQLQHIISVLNQADNLEERNPETRLIIKVNSSPSAGYIRYYNEGSKRPIMYVNYIFSKAEAKFTQTEKLLTTMHKGLIKAMDLAMGQEILVYSPIVSMTKIQRTPLPERKALPVRWITWMTYLEDPRIQFHYDKSLPELQQIPNVTEDVIAKTKHPSEFAMVFYTDGSAIKHPDVNKSHSAGMGIAQVQFIPEYKIVHQWSIPLGDHTAQLAEIAAVEFACKKALKISGPVLIVTDSFYVAESANKELPYWKSNGFLNNKKKPLRHVSKWKSIAECLQLKPDIIIMHEKGHQQPMTTLHTEGNNLADKLATQGSYVVHAGKRTADGSEFEKRTADGSEFESPKKKAKVE

SEQ ID NO: 6465 - protein, 2195 aa, synthetic construct
MPAAKRVKLDGGDKKYSIGLDIGTNSVGWAVITDEYKVPSKKFKVLGNTDRHSIKKNLIGALLFDSGETAEATRLKRTARRRYTRRKNRICYLQEIFSNEMAKVDDSFFHRLEESFLVEEDKKHERHPIFGNIVDEVAYHEKYPTIYHLRKKLVDSTDKADLRLIYLALAHMIKFRGHFLIEGDLNPDNSDVDKLFIQLVQTYNQLFEENPINASGVDAKAILSARLSKSRRLENLIAQLPGEKKNGLFGNLIALSLGLTPNFKSNFDLAEDAKLQLSKDTYDDDLDNLLAQIGDQYADLFLAAKNLSDAILLSDILRVNTEITKAPLSASMIKRYDEHHQDLTLLKALVRQQLPEKYKEIFFDQSKNGYAGYIDGGASQEEFYKFIKPILEKMDGTEELLVKLNREDLLRKQRTFDNGSIPHQIHLGELHAILRRQEDFYPFLKDNREKIEKILTFRIPYYVGPLARGNSRFAWMTRKSEETITPWNFEEVVDKGASAQSFIERMTNFDKNLPNEKVLPKHSLLYEYFTVYNELTKVKYVTEGMRKPAFLSGEQKKAIVDLLFKTNRKVTVKQLKEDYFKKIECFDSVEISGVEDRFNASLGTYHDLLKIIKDKDFLDNEENEDILEDIVLTLTLFEDREMIEERLKTYAHLFDDKVMKQLKRRRYTGWGRLSRKLINGIRDKQSGKTILDFLKSDGFANRNFMQLIHDDSLTFKEDIQKAQVSGQGDSLHEHIANLAGSPAIKKGILQTVKVVDELVKVMGRHKPENIVIEMARENQTTQKGQKNSRERMKRIEEGIKELGSQILKEHPVENTQLQNEKLYLYYLQNGRDMYVDQELDINRLSDYDVDHIVPQSFLKDDSIDNKVLTRSDKARGKSDNVPSEEVVKKMKNYWRQLLNAKLITQRKFDNLTKAERGGLSELDKAGFIKRQLVETRQITKHVAQILDSRMNTKYDENDKLIREVKVITLKSKLVSDFRKDFQFYKVREINNYHHAHDAYLNAVVGTALIKKYPKLESEFVYGDYKVYDVRKMIAKSEQEIGKATAKYFFYSNIMNFFKTEITLANGEIRKRPLIETNGETGEIVWDKGRDFATVRKVLSMPQVNIVKKTEVQTGGFSKESILPKRNSDKLIARKKDWDPKKYGGFDSPTVAYSVLVVAKVEKGKSKKLKSVKELLGITIMERSSFEKNPIDFLEAKGYKEVKKDLIIKLPKYSLFELENGRKRMLASAGELQKGNELALPSKYVNFLYLASHYEKLKGSPEDNEQKQLFVEQHKHYLDEIIEQISEFSKRVILADANLDKVLSAYNKHRDKPIREQAENIIHLFTLTNLGAPAAFKYFDTTIDRKRYTSTKEVLDATLIHQSITGLYETRIDLSQLGGDGGEAAAKEAAAKEAAAKEAAAKEAAAKEAAAKGGMDPLQLLQPLEAEIKGTKLKAHWNSGATITCVPQAFLEEEVPIKNIWIKTIHGEKEQPVYYLTFKIQGRKVEAEVISSPYDYILVSPSDIPWLMKKPLQLTTLVPLQEYEERLLKQTMLTGSYKEKLQSLFLKYDALWQHWENQVGHRRIKPHHIATGTVNPRPQKQYPINPKAKASIQTVINDLLKQGVLIQQNSIMNTPVYPVPKPDGKWRMVLDYREVNKTIPLIAAQNQHSAGILSSIFRGKYKTTLDLSNGFWAHSITPESYWLTAFTWLGQQYCWTRLPQGFLNSPALFTADVVDLLKEVPNVQVYVDDIYISHDDPREHLEQLEKVFSLLLNAGYVVSLKKSEIAQHEVEFLGFNITKEGRGLTETFKQKLLNITPPRDLKQLQSILGLLNFARNFIPNFSELVKPLYNIIATANGKYITWTTDNSQQLQNIISMLNSAENLEERNPEVRLIMKVNTSPSAGYIRFYNEFAKRPIMYLNYVYTKAEVKFTNTEKLLTTIHKGLIKALDLGMGQEILVYSPIVSMTKIQKTPLPERKALPIRWITWMSYLEDPRIQFHYDKTLPELQQVPTVTDDIIAKIKHPSEFSMVFYTDGSAIKHPNVNKSHNAGMGIAQVQFKPEFTVINTWSIPLGDHTAQLAEVAAVEFACKKALKIDGPVLIVTDSFYVAESVNKELPYWQSNGFFNNKKKPLKHVSKWKSIADCIQLKPDIIIIHEKGHQPTASTFHTEGNNLADKLATQGSYVVNAGKRTADGSEFEKRTADGSEFESPKKKAKVE

SEQ ID NO: 6466 - protein, 2106 aa, synthetic construct
MPAAKRVKLDGGDKKYSIGLDIGTNSVGWAVITDEYKVPSKKFKVLGNTDRHSIKKNLIGALLFDSGETAEATRLKRTARRRYTRRKNRICYLQEIFSNEMAKVDDSFFHRLEESFLVEEDKKHERHPIFGNIVDEVAYHEKYPTIYHLRKKLVDSTDKADLRLIYLALAHMIKFRGHFLIEGDLNPDNSDVDKLFIQLVQTYNQLFEENPINASGVDAKAILSARLSKSRRLENLIAQLPGEKKNGLFGNLIALSLGLTPNFKSNFDLAEDAKLQLSKDTYDDDLDNLLAQIGDQYADLFLAAKNLSDAILLSDILRVNTEITKAPLSASMIKRYDEHHQDLTLLKALVRQQLPEKYKEIFFDQSKNGYAGYIDGGASQEEFYKFIKPILEKMDGTEELLVKLNREDLLRKQRTFDNGSIPHQIHLGELHAILRRQEDFYPFLKDNREKIEKILTFRIPYYVGPLARGNSRFAWMTRKSEETITPWNFEEVVDKGASAQSFIERMTNFDKNLPNEKVLPKHSLLYEYFTVYNELTKVKYVTEGMRKPAFLSGEQKKAIVDLLFKTNRKVTVKQLKEDYFKKIECFDSVEISGVEDRFNASLGTYHDLLKIIKDKDFLDNEENEDILEDIVLTLTLFEDREMIEERLKTYAHLFDDKVMKQLKRRRYTGWGRLSRKLINGIRDKQSGKTILDFLKSDGFANRNFMQLIHDDSLTFKEDIQKAQVSGQGDSLHEHIANLAGSPAIKKGILQTVKVVDELVKVMGRHKPENIVIEMARENQTTQKGQKNSRERMKRIEEGIKELGSQILKEHPVENTQLQNEKLYLYYLQNGRDMYVDQELDINRLSDYDVDHIVPQSFLKDDSIDNKVLTRSDKARGKSDNVPSEEVVKKMKNYWRQLLNAKLITQRKFDNLTKAERGGLSELDKAGFIKRQLVETRQITKHVAQILDSRMNTKYDENDKLIREVKVITLKSKLVSDFRKDFQFYKVREINNYHHAHDAYLNAVVGTALIKKYPKLESEFVYGDYKVYDVRKMIAKSEQEIGKATAKYFFYSNIMNFFKTEITLANGEIRKRPLIETNGETGEIVWDKGRDFATVRKVLSMPQVNIVKKTEVQTGGFSKESILPKRNSDKLIARKKDWDPKKYGGFDSPTVAYSVLVVAKVEKGKSKKLKSVKELLGITIMERSSFEKNPIDFLEAKGYKEVKKDLIIKLPKYSLFELENGRKRMLASAGELQKGNELALPSKYVNFLYLASHYEKLKGSPEDNEQKQLFVEQHKHYLDEIIEQISEFSKRVILADANLDKVLSAYNKHRDKPIREQAENIIHLFTLTNLGAPAAFKYFDTTIDRKRYTSTKEVLDATLIHQSITGLYETRIDLSQLGGDGGEAAAKEAAAKEAAAKEAAAKEAAAKEAAAKGGIPWLMKKPLQLTTLVPLQEYEERLLKQTMLTGSYKEKLQSLFLKYDALWQHWENQVGHRRIKPHHIATGTVNPRPQKQYPINPKAKASIQTVINDLLKQGVLIQQNSIMNTPVYPVPKPDGKWRMVLDYREVNKTIPLIAAQNQHSAGILSSIFRGKYKTTLDLSNGFWAHSITPESYWLTAFTWLGQQYCWTRLPQGFLNSPALFNADVVDLLKEVPNVQVYVDDIYISHDDPREHLEQLEKVFSLLLNAGYVVSLKKSEIAQHEVEFLGFNITKEGRGLTETFKQKLLNITPPRDLKQLQSILGLLNFARNFIPNFSELVKPLYNIIATAPGKYITWTTDNSQQLQNIISMLNSAENLEERNPEVRLIMKVNTSPSAGYIRFYNEFAKRPIMYLNYVYTKAEVKFTNTEKLLTTIHKGLIKALDLGMGQEILVYSPIVSMTKIQKTPLPERKALPIRWITWMSYLEDPRIQFHYDKTLPELQQVPTVTDDIIAKIKHPSEFSMVFYTDGSAIKHPNVNKSHNAGMGIAQVQFKPEFTVINTWSIPLGDHTAQLAEVAAVEFACKKALKIDGPVLIVTDSFYVAESVNKELPYWQSNGFFNNKKKPLKHVSKWKSIADCIQLKPDIIIIHEKGHQPTASTFHTEGNNLADKLATQGSYVVNAGKRTADGSEFEKRTADGSEFESPKKKAKVE

SEQ ID NO: 6467 - protein, 2113 aa, synthetic construct
MPAAKRVKLDGGDKKYSIGLDIGTNSVGWAVITDEYKVPSKKFKVLGNTDRHSIKKNLIGALLFDSGETAEATRLKRTARRRYTRRKNRICYLQEIFSNEMAKVDDSFFHRLEESFLVEEDKKHERHPIFGNIVDEVAYHEKYPTIYHLRKKLVDSTDKADLRLIYLALAHMIKFRGHFLIEGDLNPDNSDVDKLFIQLVQTYNQLFEENPINASGVDAKAILSARLSKSRRLENLIAQLPGEKKNGLFGNLIALSLGLTPNFKSNFDLAEDAKLQLSKDTYDDDLDNLLAQIGDQYADLFLAAKNLSDAILLSDILRVNTEITKAPLSASMIKRYDEHHQDLTLLKALVRQQLPEKYKEIFFDQSKNGYAGYIDGGASQEEFYKFIKPILEKMDGTEELLVKLNREDLLRKQRTFDNGSIPHQIHLGELHAILRRQEDFYPFLKDNREKIEKILTFRIPYYVGPLARGNSRFAWMTRKSEETITPWNFEEVVDKGASAQSFIERMTNFDKNLPNEKVLPKHSLLYEYFTVYNELTKVKYVTEGMRKPAFLSGEQKKAIVDLLFKTNRKVTVKQLKEDYFKKIECFDSVEISGVEDRFNASLGTYHDLLKIIKDKDFLDNEENEDILEDIVLTLTLFEDREMIEERLKTYAHLFDDKVMKQLKRRRYTGWGRLSRKLINGIRDKQSGKTILDFLKSDGFANRNFMQLIHDDSLTFKEDIQKAQVSGQGDSLHEHIANLAGSPAIKKGILQTVKVVDELVKVMGRHKPENIVIEMARENQTTQKGQKNSRERMKRIEEGIKELGSQILKEHPVENTQLQNEKLYLYYLQNGRDMYVDQELDINRLSDYDVDHIVPQSFLKDDSIDNKVLTRSDKARGKSDNVPSEEVVKKMKNYWRQLLNAKLITQRKFDNLTKAERGGLSELDKAGFIKRQLVETRQITKHVAQILDSRMNTKYDENDKLIREVKVITLKSKLVSDFRKDFQFYKVREINNYHHAHDAYLNAVVGTALIKKYPKLESEFVYGDYKVYDVRKMIAKSEQEIGKATAKYFFYSNIMNFFKTEITLANGEIRKRPLIETNGETGEIVWDKGRDFATVRKVLSMPQVNIVKKTEVQTGGFSKESILPKRNSDKLIARKKDWDPKKYGGFDSPTVAYSVLVVAKVEKGKSKKLKSVKELLGITIMERSSFEKNPIDFLEAKGYKEVKKDLIIKLPKYSLFELENGRKRMLASAGELQKGNELALPSKYVNFLYLASHYEKLKGSPEDNEQKQLFVEQHKHYLDEIIEQISEFSKRVILADANLDKVLSAYNKHRDKPIREQAENIIHLFTLTNLGAPAAFKYFDTTIDRKRYTSTKEVLDATLIHQSITGLYETRIDLSQLGGDGGEAAAKEAAAKEAAAKEAAAKEAAAKEAAAKGGVLNLEEEYRLHEKPVPSSIDPSWLQLFPTVWAERAGMGLANQVPPVVVELRSGASPVAVRQYPMSKEAREGIRPHIQRFLDLGVLVPCQSPWNTPLLPVKKPGTNDYRPVQDLREINKRVQDIHPTVPNPYNLLSSLPPSHTWYSVLDLKDAFFCLKLHPNSQPLFAFEWRDPEKGNTGQLTWTRLPQGFKNSPTLFDEALHRDLAPFRALNPQVVLLQYVDDLLVAAPTYRDCKEGTQKLLQELSKLGYRVSAKKAQLCQKEVTYLGYLLKEGKRWLTPARKATVMKIPPPTTPRQVREFLGTAGFCRLWIPGFASLAAPLYPLTKESIPFIWTEEHQKAFDRIKEALLSAPALALPDLTKPFTLYVDERAGVARGVLTQTLGPWRRPVAYLSKKLDPVASGWPTCLKAVAAVALLLKDADKLTLGQNVTVIASHSLESIVRQPPDRWMTNARMTHYQSLLLNERVSFAPPAVLNPATLLPVESEATPVHRCSEILAEETGTRRDLKDQPLPGVPAWYTDGSSFIAEGKRRAGAAIVDGKRTVWASSLPEGTSAQKAELVALTQALRLAEGKDINIYTDSRYAFATAHIHGAIYKQRGLLTSAGKDIKNKEEILALLEAIHLPKRVAIIHCPGHQKGNDPVATGNRRADEAAKQAALSTRVLAETTKPAGKRTADGSEFEKRTADGSEFESPKKKAKVE

SEQ ID NO: 6468 - protein, 2113 aa, synthetic construct
MPAAKRVKLDGGDKKYSIGLDIGTNSVGWAVITDEYKVPSKKFKVLGNTDRHSIKKNLIGALLFDSGETAEATRLKRTARRRYTRRKNRICYLQEIFSNEMAKVDDSFFHRLEESFLVEEDKKHERHPIFGNIVDEVAYHEKYPTIYHLRKKLVDSTDKADLRLIYLALAHMIKFRGHFLIEGDLNPDNSDVDKLFIQLVQTYNQLFEENPINASGVDAKAILSARLSKSRRLENLIAQLPGEKKNGLFGNLIALSLGLTPNFKSNFDLAEDAKLQLSKDTYDDDLDNLLAQIGDQYADLFLAAKNLSDAILLSDILRVNTEITKAPLSASMIKRYDEHHQDLTLLKALVRQQLPEKYKEIFFDQSKNGYAGYIDGGASQEEFYKFIKPILEKMDGTEELLVKLNREDLLRKQRTFDNGSIPHQIHLGELHAILRRQEDFYPFLKDNREKIEKILTFRIPYYVGPLARGNSRFAWMTRKSEETITPWNFEEVVDKGASAQSFIERMTNFDKNLPNEKVLPKHSLLYEYFTVYNELTKVKYVTEGMRKPAFLSGEQKKAIVDLLFKTNRKVTVKQLKEDYFKKIECFDSVEISGVEDRFNASLGTYHDLLKIIKDKDFLDNEENEDILEDIVLTLTLFEDREMIEERLKTYAHLFDDKVMKQLKRRRYTGWGRLSRKLINGIRDKQSGKTILDFLKSDGFANRNFMQLIHDDSLTFKEDIQKAQVSGQGDSLHEHIANLAGSPAIKKGILQTVKVVDELVKVMGRHKPENIVIEMARENQTTQKGQKNSRERMKRIEEGIKELGSQILKEHPVENTQLQNEKLYLYYLQNGRDMYVDQELDINRLSDYDVDHIVPQSFLKDDSIDNKVLTRSDKARGKSDNVPSEEVVKKMKNYWRQLLNAKLITQRKFDNLTKAERGGLSELDKAGFIKRQLVETRQITKHVAQILDSRMNTKYDENDKLIREVKVITLKSKLVSDFRKDFQFYKVREINNYHHAHDAYLNAVVGTALIKKYPKLESEFVYGDYKVYDVRKMIAKSEQEIGKATAKYFFYSNIMNFFKTEITLANGEIRKRPLIETNGETGEIVWDKGRDFATVRKVLSMPQVNIVKKTEVQTGGFSKESILPKRNSDKLIARKKDWDPKKYGGFDSPTVAYSVLVVAKVEKGKSKKLKSVKELLGITIMERSSFEKNPIDFLEAKGYKEVKKDLIIKLPKYSLFELENGRKRMLASAGELQKGNELALPSKYVNFLYLASHYEKLKGSPEDNEQKQLFVEQHKHYLDEIIEQISEFSKRVILADANLDKVLSAYNKHRDKPIREQAENIIHLFTLTNLGAPAAFKYFDTTIDRKRYTSTKEVLDATLIHQSITGLYETRIDLSQLGGDGGEAAAKEAAAKEAAAKEAAAKEAAAKEAAAKGGVLNLEEEYRLHEKPVPSSIDPSWLQLFPTVWAERAGMGLANQVPPVVVELRSGASPVAVRQYPMSKEAREGIRPHIQRFLDLGVLVPCQSPWNTPLLPVKKPGTNDYRPVQDLREINKRVQDIHPTVPNPYNLLSSLPPSHTWYSVLDLKDAFFCLKLHPNSQPLFAFEWRDPEKGNTGQLTWTRLPQGFKNSPTLFNEALHRDLAPFRALNPQVVLLQYVDDLLVAAPTYRDCKEGTQKLLQELSKLGYRVSAKKAQLCQKEVTYLGYLLKEGKRWLTPARKATVMKIPPPTTPRQVREFLGTAGFCRLWIPGFASLAAPLYPLTKPSIPFIWTEEHQKAFDRIKEALLSAPALALPDLTKPFTLYVDERAGVARGVLTQTLGPWRRPVAYLSKKLDPVASGWPTCLKAVAAVALLLKDADKLTLGQNVTVIASHSLESIVRQPPDRWMTNARMTHYQSLLLNERVSFAPPAVLNPATLLPVESEATPVHRCSEILAEETGTRRDLKDQPLPGVPAWYTDGSSFIAEGKRRAGAAIVDGKRTVWASSLPEGTSAQKAELVALTQALRLAEGKDINIYTDSRYAFATAHIHGAIYKQRGWLTSAGKDIKNKEEILALLEAIHLPKRVAIIHCPGHQKGNDPVATGNRRADEAAKQAALSTRVLAETTKPAGKRTADGSEFEKRTADGSEFESPKKKAKVE

SEQ ID NO: 6469 - protein, 2115 aa, synthetic construct
MPAAKRVKLDGGDKKYSIGLDIGTNSVGWAVITDEYKVPSKKFKVLGNTDRHSIKKNLIGALLFDSGETAEATRLKRTARRRYTRRKNRICYLQEIFSNEMAKVDDSFFHRLEESFLVEEDKKHERHPIFGNIVDEVAYHEKYPTIYHLRKKLVDSTDKADLRLIYLALAHMIKFRGHFLIEGDLNPDNSDVDKLFIQLVQTYNQLFEENPINASGVDAKAILSARLSKSRRLENLIAQLPGEKKNGLFGNLIALSLGLTPNFKSNFDLAEDAKLQLSKDTYDDDLDNLLAQIGDQYADLFLAAKNLSDAILLSDILRVNTEITKAPLSASMIKRYDEHHQDLTLLKALVRQQLPEKYKEIFFDQSKNGYAGYIDGGASQEEFYKFIKPILEKMDGTEELLVKLNREDLLRKQRTFDNGSIPHQIHLGELHAILRRQEDFYPFLKDNREKIEKILTFRIPYYVGPLARGNSRFAWMTRKSEETITPWNFEEVVDKGASAQSFIERMTNFDKNLPNEKVLPKHSLLYEYFTVYNELTKVKYVTEGMRKPAFLSGEQKKAIVDLLFKTNRKVTVKQLKEDYFKKIECFDSVEISGVEDRFNASLGTYHDLLKIIKDKDFLDNEENEDILEDIVLTLTLFEDREMIEERLKTYAHLFDDKVMKQLKRRRYTGWGRLSRKLINGIRDKQSGKTILDFLKSDGFANRNFMQLIHDDSLTFKEDIQKAQVSGQGDSLHEHIANLAGSPAIKKGILQTVKVVDELVKVMGRHKPENIVIEMARENQTTQKGQKNSRERMKRIEEGIKELGSQILKEHPVENTQLQNEKLYLYYLQNGRDMYVDQELDINRLSDYDVDHIVPQSFLKDDSIDNKVLTRSDKARGKSDNVPSEEVVKKMKNYWRQLLNAKLITQRKFDNLTKAERGGLSELDKAGFIKRQLVETRQITKHVAQILDSRMNTKYDENDKLIREVKVITLKSKLVSDFRKDFQFYKVREINNYHHAHDAYLNAVVGTALIKKYPKLESEFVYGDYKVYDVRKMIAKSEQEIGKATAKYFFYSNIMNFFKTEITLANGEIRKRPLIETNGETGEIVWDKGRDFATVRKVLSMPQVNIVKKTEVQTGGFSKESILPKRNSDKLIARKKDWDPKKYGGFDSPTVAYSVLVVAKVEKGKSKKLKSVKELLGITIMERSSFEKNPIDFLEAKGYKEVKKDLIIKLPKYSLFELENGRKRMLASAGELQKGNELALPSKYVNFLYLASHYEKLKGSPEDNEQKQLFVEQHKHYLDEIIEQISEFSKRVILADANLDKVLSAYNKHRDKPIREQAENIIHLFTLTNLGAPAAFKYFDTTIDRKRYTSTKEVLDATLIHQSITGLYETRIDLSQLGGDGGEAAAKEAAAKEAAAKEAAAKEAAAKEAAAKGGTLNIEDEYRLHETSKEPDVPLGSTWLSDFPQAWAETGGMGLAVRQAPLIIPLKATSTPVSIKQYPMSQEARLGIKPHIQRLLDQGILVPCQSPWNTPLLPVKKPGTNDYRPVQDLREVNKRVEDIHPTVPNPYNLLSGLPPSHQWYTVLDLKDAFFCLRLHPTSQPLFAFEWRDPEMGISGQLTWTRLPQGFKNSPTLFDEALHRDLADFRIQHPDLILLQYVDDLLLAATSEQDCQRGTRALLQTLGNLGYRASAKKAQICQKQVKYLGYLLKEGQRWLTEARKETVMGQPTPKTPRQLREFLGTAGFCRLWIPGFAEMAAPLYPLTKTGTLFNWGPDQQKAYQEIKQALLTAPALGLPDLTKPFELFVDEKQGYAKGVLTQKLGPWRRPVAYLSKKLDPVAAGWPPCLRMVAAIAVLTKDAGKLTMGQPLVILAPHAVEALVKQPPDRWLSNARMTHYQAMLLDTDRVQFGPVVALNPATLLPLPEKEAPHDCLEILAETHGTRPDLTDQPIPDADYTWYTDGSSFLQEGQRRAGAAVTTETEVIWARALPAGTSAQRAELIALTQALKMAEGKKLNVYTDSRYAFATAHVHGEIYRRRGLLTSEGREIKNKNEILALLKALFLPKRLSIIHCPGHQKGNSAEARGNRMADQAAREAAMKAVLETSTLLAGKRTADGSEFEKRTADGSEFESPKKKAKVE

SEQ ID NO: 6470 - protein, 2115 aa, synthetic construct
MPAAKRVKLDGGDKKYSIGLDIGTNSVGWAVITDEYKVPSKKFKVLGNTDRHSIKKNLIGALLFDSGETAEATRLKRTARRRYTRRKNRICYLQEIFSNEMAKVDDSFFHRLEESFLVEEDKKHERHPIFGNIVDEVAYHEKYPTIYHLRKKLVDSTDKADLRLIYLALAHMIKFRGHFLIEGDLNPDNSDVDKLFIQLVQTYNQLFEENPINASGVDAKAILSARLSKSRRLENLIAQLPGEKKNGLFGNLIALSLGLTPNFKSNFDLAEDAKLQLSKDTYDDDLDNLLAQIGDQYADLFLAAKNLSDAILLSDILRVNTEITKAPLSASMIKRYDEHHQDLTLLKALVRQQLPEKYKEIFFDQSKNGYAGYIDGGASQEEFYKFIKPILEKMDGTEELLVKLNREDLLRKQRTFDNGSIPHQIHLGELHAILRRQEDFYPFLKDNREKIEKILTFRIPYYVGPLARGNSRFAWMTRKSEETITPWNFEEVVDKGASAQSFIERMTNFDKNLPNEKVLPKHSLLYEYFTVYNELTKVKYVTEGMRKPAFLSGEQKKAIVDLLFKTNRKVTVKQLKEDYFKKIECFDSVEISGVEDRFNASLGTYHDLLKIIKDKDFLDNEENEDILEDIVLTLTLFEDREMIEERLKTYAHLFDDKVMKQLKRRRYTGWGRLSRKLINGIRDKQSGKTILDFLKSDGFANRNFMQLIHDDSLTFKEDIQKAQVSGQGDSLHEHIANLAGSPAIKKGILQTVKVVDELVKVMGRHKPENIVIEMARENQTTQKGQKNSRERMKRIEEGIKELGSQILKEHPVENTQLQNEKLYLYYLQNGRDMYVDQELDINRLSDYDVDHIVPQSFLKDDSIDNKVLTRSDKARGKSDNVPSEEVVKKMKNYWRQLLNAKLITQRKFDNLTKAERGGLSELDKAGFIKRQLVETRQITKHVAQILDSRMNTKYDENDKLIREVKVITLKSKLVSDFRKDFQFYKVREINNYHHAHDAYLNAVVGTALIKKYPKLESEFVYGDYKVYDVRKMIAKSEQEIGKATAKYFFYSNIMNFFKTEITLANGEIRKRPLIETNGETGEIVWDKGRDFATVRKVLSMPQVNIVKKTEVQTGGFSKESILPKRNSDKLIARKKDWDPKKYGGFDSPTVAYSVLVVAKVEKGKSKKLKSVKELLGITIMERSSFEKNPIDFLEAKGYKEVKKDLIIKLPKYSLFELENGRKRMLASAGELQKGNELALPSKYVNFLYLASHYEKLKGSPEDNEQKQLFVEQHKHYLDEIIEQISEFSKRVILADANLDKVLSAYNKHRDKPIREQAENIIHLFTLTNLGAPAAFKYFDTTIDRKRYTSTKEVLDATLIHQSITGLYETRIDLSQLGGDGGEAAAKEAAAKEAAAKEAAAKEAAAKEAAAKGGTLNIEDEYRLHETSKEPDVPLGSTWLSDFPQAWAETGGMGLAVRQAPLIIPLKATSTPVSIKQYPMSQEARLGIKPHIQRLLDQGILVPCQSPWNTPLLPVKKPGTNDYRPVQDLREVNKRVEDIHPTVPNPYNLLSGLPPSHQWYTVLDLKDAFFCLRLHPTSQPLFAFEWRDPEMGISGQLTWTRLPQGFKNSPTLFNEALHRDLADFRIQHPDLILLQYVDDLLLAATSEQDCQRGTRALLQTLGNLGYRASAKKAQICQKQVKYLGYLLKEGQRWLTEARKETVMGQPTPKTPRQLREFLGTAGFCRLWIPGFAEMAAPLYPLTKPGTLFNWGPDQQKAYQEIKQALLTAPALGLPDLTKPFELFVDEKQGYAKGVLTQKLGPWRRPVAYLSKKLDPVAAGWPPCLRMVAAIAVLTKDAGKLTMGQPLVILAPHAVEALVKQPPDRWLSNARMTHYQAMLLDTDRVQFGPVVALNPATLLPLPEKEAPHDCLEILAETHGTRPDLTDQPIPDADYTWYTDGSSFLQEGQRRAGAAVTTETEVIWARALPAGTSAQRAELIALTQALKMAEGKKLNVYTDSRYAFATAHVHGEIYRRRGWLTSEGREIKNKNEILALLKALFLPKRLSIIHCPGHQKGNSAEARGNRMADQAAREAAMKAVLETSTLLAGKRTADGSEFEKRTADGSEFESPKKKAKVE

SEQ ID NO: 6471 - protein, 2094 aa, synthetic construct
MPAAKRVKLDGGDKKYSIGLDIGTNSVGWAVITDEYKVPSKKFKVLGNTDRHSIKKNLIGALLFDSGETAEATRLKRTARRRYTRRKNRICYLQEIFSNEMAKVDDSFFHRLEESFLVEEDKKHERHPIFGNIVDEVAYHEKYPTIYHLRKKLVDSTDKADLRLIYLALAHMIKFRGHFLIEGDLNPDNSDVDKLFIQLVQTYNQLFEENPINASGVDAKAILSARLSKSRRLENLIAQLPGEKKNGLFGNLIALSLGLTPNFKSNFDLAEDAKLQLSKDTYDDDLDNLLAQIGDQYADLFLAAKNLSDAILLSDILRVNTEITKAPLSASMIKRYDEHHQDLTLLKALVRQQLPEKYKEIFFDQSKNGYAGYIDGGASQEEFYKFIKPILEKMDGTEELLVKLNREDLLRKQRTFDNGSIPHQIHLGELHAILRRQEDFYPFLKDNREKIEKILTFRIPYYVGPLARGNSRFAWMTRKSEETITPWNFEEVVDKGASAQSFIERMTNFDKNLPNEKVLPKHSLLYEYFTVYNELTKVKYVTEGMRKPAFLSGEQKKAIVDLLFKTNRKVTVKQLKEDYFKKIECFDSVEISGVEDRFNASLGTYHDLLKIIKDKDFLDNEENEDILEDIVLTLTLFEDREMIEERLKTYAHLFDDKVMKQLKRRRYTGWGRLSRKLINGIRDKQSGKTILDFLKSDGFANRNFMQLIHDDSLTFKEDIQKAQVSGQGDSLHEHIANLAGSPAIKKGILQTVKVVDELVKVMGRHKPENIVIEMARENQTTQKGQKNSRERMKRIEEGIKELGSQILKEHPVENTQLQNEKLYLYYLQNGRDMYVDQELDINRLSDYDVDHIVPQSFLKDDSIDNKVLTRSDKARGKSDNVPSEEVVKKMKNYWRQLLNAKLITQRKFDNLTKAERGGLSELDKAGFIKRQLVETRQITKHVAQILDSRMNTKYDENDKLIREVKVITLKSKLVSDFRKDFQFYKVREINNYHHAHDAYLNAVVGTALIKKYPKLESEFVYGDYKVYDVRKMIAKSEQEIGKATAKYFFYSNIMNFFKTEITLANGEIRKRPLIETNGETGEIVWDKGRDFATVRKVLSMPQVNIVKKTEVQTGGFSKESILPKRNSDKLIARKKDWDPKKYGGFDSPTVAYSVLVVAKVEKGKSKKLKSVKELLGITIMERSSFEKNPIDFLEAKGYKEVKKDLIIKLPKYSLFELENGRKRMLASAGELQKGNELALPSKYVNFLYLASHYEKLKGSPEDNEQKQLFVEQHKHYLDEIIEQISEFSKRVILADANLDKVLSAYNKHRDKPIREQAENIIHLFTLTNLGAPAAFKYFDTTIDRKRYTSTKEVLDATLIHQSITGLYETRIDLSQLGGDGGPAPGGTVSLQDEHRLFDIPVTTSLPDVWLQDFPQAWAETGGLGRAKCQAPIIIDLKPTAVPVSIKQYPMSLEAHMGIRQHIIKFLELGVLRPCRSPWNTPLLPVKKPGTQDYRPVQDLREINKRTVDIHPTVPNPYNLLSTLKPDYSWYTVLDLKDAFFCLPLAPQSQELFAFEWKDPERGISGQLTWTRLPQGFKNSPTLFNEALHRDLTDFRTQHPEVTLLQYVDDLLLAAPTKKACTQGTRHLLQELGEKGYRASAKKAQICQTKVTYLGYILSEGKRWLTPGRIETVARIPPPRNPREVREFLGTAGFCRLWIPGFAELAAPLYALTKPSTPFTWQTEHQLAFEALKKALLSAPALGLPDTSKPFTLFLDERQGIAKGVLTQKLGPWKRPVAYLSKKLDPVAAGWPPCLRIMAATAMLVKDSAKLTLGQPLTVITPHTLEAIVRQPPDRWITNARLTHYQALLLDTDRVQFGPPVTLNPATLLPVPENQPSPHDCRQVLAETHGTREDLKDQELPDADHTWYTDGSSYLDSGTRRAGAAVVDGHNTIWAQSLPPGTSAQKAELIALTKALELSKGKKANIYTDSRYAFATAHTHGSIYERRGWLTSEGKEIKNKAEIIALLKALFLPQEVAIIHCPGHQKGQDPVAVGNRQADRVARQAAMAEVLTLATEPDNTSHITAGKRTADGSEFEKRTADGSEFESPKKKAKVE

SEQ ID NO: 6472 - protein, 2088 aa, synthetic construct
MPAAKRVKLDGGDKKYSIGLDIGTNSVGWAVITDEYKVPSKKFKVLGNTDRHSIKKNLIGALLFDSGETAEATRLKRTARRRYTRRKNRICYLQEIFSNEMAKVDDSFFHRLEESFLVEEDKKHERHPIFGNIVDEVAYHEKYPTIYHLRKKLVDSTDKADLRLIYLALAHMIKFRGHFLIEGDLNPDNSDVDKLFIQLVQTYNQLFEENPINASGVDAKAILSARLSKSRRLENLIAQLPGEKKNGLFGNLIALSLGLTPNFKSNFDLAEDAKLQLSKDTYDDDLDNLLAQIGDQYADLFLAAKNLSDAILLSDILRVNTEITKAPLSASMIKRYDEHHQDLTLLKALVRQQLPEKYKEIFFDQSKNGYAGYIDGGASQEEFYKFIKPILEKMDGTEELLVKLNREDLLRKQRTFDNGSIPHQIHLGELHAILRRQEDFYPFLKDNREKIEKILTFRIPYYVGPLARGNSRFAWMTRKSEETITPWNFEEVVDKGASAQSFIERMTNFDKNLPNEKVLPKHSLLYEYFTVYNELTKVKYVTEGMRKPAFLSGEQKKAIVDLLFKTNRKVTVKQLKEDYFKKIECFDSVEISGVEDRFNASLGTYHDLLKIIKDKDFLDNEENEDILEDIVLTLTLFEDREMIEERLKTYAHLFDDKVMKQLKRRRYTGWGRLSRKLINGIRDKQSGKTILDFLKSDGFANRNFMQLIHDDSLTFKEDIQKAQVSGQGDSLHEHIANLAGSPAIKKGILQTVKVVDELVKVMGRHKPENIVIEMARENQTTQKGQKNSRERMKRIEEGIKELGSQILKEHPVENTQLQNEKLYLYYLQNGRDMYVDQELDINRLSDYDVDHIVPQSFLKDDSIDNKVLTRSDKARGKSDNVPSEEVVKKMKNYWRQLLNAKLITQRKFDNLTKAERGGLSELDKAGFIKRQLVETRQITKHVAQILDSRMNTKYDENDKLIREVKVITLKSKLVSDFRKDFQFYKVREINNYHHAHDAYLNAVVGTALIKKYPKLESEFVYGDYKVYDVRKMIAKSEQEIGKATAKYFFYSNIMNFFKTEITLANGEIRKRPLIETNGETGEIVWDKGRDFATVRKVLSMPQVNIVKKTEVQTGGFSKESILPKRNSDKLIARKKDWDPKKYGGFDSPTVAYSVLVVAKVEKGKSKKLKSVKELLGITIMERSSFEKNPIDFLEAKGYKEVKKDLIIKLPKYSLFELENGRKRMLASAGELQKGNELALPSKYVNFLYLASHYEKLKGSPEDNEQKQLFVEQHKHYLDEIIEQISEFSKRVILADANLDKVLSAYNKHRDKPIREQAENIIHLFTLTNLGAPAAFKYFDTTIDRKRYTSTKEVLDATLIHQSITGLYETRIDLSQLGGDGGPAPGGTLNLEDEYRLYETSAEPEVSPGSTWLSDFPQAWAETGGMGLAVRQAPLIIPLKATSTPVSIKQYPMSQEAKLGIKPHIQRLLDQGILVPCQSPWNTPLLPVKKPGTNDYRPVQDLREVNKRVEDIHPTVPNPYNLLSGLPPSHRWYTVLDLKDAFFCLRLHPTSQPLFAFEWRDPGMGISGQLTWTRLPQGFKNSPTLFNEALHRDLADFRIQHPDLILLQYVDDILLAATSELDCQQGTRALLLTLGNLGYRASAKKAQLCQKQVKYLGYLLKEGQRWLTEARKETVMGQPTPKTPRQLREFLGKAGFCRLFIPGFAEMAAPLYPLTKPGTLFNWGPDQQKAYQEIKQALLTAPALGLPDLTKPFELFVDEKQGYAKGVLTQKLGPWRRPVAYLSKKLDPVAAGWPPCLRMVAAIAVLRKDAGKLTMGQPLVILAPHAVEALVKQPPDRWLSNARMTHYQAMLLDTDRVQFGPVVALNPATLLPLPEEGAPHDCLEILAETHGTRPDLTDQPIPDADHTWYTDGSSFLQEGQRKAGAAVTTETEVIWARALPAGTSAQRAELIALTQALKMAEGKRLNVYTDSRYAFATAHIHGEIYRRRGWLTSEGREIKNKSEILALLKALFLPKRLSIIHCLGHQKGDSAEARGNRLADQAAREAAIKTPPDTSTLLAGKRTADGSEFEKRTADGSEFESPKKKAKVE

SEQ ID NO: 6473 - protein, 2088 aa, synthetic construct
MPAAKRVKLDGGDKKYSIGLDIGTNSVGWAVITDEYKVPSKKFKVLGNTDRHSIKKNLIGALLFDSGETAEATRLKRTARRRYTRRKNRICYLQEIFSNEMAKVDDSFFHRLEESFLVEEDKKHERHPIFGNIVDEVAYHEKYPTIYHLRKKLVDSTDKADLRLIYLALAHMIKFRGHFLIEGDLNPDNSDVDKLFIQLVQTYNQLFEENPINASGVDAKAILSARLSKSRRLENLIAQLPGEKKNGLFGNLIALSLGLTPNFKSNFDLAEDAKLQLSKDTYDDDLDNLLAQIGDQYADLFLAAKNLSDAILLSDILRVNTEITKAPLSASMIKRYDEHHQDLTLLKALVRQQLPEKYKEIFFDQSKNGYAGYIDGGASQEEFYKFIKPILEKMDGTEELLVKLNREDLLRKQRTFDNGSIPHQIHLGELHAILRRQEDFYPFLKDNREKIEKILTFRIPYYVGPLARGNSRFAWMTRKSEETITPWNFEEVVDKGASAQSFIERMTNFDKNLPNEKVLPKHSLLYEYFTVYNELTKVKYVTEGMRKPAFLSGEQKKAIVDLLFKTNRKVTVKQLKEDYFKKIECFDSVEISGVEDRFNASLGTYHDLLKIIKDKDFLDNEENEDILEDIVLTLTLFEDREMIEERLKTYAHLFDDKVMKQLKRRRYTGWGRLSRKLINGIRDKQSGKTILDFLKSDGFANRNFMQLIHDDSLTFKEDIQKAQVSGQGDSLHEHIANLAGSPAIKKGILQTVKVVDELVKVMGRHKPENIVIEMARENQTTQKGQKNSRERMKRIEEGIKELGSQILKEHPVENTQLQNEKLYLYYLQNGRDMYVDQELDINRLSDYDVDHIVPQSFLKDDSIDNKVLTRSDKARGKSDNVPSEEVVKKMKNYWRQLLNAKLITQRKFDNLTKAERGGLSELDKAGFIKRQLVETRQITKHVAQILDSRMNTKYDENDKLIREVKVITLKSKLVSDFRKDFQFYKVREINNYHHAHDAYLNAVVGTALIKKYPKLESEFVYGDYKVYDVRKMIAKSEQEIGKATAKYFFYSNIMNFFKTEITLANGEIRKRPLIETNGETGEIVWDKGRDFATVRKVLSMPQVNIVKKTEVQTGGFSKESILPKRNSDKLIARKKDWDPKKYGGFDSPTVAYSVLVVAKVEKGKSKKLKSVKELLGITIMERSSFEKNPIDFLEAKGYKEVKKDLIIKLPKYSLFELENGRKRMLASAGELQKGNELALPSKYVNFLYLASHYEKLKGSPEDNEQKQLFVEQHKHYLDEIIEQISEFSKRVILADANLDKVLSAYNKHRDKPIREQAENIIHLFTLTNLGAPAAFKYFDTTIDRKRYTSTKEVLDATLIHQSITGLYETRIDLSQLGGDGGPAPGGTLGIEDEYRLHETSTEPDVSLGSTWLSDFPQAWAETGGMGLAVRQAPLIIPLKATSTPVSIQQYPMSHEARLGIKPHIQRLLDQGILVPCQSPWNTPLLPVKKPGTNDYRPVQDLREVNKRVEDIHPTVPNPYNLLSGLPPSHQWYTVLDLKDAFFCLRLHPTSQPLFAFEWRDPGMGISGQLTWTRLPQGFKNSPTLFNEALHRDLADFRIQHPDLILLQYVDDILLAATSELDCQQGTRALLQTLGDLGYRASAKKAQICQKQVKYLGYLLREGQRWLTEARKETVMGQPVPKTPRQLREFLGTAGFCRLWIPGFAEMAAPLYPLTKPGTLFSWGPDQQKAYQEIKQALLTAPALGLPDLTKPFELFVDEKQGYAKGVLTQKLGPWRRPVAYLSKKLDPVAAGWPPCLRMVAAIAVLTKDAGKLTMGQPLVILAPHAVEALVKQPPDRWLSNARMTHYQAMLLDTDRVQFGPVVALNPATLLPLPEEGAPHDCLEILAETHGTRPDLTDQPIPDADHTWYTDGSSFLQEGQRKAGAAVTTETEVIWAGALPAGTSAQRAELIALTQALKMAEGKRLNVYTDSRYAFATAHIHGEIYRRRGWLTSEGREIKNKSEILALLKALFLPKRLSIIHCLGHQKGDSAEARGNRLADQAAREAAIKTPPDTSTLLAGKRTADGSEFEKRTADGSEFESPKKKAKVE

SEQ ID NO: 6474 - protein, 2088 aa, synthetic construct
MPAAKRVKLDGGDKKYSIGLDIGTNSVGWAVITDEYKVPSKKFKVLGNTDRHSIKKNLIGALLFDSGETAEATRLKRTARRRYTRRKNRICYLQEIFSNEMAKVDDSFFHRLEESFLVEEDKKHERHPIFGNIVDEVAYHEKYPTIYHLRKKLVDSTDKADLRLIYLALAHMIKFRGHFLIEGDLNPDNSDVDKLFIQLVQTYNQLFEENPINASGVDAKAILSARLSKSRRLENLIAQLPGEKKNGLFGNLIALSLGLTPNFKSNFDLAEDAKLQLSKDTYDDDLDNLLAQIGDQYADLFLAAKNLSDAILLSDILRVNTEITKAPLSASMIKRYDEHHQDLTLLKALVRQQLPEKYKEIFFDQSKNGYAGYIDGGASQEEFYKFIKPILEKMDGTEELLVKLNREDLLRKQRTFDNGSIPHQIHLGELHAILRRQEDFYPFLKDNREKIEKILTFRIPYYVGPLARGNSRFAWMTRKSEETITPWNFEEVVDKGASAQSFIERMTNFDKNLPNEKVLPKHSLLYEYFTVYNELTKVKYVTEGMRKPAFLSGEQKKAIVDLLFKTNRKVTVKQLKEDYFKKIECFDSVEISGVEDRFNASLGTYHDLLKIIKDKDFLDNEENEDILEDIVLTLTLFEDREMIEERLKTYAHLFDDKVMKQLKRRRYTGWGRLSRKLINGIRDKQSGKTILDFLKSDGFANRNFMQLIHDDSLTFKEDIQKAQVSGQGDSLHEHIANLAGSPAIKKGILQTVKVVDELVKVMGRHKPENIVIEMARENQTTQKGQKNSRERMKRIEEGIKELGSQILKEHPVENTQLQNEKLYLYYLQNGRDMYVDQELDINRLSDYDVDHIVPQSFLKDDSIDNKVLTRSDKARGKSDNVPSEEVVKKMKNYWRQLLNAKLITQRKFDNLTKAERGGLSELDKAGFIKRQLVETRQITKHVAQILDSRMNTKYDENDKLIREVKVITLKSKLVSDFRKDFQFYKVREINNYHHAHDAYLNAVVGTALIKKYPKLESEFVYGDYKVYDVRKMIAKSEQEIGKATAKYFFYSNIMNFFKTEITLANGEIRKRPLIETNGETGEIVWDKGRDFATVRKVLSMPQVNIVKKTEVQTGGFSKESILPKRNSDKLIARKKDWDPKKYGGFDSPTVAYSVLVVAKVEKGKSKKLKSVKELLGITIMERSSFEKNPIDFLEAKGYKEVKKDLIIKLPKYSLFELENGRKRMLASAGELQKGNELALPSKYVNFLYLASHYEKLKGSPEDNEQKQLFVEQHKHYLDEIIEQISEFSKRVILADANLDKVLSAYNKHRDKPIREQAENIIHLFTLTNLGAPAAFKYFDTTIDRKRYTSTKEVLDATLIHQSITGLYETRIDLSQLGGDGGPAPGGTLNIEDEYRLHETSKGPDVPLGSTWLSDFPQAWAETGGMGLAVRQAPLIIPLKATSTPVSIKQYPMSQEARLGIKPHIQRLLDQGILVPCQSPWNTPLLPVKKPGTNDYRPVQDLREVNKRVEDIHPTVPNPYNLLSGLPPSHQWYTVLDLKDAFFCLRLHPTSQSLFAFEWRDPEMGISGQLTWTRLPQGFKNSPTLFDEALHRDLADFRIQHPDLILLQYVDDLLLAATSELDCQQGTRALLQTLGDLGYRASAKKAQICQKQVKYLGYLLKEGQRWLTEARKETVMGQPTPKTPRQLREFLGTAGFCRLWIPGFAEMAAPLYPLTKTGTLFEWGPDQQKAYQEIKQALLTAPALGLPDLTKPFELFVDEKQGYAKGVLTQKLGPWRRPVAYLSKKLDPVAAGWPPCLRMVAAIAVLTKDAGKLTMGQPLVILAPHAVEALVKQPPDRWLSNARMTHYQALLLDTDRVQFGPIVALNPATLLPLPEEGLQHDCLDILAEAHGTRPDLTDQPLPDADHTWYTDGSSFLQEGQRKAGAAVTTETEVVWAKALPAGTSAQRAELIALTQALKMAEGKKLNVYTDSRYAFATAHIHGEIYRRRGLLTSEGKEIKNKDEILALLKALFLPKRLSIIHCPGHQKGNRAEARGNRMADQAAREVATRETPETSTLLAGKRTADGSEFEKRTADGSEFESPKKKAKVE

SEQ ID NO: 6475 - protein, 2088 aa, synthetic construct
MPAAKRVKLDGGDKKYSIGLDIGTNSVGWAVITDEYKVPSKKFKVLGNTDRHSIKKNLIGALLFDSGETAEATRLKRTARRRYTRRKNRICYLQEIFSNEMAKVDDSFFHRLEESFLVEEDKKHERHPIFGNIVDEVAYHEKYPTIYHLRKKLVDSTDKADLRLIYLALAHMIKFRGHFLIEGDLNPDNSDVDKLFIQLVQTYNQLFEENPINASGVDAKAILSARLSKSRRLENLIAQLPGEKKNGLFGNLIALSLGLTPNFKSNFDLAEDAKLQLSKDTYDDDLDNLLAQIGDQYADLFLAAKNLSDAILLSDILRVNTEITKAPLSASMIKRYDEHHQDLTLLKALVRQQLPEKYKEIFFDQSKNGYAGYIDGGASQEEFYKFIKPILEKMDGTEELLVKLNREDLLRKQRTFDNGSIPHQIHLGELHAILRRQEDFYPFLKDNREKIEKILTFRIPYYVGPLARGNSRFAWMTRKSEETITPWNFEEVVDKGASAQSFIERMTNFDKNLPNEKVLPKHSLLYEYFTVYNELTKVKYVTEGMRKPAFLSGEQKKAIVDLLFKTNRKVTVKQLKEDYFKKIECFDSVEISGVEDRFNASLGTYHDLLKIIKDKDFLDNEENEDILEDIVLTLTLFEDREMIEERLKTYAHLFDDKVMKQLKRRRYTGWGRLSRKLINGIRDKQSGKTILDFLKSDGFANRNFMQLIHDDSLTFKEDIQKAQVSGQGDSLHEHIANLAGSPAIKKGILQTVKVVDELVKVMGRHKPENIVIEMARENQTTQKGQKNSRERMKRIEEGIKELGSQILKEHPVENTQLQNEKLYLYYLQNGRDMYVDQELDINRLSDYDVDHIVPQSFLKDDSIDNKVLTRSDKARGKSDNVPSEEVVKKMKNYWRQLLNAKLITQRKFDNLTKAERGGLSELDKAGFIKRQLVETRQITKHVAQILDSRMNTKYDENDKLIREVKVITLKSKLVSDFRKDFQFYKVREINNYHHAHDAYLNAVVGTALIKKYPKLESEFVYGDYKVYDVRKMIAKSEQEIGKATAKYFFYSNIMNFFKTEITLANGEIRKRPLIETNGETGEIVWDKGRDFATVRKVLSMPQVNIVKKTEVQTGGFSKESILPKRNSDKLIARKKDWDPKKYGGFDSPTVAYSVLVVAKVEKGKSKKLKSVKELLGITIMERSSFEKNPIDFLEAKGYKEVKKDLIIKLPKYSLFELENGRKRMLASAGELQKGNELALPSKYVNFLYLASHYEKLKGSPEDNEQKQLFVEQHKHYLDEIIEQISEFSKRVILADANLDKVLSAYNKHRDKPIREQAENIIHLFTLTNLGAPAAFKYFDTTIDRKRYTSTKEVLDATLIHQSITGLYETRIDLSQLGGDGGPAPGGTLNIEDEYRLHEISTEPDVSPGSTWLSDFPQAWAETGGMGLAVRQAPLIIPLKATSTPVSIKQYPMSQEAKLGIKPHIQRLLDQGILVPCQSPWNTPLLPVKKPGTNDYRPVQGLREVNKRVEDIHPTVPNPYNLLSGLPTSHRWYTVLDLKDAFFCLRLHPTSQPLFASEWRDPGMGISGQLTWTRLPQGFKNSPTLFNEALHRGLADFRIQHPDLILLQYVDDLLLAATSELDCQQGTRALLKTLGNLGYRASAKKAQICQKQVKYLGYLLREGQRWLTEARKETVMGQPTPKTPRQLREFLGTAGFCRLWIPRFAEMAAPLYPLTKPGTLFNWGPDQQKAYHEIKQALLTAPALGLPDLTKPFELFVDEKQGYAKGVLTQKLGPWRRPVAYLSKKLDPVAAGWPPCLRMVAAIAVLTKDAGKLTMGQPLVILAPHAVEALVKQPPDRWLSNARMTHYQAMLLDTDRVQFGPVVALNPATLLPLPEEGAPHDCLEILAETHGTEPDLTDQPIPDADHTWYTDGSSFLQEGQRKAGAAVTTETEVIWARALPAGTSAQRAELIALTQALKMAEGKRLNVYTDSRYAFATAHIHGEIYKRRGWLTSEGREIKNKSEILALLKALFLPKRLSIIHCLGHQKGDSAEARGNRLADQAAREAAIKTPPDTSTLLAGKRTADGSEFEKRTADGSEFESPKKKAKVE

SEQ ID NO: 6476 - protein, 2082 aa, synthetic construct
MPAAKRVKLDGGDKKYSIGLDIGTNSVGWAVITDEYKVPSKKFKVLGNTDRHSIKKNLIGALLFDSGETAEATRLKRTARRRYTRRKNRICYLQEIFSNEMAKVDDSFFHRLEESFLVEEDKKHERHPIFGNIVDEVAYHEKYPTIYHLRKKLVDSTDKADLRLIYLALAHMIKFRGHFLIEGDLNPDNSDVDKLFIQLVQTYNQLFEENPINASGVDAKAILSARLSKSRRLENLIAQLPGEKKNGLFGNLIALSLGLTPNFKSNFDLAEDAKLQLSKDTYDDDLDNLLAQIGDQYADLFLAAKNLSDAILLSDILRVNTEITKAPLSASMIKRYDEHHQDLTLLKALVRQQLPEKYKEIFFDQSKNGYAGYIDGGASQEEFYKFIKPILEKMDGTEELLVKLNREDLLRKQRTFDNGSIPHQIHLGELHAILRRQEDFYPFLKDNREKIEKILTFRIPYYVGPLARGNSRFAWMTRKSEETITPWNFEEVVDKGASAQSFIERMTNFDKNLPNEKVLPKHSLLYEYFTVYNELTKVKYVTEGMRKPAFLSGEQKKAIVDLLFKTNRKVTVKQLKEDYFKKIECFDSVEISGVEDRFNASLGTYHDLLKIIKDKDFLDNEENEDILEDIVLTLTLFEDREMIEERLKTYAHLFDDKVMKQLKRRRYTGWGRLSRKLINGIRDKQSGKTILDFLKSDGFANRNFMQLIHDDSLTFKEDIQKAQVSGQGDSLHEHIANLAGSPAIKKGILQTVKVVDELVKVMGRHKPENIVIEMARENQTTQKGQKNSRERMKRIEEGIKELGSQILKEHPVENTQLQNEKLYLYYLQNGRDMYVDQELDINRLSDYDVDHIVPQSFLKDDSIDNKVLTRSDKARGKSDNVPSEEVVKKMKNYWRQLLNAKLITQRKFDNLTKAERGGLSELDKAGFIKRQLVETRQITKHVAQILDSRMNTKYDENDKLIREVKVITLKSKLVSDFRKDFQFYKVREINNYHHAHDAYLNAVVGTALIKKYPKLESEFVYGDYKVYDVRKMIAKSEQEIGKATAKYFFYSNIMNFFKTEITLANGEIRKRPLIETNGETGEIVWDKGRDFATVRKVLSMPQVNIVKKTEVQTGGFSKESILPKRNSDKLIARKKDWDPKKYGGFDSPTVAYSVLVVAKVEKGKSKKLKSVKELLGITIMERSSFEKNPIDFLEAKGYKEVKKDLIIKLPKYSLFELENGRKRMLASAGELQKGNELALPSKYVNFLYLASHYEKLKGSPEDNEQKQLFVEQHKHYLDEIIEQISEFSKRVILADANLDKVLSAYNKHRDKPIREQAENIIHLFTLTNLGAPAAFKYFDTTIDRKRYTSTKEVLDATLIHQSITGLYETRIDLSQLGGDGGPAPGGTLQLDDEYRLYSPLVKPDQNIQFWLEQFPQAWAETAGMGLAKQVPPQVIQLKASATPVSVRQYPLSKEAQEGIRPHVQRLIQQGILVPVQSPWNTPLLPVRKPGTNDYRPVQDLREVNKRVQDIHPTVPNPYNLLCALPPQRSWYTVLDLKDAFFCLRLHPTSQPLFAFEWRDPGTGRTGQLTWTRLPQGFKNSPTIFDEALHRDLANFRIQHPQVTLLQYVDDLLLAGATKQDCLEGTKALLLELSDLGYRASAKKAQICRREVTYLGYSLRDGQRWLTEARKKTVVQIPAPTTAKQVREFLGTAGFCRLWIPGFATLAAPLYPLTKEKGEFSWAPEHQKAFDAIKKALLSAPALALPDVTKPFTLYVDERKGVARGVLTQTLGPWRRPVAYLSKKLDPVASGWPVCLKAIAAVAILVKDADKLTLGQNITVIAPHALENIVRQPPDRWMTNARMTHYQSLLLTERVTFAPPAALNPATLLPEETDEPVTHDCHQLLIEETGVRKDLTDIPLTGEVLTWFTDGSSYVVEGKRMAGAAVVDGTRTIWASSLPEGTSAQKAELMALTQALRLAEGKSINIYTDSRYAFATAHVHGAIYKQRGLLTSAGREIKNKEEILSLLEALHLPKRLAIIHCPGHQKAKDPISRGNQMADRVAKQAAQGVNLLAGKRTADGSEFEKRTADGSEFESPKKKAKVE

SEQ ID NO: 6477 - protein, 2168 aa, synthetic construct
MPAAKRVKLDGGDKKYSIGLDIGTNSVGWAVITDEYKVPSKKFKVLGNTDRHSIKKNLIGALLFDSGETAEATRLKRTARRRYTRRKNRICYLQEIFSNEMAKVDDSFFHRLEESFLVEEDKKHERHPIFGNIVDEVAYHEKYPTIYHLRKKLVDSTDKADLRLIYLALAHMIKFRGHFLIEGDLNPDNSDVDKLFIQLVQTYNQLFEENPINASGVDAKAILSARLSKSRRLENLIAQLPGEKKNGLFGNLIALSLGLTPNFKSNFDLAEDAKLQLSKDTYDDDLDNLLAQIGDQYADLFLAAKNLSDAILLSDILRVNTEITKAPLSASMIKRYDEHHQDLTLLKALVRQQLPEKYKEIFFDQSKNGYAGYIDGGASQEEFYKFIKPILEKMDGTEELLVKLNREDLLRKQRTFDNGSIPHQIHLGELHAILRRQEDFYPFLKDNREKIEKILTFRIPYYVGPLARGNSRFAWMTRKSEETITPWNFEEVVDKGASAQSFIERMTNFDKNLPNEKVLPKHSLLYEYFTVYNELTKVKYVTEGMRKPAFLSGEQKKAIVDLLFKTNRKVTVKQLKEDYFKKIECFDSVEISGVEDRFNASLGTYHDLLKIIKDKDFLDNEENEDILEDIVLTLTLFEDREMIEERLKTYAHLFDDKVMKQLKRRRYTGWGRLSRKLINGIRDKQSGKTILDFLKSDGFANRNFMQLIHDDSLTFKEDIQKAQVSGQGDSLHEHIANLAGSPAIKKGILQTVKVVDELVKVMGRHKPENIVIEMARENQTTQKGQKNSRERMKRIEEGIKELGSQILKEHPVENTQLQNEKLYLYYLQNGRDMYVDQELDINRLSDYDVDHIVPQSFLKDDSIDNKVLTRSDKARGKSDNVPSEEVVKKMKNYWRQLLNAKLITQRKFDNLTKAERGGLSELDKAGFIKRQLVETRQITKHVAQILDSRMNTKYDENDKLIREVKVITLKSKLVSDFRKDFQFYKVREINNYHHAHDAYLNAVVGTALIKKYPKLESEFVYGDYKVYDVRKMIAKSEQEIGKATAKYFFYSNIMNFFKTEITLANGEIRKRPLIETNGETGEIVWDKGRDFATVRKVLSMPQVNIVKKTEVQTGGFSKESILPKRNSDKLIARKKDWDPKKYGGFDSPTVAYSVLVVAKVEKGKSKKLKSVKELLGITIMERSSFEKNPIDFLEAKGYKEVKKDLIIKLPKYSLFELENGRKRMLASAGELQKGNELALPSKYVNFLYLASHYEKLKGSPEDNEQKQLFVEQHKHYLDEIIEQISEFSKRVILADANLDKVLSAYNKHRDKPIREQAENIIHLFTLTNLGAPAAFKYFDTTIDRKRYTSTKEVLDATLIHQSITGLYETRIDLSQLGGDGGPAPGGMDPLQLLQPLEAEIKGTKLKAHWNSGATITCVPQAFLEEEVPIKNIWIKTIHGEKEQPVYYLTFKIQGRKVEAEVISSPYDYILVSPSDIPWLMKKPLQLTTLVPLQEYEERLLKQTMLTGSYKEKLQSLFLKYDALWQHWENQVGHRRIKPHHIATGTVNPRPQKQYPINPKAKASIQTVINDLLKQGVLIQQNSIMNTPVYPVPKPDGKWRMVLDYREVNKTIPLIAAQNQHSAGILSSIFRGKYKTTLDLSNGFWAHSITPESYWLTAFTWLGQQYCWTRLPQGFLNSPALFNADVVDLLKEVPNVQVYVDDIYISHDDPREHLEQLEKVFSLLLNAGYVVSLKKSEIAQHEVEFLGFNITKEGRGLTETFKQKLLNITPPRDLKQLQSILGKLNFARNFIPNFSELVKPLYNIIATAPGKYITWTTDNSQQLQNIISMLNSAENLEERNPEVRLIMKVNTSPSAGYIRFYNEFAKRPIMYLNYVYTKAEVKFTNTEKLLTTIHKGLIKALDLGMGQEILVYSPIVSMTKIQKTPLPERKALPIRWITWMSYLEDPRIQFHYDKTLPELQQVPTVTDDIIAKIKHPSEFSMVFYTDGSAIKHPNVNKSHNAGMGIAQVQFKPEFTVINTWSIPLGDHTAQLAEVAAVEFACKKALKIDGPVLIVTDSFYVAESVNKELPYWQSNGFFNNKKKPLKHVSKWKSIADCIQLKPDIIIIHEKGHQPTASTFHTEGNNLADKLATQGSYVVNAGKRTADGSEFEKRTADGSEFESPKKKAKVE

SEQ ID NO: 6478 - protein, 2086 aa, synthetic construct
MPAAKRVKLDGGDKKYSIGLDIGTNSVGWAVITDEYKVPSKKFKVLGNTDRHSIKKNLIGALLFDSGETAEATRLKRTARRRYTRRKNRICYLQEIFSNEMAKVDDSFFHRLEESFLVEEDKKHERHPIFGNIVDEVAYHEKYPTIYHLRKKLVDSTDKADLRLIYLALAHMIKFRGHFLIEGDLNPDNSDVDKLFIQLVQTYNQLFEENPINASGVDAKAILSARLSKSRRLENLIAQLPGEKKNGLFGNLIALSLGLTPNFKSNFDLAEDAKLQLSKDTYDDDLDNLLAQIGDQYADLFLAAKNLSDAILLSDILRVNTEITKAPLSASMIKRYDEHHQDLTLLKALVRQQLPEKYKEIFFDQSKNGYAGYIDGGASQEEFYKFIKPILEKMDGTEELLVKLNREDLLRKQRTFDNGSIPHQIHLGELHAILRRQEDFYPFLKDNREKIEKILTFRIPYYVGPLARGNSRFAWMTRKSEETITPWNFEEVVDKGASAQSFIERMTNFDKNLPNEKVLPKHSLLYEYFTVYNELTKVKYVTEGMRKPAFLSGEQKKAIVDLLFKTNRKVTVKQLKEDYFKKIECFDSVEISGVEDRFNASLGTYHDLLKIIKDKDFLDNEENEDILEDIVLTLTLFEDREMIEERLKTYAHLFDDKVMKQLKRRRYTGWGRLSRKLINGIRDKQSGKTILDFLKSDGFANRNFMQLIHDDSLTFKEDIQKAQVSGQGDSLHEHIANLAGSPAIKKGILQTVKVVDELVKVMGRHKPENIVIEMARENQTTQKGQKNSRERMKRIEEGIKELGSQILKEHPVENTQLQNEKLYLYYLQNGRDMYVDQELDINRLSDYDVDHIVPQSFLKDDSIDNKVLTRSDKARGKSDNVPSEEVVKKMKNYWRQLLNAKLITQRKFDNLTKAERGGLSELDKAGFIKRQLVETRQITKHVAQILDSRMNTKYDENDKLIREVKVITLKSKLVSDFRKDFQFYKVREINNYHHAHDAYLNAVVGTALIKKYPKLESEFVYGDYKVYDVRKMIAKSEQEIGKATAKYFFYSNIMNFFKTEITLANGEIRKRPLIETNGETGEIVWDKGRDFATVRKVLSMPQVNIVKKTEVQTGGFSKESILPKRNSDKLIARKKDWDPKKYGGFDSPTVAYSVLVVAKVEKGKSKKLKSVKELLGITIMERSSFEKNPIDFLEAKGYKEVKKDLIIKLPKYSLFELENGRKRMLASAGELQKGNELALPSKYVNFLYLASHYEKLKGSPEDNEQKQLFVEQHKHYLDEIIEQISEFSKRVILADANLDKVLSAYNKHRDKPIREQAENIIHLFTLTNLGAPAAFKYFDTTIDRKRYTSTKEVLDATLIHQSITGLYETRIDLSQLGGDGGPAPGGVLNLEEEYRLHEKPVPSSIDPSWLQLFPTVWAERAGMGLANQVPPVVVELRSGASPVAVRQYPMSKEAREGIRPHIQRFLDLGVLVPCQSPWNTPLLPVKKPGTNDYRPVQDLREINKRVQDIHPTVPNPYNLLSSLPPSHTWYSVLDLKDAFFCLKLHPNSQPLFAFEWRDPEKGNTGQLTWTRLPQGFKNSPTLFNEALHRDLAPFRALNPQVVLLQYVDDLLVAAPTYRDCKEGTQKLLQELSKLGYRVSAKKAQLCQKEVTYLGYLLKEGKRWLTPARKATVMKIPPPTTPRQVREFLGTAGFCRLWIPGFASLAAPLYPLTKPSIPFIWTEEHQKAFDRIKEALLSAPALALPDLTKPFTLYVDERAGVARGVLTQTLGPWRRPVAYLSKKLDPVASGWPTCLKAVAAVALLLKDADKLTLGQNVTVIASHSLESIVRQPPDRWMTNARMTHYQSLLLNERVSFAPPAVLNPATLLPVESEATPVHRCSEILAEETGTRRDLKDQPLPGVPAWYTDGSSFIAEGKRRAGAAIVDGKRTVWASSLPEGTSAQKAELVALTQALRLAEGKDINIYTDSRYAFATAHIHGAIYKQRGWLTSAGKDIKNKEEILALLEAIHLPKRVAIIHCPGHQKGNDPVATGNRRADEAAKQAALSTRVLAETTKPAGKRTADGSEFEKRTADGSEFESPKKKAKVE

SEQ ID NO: 6479 - protein, 2086 aa, synthetic construct
MPAAKRVKLDGGDKKYSIGLDIGTNSVGWAVITDEYKVPSKKFKVLGNTDRHSIKKNLIGALLFDSGETAEATRLKRTARRRYTRRKNRICYLQEIFSNEMAKVDDSFFHRLEESFLVEEDKKHERHPIFGNIVDEVAYHEKYPTIYHLRKKLVDSTDKADLRLIYLALAHMIKFRGHFLIEGDLNPDNSDVDKLFIQLVQTYNQLFEENPINASGVDAKAILSARLSKSRRLENLIAQLPGEKKNGLFGNLIALSLGLTPNFKSNFDLAEDAKLQLSKDTYDDDLDNLLAQIGDQYADLFLAAKNLSDAILLSDILRVNTEITKAPLSASMIKRYDEHHQDLTLLKALVRQQLPEKYKEIFFDQSKNGYAGYIDGGASQEEFYKFIKPILEKMDGTEELLVKLNREDLLRKQRTFDNGSIPHQIHLGELHAILRRQEDFYPFLKDNREKIEKILTFRIPYYVGPLARGNSRFAWMTRKSEETITPWNFEEVVDKGASAQSFIERMTNFDKNLPNEKVLPKHSLLYEYFTVYNELTKVKYVTEGMRKPAFLSGEQKKAIVDLLFKTNRKVTVKQLKEDYFKKIECFDSVEISGVEDRFNASLGTYHDLLKIIKDKDFLDNEENEDILEDIVLTLTLFEDREMIEERLKTYAHLFDDKVMKQLKRRRYTGWGRLSRKLINGIRDKQSGKTILDFLKSDGFANRNFMQLIHDDSLTFKEDIQKAQVSGQGDSLHEHIANLAGSPAIKKGILQTVKVVDELVKVMGRHKPENIVIEMARENQTTQKGQKNSRERMKRIEEGIKELGSQILKEHPVENTQLQNEKLYLYYLQNGRDMYVDQELDINRLSDYDVDHIVPQSFLKDDSIDNKVLTRSDKARGKSDNVPSEEVVKKMKNYWRQLLNAKLITQRKFDNLTKAERGGLSELDKAGFIKRQLVETRQITKHVAQILDSRMNTKYDENDKLIREVKVITLKSKLVSDFRKDFQFYKVREINNYHHAHDAYLNAVVGTALIKKYPKLESEFVYGDYKVYDVRKMIAKSEQEIGKATAKYFFYSNIMNFFKTEITLANGEIRKRPLIETNGETGEIVWDKGRDFATVRKVLSMPQVNIVKKTEVQTGGFSKESILPKRNSDKLIARKKDWDPKKYGGFDSPTVAYSVLVVAKVEKGKSKKLKSVKELLGITIMERSSFEKNPIDFLEAKGYKEVKKDLIIKLPKYSLFELENGRKRMLASAGELQKGNELALPSKYVNFLYLASHYEKLKGSPEDNEQKQLFVEQHKHYLDEIIEQISEFSKRVILADANLDKVLSAYNKHRDKPIREQAENIIHLFTLTNLGAPAAFKYFDTTIDRKRYTSTKEVLDATLIHQSITGLYETRIDLSQLGGDGGPAPGGVLNLEEEYRLHEKPVPSSIDPSWLQLFPTVWAERAGMGLANQVPPVVVELRSGASPVAVRQYPMSKEAREGIRPHIQRFLDLGVLVPCQSPWNTPLLPVKKPGTNDYRPVQDLREINKRVQDIHPTVPNPYNLLSSLPPSHTWYSVLDLKDAFFCLKLHPNSQPLFAFEWRDPEKGNTGQLTWTRLPQGFKNSPTLFNEALHRDLAPFRALNPQVVLLQYVDDLLVAAPTYRDCKEGTQKLLQELSKLGYRVSAKKAQLCQKEVTYLGYLLKEGKRWLTPARKATVMKIPPPTTPRQVREFLGKAGFCRLFIPGFASLAAPLYPLTKPSIPFIWTEEHQKAFDRIKEALLSAPALALPDLTKPFTLYVDERAGVARGVLTQTLGPWRRPVAYLSKKLDPVASGWPTCLKAVAAVALLLKDADKLTLGQNVTVIASHSLESIVRQPPDRWMTNARMTHYQSLLLNERVSFAPPAVLNPATLLPVESEATPVHRCSEILAEETGTRRDLKDQPLPGVPAWYTDGSSFIAEGKRRAGAAIVDGKRTVWASSLPEGTSAQKAELVALTQALRLAEGKDINIYTDSRYAFATAHIHGAIYKQRGWLTSAGKDIKNKEEILALLEAIHLPKRVAIIHCPGHQKGNDPVATGNRRADEAAKQAALSTRVLAETTKPAGKRTADGSEFEKRTADGSEFESPKKKAKVE

SEQ ID NO: 6480 - protein, 2088 aa, synthetic construct
MPAAKRVKLDGGDKKYSIGLDIGTNSVGWAVITDEYKVPSKKFKVLGNTDRHSIKKNLIGALLFDSGETAEATRLKRTARRRYTRRKNRICYLQEIFSNEMAKVDDSFFHRLEESFLVEEDKKHERHPIFGNIVDEVAYHEKYPTIYHLRKKLVDSTDKADLRLIYLALAHMIKFRGHFLIEGDLNPDNSDVDKLFIQLVQTYNQLFEENPINASGVDAKAILSARLSKSRRLENLIAQLPGEKKNGLFGNLIALSLGLTPNFKSNFDLAEDAKLQLSKDTYDDDLDNLLAQIGDQYADLFLAAKNLSDAILLSDILRVNTEITKAPLSASMIKRYDEHHQDLTLLKALVRQQLPEKYKEIFFDQSKNGYAGYIDGGASQEEFYKFIKPILEKMDGTEELLVKLNREDLLRKQRTFDNGSIPHQIHLGELHAILRRQEDFYPFLKDNREKIEKILTFRIPYYVGPLARGNSRFAWMTRKSEETITPWNFEEVVDKGASAQSFIERMTNFDKNLPNEKVLPKHSLLYEYFTVYNELTKVKYVTEGMRKPAFLSGEQKKAIVDLLFKTNRKVTVKQLKEDYFKKIECFDSVEISGVEDRFNASLGTYHDLLKIIKDKDFLDNEENEDILEDIVLTLTLFEDREMIEERLKTYAHLFDDKVMKQLKRRRYTGWGRLSRKLINGIRDKQSGKTILDFLKSDGFANRNFMQLIHDDSLTFKEDIQKAQVSGQGDSLHEHIANLAGSPAIKKGILQTVKVVDELVKVMGRHKPENIVIEMARENQTTQKGQKNSRERMKRIEEGIKELGSQILKEHPVENTQLQNEKLYLYYLQNGRDMYVDQELDINRLSDYDVDHIVPQSFLKDDSIDNKVLTRSDKARGKSDNVPSEEVVKKMKNYWRQLLNAKLITQRKFDNLTKAERGGLSELDKAGFIKRQLVETRQITKHVAQILDSRMNTKYDENDKLIREVKVITLKSKLVSDFRKDFQFYKVREINNYHHAHDAYLNAVVGTALIKKYPKLESEFVYGDYKVYDVRKMIAKSEQEIGKATAKYFFYSNIMNFFKTEITLANGEIRKRPLIETNGETGEIVWDKGRDFATVRKVLSMPQVNIVKKTEVQTGGFSKESILPKRNSDKLIARKKDWDPKKYGGFDSPTVAYSVLVVAKVEKGKSKKLKSVKELLGITIMERSSFEKNPIDFLEAKGYKEVKKDLIIKLPKYSLFELENGRKRMLASAGELQKGNELALPSKYVNFLYLASHYEKLKGSPEDNEQKQLFVEQHKHYLDEIIEQISEFSKRVILADANLDKVLSAYNKHRDKPIREQAENIIHLFTLTNLGAPAAFKYFDTTIDRKRYTSTKEVLDATLIHQSITGLYETRIDLSQLGGDGGPAPGGTLNIEDEYRLHETSKEPDVPLGSTWLSDFPQAWAETGGMGLAVRQAPLIIPLKATSTPVSIKQYPMSQEARLGIKPHIQRLLDQGILVPCQSPWNTPLLPVKKPGTNDYRPVQDLREVNKRVEDIHPTVPNPYNLLSGLPPSHQWYTVLDLKDAFFCLRLHPTSQPLFAFEWRDPEMGISGQLTWTRLPQGFKNSPTLFNEALHRDLADFRIQHPDLILLQYVDDLLLAATSEQDCQRGTRALLQTLGNLGYRASAKKAQICQKQVKYLGYLLKEGQRWLTEARKETVMGQPTPKTPRQLREFLGKAGFCRLFIPGFAEMAAPLYPLTKPGTLFNWGPDQQKAYQEIKQALLTAPALGLPDLTKPFELFVDEKQGYAKGVLTQKLGPWRRPVAYLSKKLDPVAAGWPPCLRMVAAIAVLTKDAGKLTMGQPLVILAPHAVEALVKQPPDRWLSNARMTHYQAMLLDTDRVQFGPVVALNPATLLPLPEKEAPHDCLEILAETHGTRPDLTDQPIPDADYTWYTDGSSFLQEGQRRAGAAVTTETEVIWARALPAGTSAQRAELIALTQALKMAEGKKLNVYTDSRYAFATAHVHGEIYRRRGWLTSEGREIKNKNEILALLKALFLPKRLSIIHCPGHQKGNSAEARGNRMADQAAREAAMKAVLETSTLLAGKRTADGSEFEKRTADGSEFESPKKKAKVE

SEQ ID NO: 6481 - protein, 2167 aa, synthetic construct
MPAAKRVKLDGGDKKYSIGLDIGTNSVGWAVITDEYKVPSKKFKVLGNTDRHSIKKNLIGALLFDSGETAEATRLKRTARRRYTRRKNRICYLQEIFSNEMAKVDDSFFHRLEESFLVEEDKKHERHPIFGNIVDEVAYHEKYPTIYHLRKKLVDSTDKADLRLIYLALAHMIKFRGHFLIEGDLNPDNSDVDKLFIQLVQTYNQLFEENPINASGVDAKAILSARLSKSRRLENLIAQLPGEKKNGLFGNLIALSLGLTPNFKSNFDLAEDAKLQLSKDTYDDDLDNLLAQIGDQYADLFLAAKNLSDAILLSDILRVNTEITKAPLSASMIKRYDEHHQDLTLLKALVRQQLPEKYKEIFFDQSKNGYAGYIDGGASQEEFYKFIKPILEKMDGTEELLVKLNREDLLRKQRTFDNGSIPHQIHLGELHAILRRQEDFYPFLKDNREKIEKILTFRIPYYVGPLARGNSRFAWMTRKSEETITPWNFEEVVDKGASAQSFIERMTNFDKNLPNEKVLPKHSLLYEYFTVYNELTKVKYVTEGMRKPAFLSGEQKKAIVDLLFKTNRKVTVKQLKEDYFKKIECFDSVEISGVEDRFNASLGTYHDLLKIIKDKDFLDNEENEDILEDIVLTLTLFEDREMIEERLKTYAHLFDDKVMKQLKRRRYTGWGRLSRKLINGIRDKQSGKTILDFLKSDGFANRNFMQLIHDDSLTFKEDIQKAQVSGQGDSLHEHIANLAGSPAIKKGILQTVKVVDELVKVMGRHKPENIVIEMARENQTTQKGQKNSRERMKRIEEGIKELGSQILKEHPVENTQLQNEKLYLYYLQNGRDMYVDQELDINRLSDYDVDHIVPQSFLKDDSIDNKVLTRSDKARGKSDNVPSEEVVKKMKNYWRQLLNAKLITQRKFDNLTKAERGGLSELDKAGFIKRQLVETRQITKHVAQILDSRMNTKYDENDKLIREVKVITLKSKLVSDFRKDFQFYKVREINNYHHAHDAYLNAVVGTALIKKYPKLESEFVYGDYKVYDVRKMIAKSEQEIGKATAKYFFYSNIMNFFKTEITLANGEIRKRPLIETNGETGEIVWDKGRDFATVRKVLSMPQVNIVKKTEVQTGGFSKESILPKRNSDKLIARKKDWDPKKYGGFDSPTVAYSVLVVAKVEKGKSKKLKSVKELLGITIMERSSFEKNPIDFLEAKGYKEVKKDLIIKLPKYSLFELENGRKRMLASAGELQKGNELALPSKYVNFLYLASHYEKLKGSPEDNEQKQLFVEQHKHYLDEIIEQISEFSKRVILADANLDKVLSAYNKHRDKPIREQAENIIHLFTLTNLGAPAAFKYFDTTIDRKRYTSTKEVLDATLIHQSITGLYETRIDLSQLGGDGGPAPAPGGMDLLKPLTVERKGVKIKGYWNSQADITCVPKDLLQGEEPVRQQNVTTIHGTQEGDVYYVNLKIDGRRINTEVIGTTLDYAIITPGDVPWILKKPLELTIKLDLEEQQGTLLNNSILSKKGKEELKQLFEKYSALWQSWENQVGHRRIRPHKIATGTVKPTPQKQYHINPKAKPDIQIVINDLLKQGVLIQKESTMNTPVYPVPKPNGRWRMVLDYRAVNKVTPLIAVQNQHSYGILGSLFKGRYKTTIDLSNGFWAHPIVPEDYWITAFTWQGKQYCWTVLPQGFLNSPGLFNGDVVDLLQGIPNVEVYVDDVYISHDSEKEHLEYLDILFNRLKEAGYIISLKKSNIANSIVDFLGFQITNEGRGLTDTFKEKLENITAPTTLKQLQSILGLLNFARNFIPDFTELIAPLYALIPKSPKNYVPWQIEHSTTLETLITKLNGAEYLQGRKGDKTLIMKVNASYTTGYIRYYNEGEKKPISYVSIVFSKTELKFTELEKLLTTVHKGLLKALDLSMGQNIHVYSPIVSMQNIQKTPQTAKKALASRWLSWLSYLEDPRIRFFYDPQMPALKDLPAVDTGKDNKKHPSNFQHIFYTDGSAITSPTKEGHLNAGMGIVYFINKDGNLQKQQEWSISLGNHTAQFAEIAAFEFALKKCLPLGGNILVVTDSNYVAKAYNEELDVWASNGFVNNRKKPLKHISKWKSVADLKRLRPDVVVTHEPGHQKLDSSPHAYGNNLADQLATQASFKVHAGKRTADGSEFEKRTADGSEFESPKKKAKVE

SEQ ID NO: 6482 - protein, 2089 aa, synthetic construct
MPAAKRVKLDGGDKKYSIGLDIGTNSVGWAVITDEYKVPSKKFKVLGNTDRHSIKKNLIGALLFDSGETAEATRLKRTARRRYTRRKNRICYLQEIFSNEMAKVDDSFFHRLEESFLVEEDKKHERHPIFGNIVDEVAYHEKYPTIYHLRKKLVDSTDKADLRLIYLALAHMIKFRGHFLIEGDLNPDNSDVDKLFIQLVQTYNQLFEENPINASGVDAKAILSARLSKSRRLENLIAQLPGEKKNGLFGNLIALSLGLTPNFKSNFDLAEDAKLQLSKDTYDDDLDNLLAQIGDQYADLFLAAKNLSDAILLSDILRVNTEITKAPLSASMIKRYDEHHQDLTLLKALVRQQLPEKYKEIFFDQSKNGYAGYIDGGASQEEFYKFIKPILEKMDGTEELLVKLNREDLLRKQRTFDNGSIPHQIHLGELHAILRRQEDFYPFLKDNREKIEKILTFRIPYYVGPLARGNSRFAWMTRKSEETITPWNFEEVVDKGASAQSFIERMTNFDKNLPNEKVLPKHSLLYEYFTVYNELTKVKYVTEGMRKPAFLSGEQKKAIVDLLFKTNRKVTVKQLKEDYFKKIECFDSVEISGVEDRFNASLGTYHDLLKIIKDKDFLDNEENEDILEDIVLTLTLFEDREMIEERLKTYAHLFDDKVMKQLKRRRYTGWGRLSRKLINGIRDKQSGKTILDFLKSDGFANRNFMQLIHDDSLTFKEDIQKAQVSGQGDSLHEHIANLAGSPAIKKGILQTVKVVDELVKVMGRHKPENIVIEMARENQTTQKGQKNSRERMKRIEEGIKELGSQILKEHPVENTQLQNEKLYLYYLQNGRDMYVDQELDINRLSDYDVDHIVPQSFLKDDSIDNKVLTRSDKARGKSDNVPSEEVVKKMKNYWRQLLNAKLITQRKFDNLTKAERGGLSELDKAGFIKRQLVETRQITKHVAQILDSRMNTKYDENDKLIREVKVITLKSKLVSDFRKDFQFYKVREINNYHHAHDAYLNAVVGTALIKKYPKLESEFVYGDYKVYDVRKMIAKSEQEIGKATAKYFFYSNIMNFFKTEITLANGEIRKRPLIETNGETGEIVWDKGRDFATVRKVLSMPQVNIVKKTEVQTGGFSKESILPKRNSDKLIARKKDWDPKKYGGFDSPTVAYSVLVVAKVEKGKSKKLKSVKELLGITIMERSSFEKNPIDFLEAKGYKEVKKDLIIKLPKYSLFELENGRKRMLASAGELQKGNELALPSKYVNFLYLASHYEKLKGSPEDNEQKQLFVEQHKHYLDEIIEQISEFSKRVILADANLDKVLSAYNKHRDKPIREQAENIIHLFTLTNLGAPAAFKYFDTTIDRKRYTSTKEVLDATLIHQSITGLYETRIDLSQLGGDGGPAPAPGGTLQLEEEYRLFEPESTQKQEMDIWLKNFPQAWAETGGMGTAHCQAPVLIQLKATATPISIRQYPMPHEAYQGIKPHIRRMLDQGILKPCQSPWNTPLLPVKKPGTEDYRPVQDLREVNKRVEDIHPTVPNPYNLLSTLPPSHPWYTVLDLKDAFFCLRLHSESQLLFAFEWRDPEIGLSGQLTWTRLPQGFKNSPTLFNEALHSDLADFRVRYPALVLLQYVDDLLLAAATRTECLEGTKALLETLGNKGYRASAKKAQICLQEVTYLGYSLKDGQRWLTKARKEAILSIPVPKNSRQVREFLGTAGYCRLWIPGFAELAAPLYPLTRPGTLFQWGTEQQLAFEDIKKALLSSPALGLPDITKPFELFIDENSGFAKGVLVQKLGPWKRPVAYLSKKLDTVASGWPPCLRMVAAIAILVKDAGKLTLGQPLTILTSHPVEALVRQPPNKWLSNARMTHYQAMLLDAERVHFGPTVSLNPATLLPLPSGGNHHDCLQILAETHGTRPDLTDQPLPDADLTWYTDGSSFIRNGEREAGAAVTTESEVIWAAPLPPGTSAQRAELIALTQALKMAEGKKLTVYTDSRYAFATTHVHGEIYRRRGWLTSEGKEIKNKNEILALLEALFLPKRLSIIHCPGHQKGDSPQAKGNRLADDTAKKAATETHSSLTVLPAGKRTADGSEFEKRTADGSEFESPKKKAKVE

SEQ ID NO: 6483 - protein, 2003 aa, synthetic construct
MPAAKRVKLDGGDKKYSIGLDIGTNSVGWAVITDEYKVPSKKFKVLGNTDRHSIKKNLIGALLFDSGETAEATRLKRTARRRYTRRKNRICYLQEIFSNEMAKVDDSFFHRLEESFLVEEDKKHERHPIFGNIVDEVAYHEKYPTIYHLRKKLVDSTDKADLRLIYLALAHMIKFRGHFLIEGDLNPDNSDVDKLFIQLVQTYNQLFEENPINASGVDAKAILSARLSKSRRLENLIAQLPGEKKNGLFGNLIALSLGLTPNFKSNFDLAEDAKLQLSKDTYDDDLDNLLAQIGDQYADLFLAAKNLSDAILLSDILRVNTEITKAPLSASMIKRYDEHHQDLTLLKALVRQQLPEKYKEIFFDQSKNGYAGYIDGGASQEEFYKFIKPILEKMDGTEELLVKLNREDLLRKQRTFDNGSIPHQIHLGELHAILRRQEDFYPFLKDNREKIEKILTFRIPYYVGPLARGNSRFAWMTRKSEETITPWNFEEVVDKGASAQSFIERMTNFDKNLPNEKVLPKHSLLYEYFTVYNELTKVKYVTEGMRKPAFLSGEQKKAIVDLLFKTNRKVTVKQLKEDYFKKIECFDSVEISGVEDRFNASLGTYHDLLKIIKDKDFLDNEENEDILEDIVLTLTLFEDREMIEERLKTYAHLFDDKVMKQLKRRRYTGWGRLSRKLINGIRDKQSGKTILDFLKSDGFANRNFMQLIHDDSLTFKEDIQKAQVSGQGDSLHEHIANLAGSPAIKKGILQTVKVVDELVKVMGRHKPENIVIEMARENQTTQKGQKNSRERMKRIEEGIKELGSQILKEHPVENTQLQNEKLYLYYLQNGRDMYVDQELDINRLSDYDVDHIVPQSFLKDDSIDNKVLTRSDKARGKSDNVPSEEVVKKMKNYWRQLLNAKLITQRKFDNLTKAERGGLSELDKAGFIKRQLVETRQITKHVAQILDSRMNTKYDENDKLIREVKVITLKSKLVSDFRKDFQFYKVREINNYHHAHDAYLNAVVGTALIKKYPKLESEFVYGDYKVYDVRKMIAKSEQEIGKATAKYFFYSNIMNFFKTEITLANGEIRKRPLIETNGETGEIVWDKGRDFATVRKVLSMPQVNIVKKTEVQTGGFSKESILPKRNSDKLIARKKDWDPKKYGGFDSPTVAYSVLVVAKVEKGKSKKLKSVKELLGITIMERSSFEKNPIDFLEAKGYKEVKKDLIIKLPKYSLFELENGRKRMLASAGELQKGNELALPSKYVNFLYLASHYEKLKGSPEDNEQKQLFVEQHKHYLDEIIEQISEFSKRVILADANLDKVLSAYNKHRDKPIREQAENIIHLFTLTNLGAPAAFKYFDTTIDRKRYTSTKEVLDATLIHQSITGLYETRIDLSQLGGDGGPAPAPGGGLEHLPPPPEVSQFPLNPERLQALTDLVSRALEAKHIEPYQGPGNNPIFPVKKPNGKWRFIHDLRATNSLTRDLASPSPGPPDLTSLPQDLPHLRTIDLTDAFFQIPLPAVFQPYFAFTLPQPNNHGPGTRYSWRVLPQGFKNSPTLFQQQLSHILAPVRKAFPNSLIIQYMDDILLASPALRELTALTDKVTNALTKEGLPMSLEKTQATPGSIHFLGQVISPDCITYETLPSIHVKSIWSLAELQSMLGELQWVSKGTPVLRSSLHQLYLALRGHRDPRDTIELTSTQVQALKTIQKALALNCRSRLVSQLPILALIILRPTGTTAVLFQTKQKWPLVWLHTPHPATSLRPWGQLLANAIITLDKYSLQHYGQICKSFHHNISNQALTYYLHTSDQSSVAILLQHSHRFHNLGAQPSGPWRSLLQVPQIFQNIDVLRPPFIISPVVIDHAPCLFSDGATSKAAFILWDKQVIHQQVLPLPSTCSAQAGELFGLLAGLQKSKPWPALNIFLDSKFLIGHLRRMAWGAFLGPSTQCDLHARLFPLLQGKTVYVHHVRSHTLLQDPISRLNEATDALMLAPLLPLAGKRTADGSEFEKRTADGSEFESPKKKAKVE

SEQ ID NO: 6484 - protein, 2090 aa, synthetic construct
MPAAKRVKLDGGDKKYSIGLDIGTNSVGWAVITDEYKVPSKKFKVLGNTDRHSIKKNLIGALLFDSGETAEATRLKRTARRRYTRRKNRICYLQEIFSNEMAKVDDSFFHRLEESFLVEEDKKHERHPIFGNIVDEVAYHEKYPTIYHLRKKLVDSTDKADLRLIYLALAHMIKFRGHFLIEGDLNPDNSDVDKLFIQLVQTYNQLFEENPINASGVDAKAILSARLSKSRRLENLIAQLPGEKKNGLFGNLIALSLGLTPNFKSNFDLAEDAKLQLSKDTYDDDLDNLLAQIGDQYADLFLAAKNLSDAILLSDILRVNTEITKAPLSASMIKRYDEHHQDLTLLKALVRQQLPEKYKEIFFDQSKNGYAGYIDGGASQEEFYKFIKPILEKMDGTEELLVKLNREDLLRKQRTFDNGSIPHQIHLGELHAILRRQEDFYPFLKDNREKIEKILTFRIPYYVGPLARGNSRFAWMTRKSEETITPWNFEEVVDKGASAQSFIERMTNFDKNLPNEKVLPKHSLLYEYFTVYNELTKVKYVTEGMRKPAFLSGEQKKAIVDLLFKTNRKVTVKQLKEDYFKKIECFDSVEISGVEDRFNASLGTYHDLLKIIKDKDFLDNEENEDILEDIVLTLTLFEDREMIEERLKTYAHLFDDKVMKQLKRRRYTGWGRLSRKLINGIRDKQSGKTILDFLKSDGFANRNFMQLIHDDSLTFKEDIQKAQVSGQGDSLHEHIANLAGSPAIKKGILQTVKVVDELVKVMGRHKPENIVIEMARENQTTQKGQKNSRERMKRIEEGIKELGSQILKEHPVENTQLQNEKLYLYYLQNGRDMYVDQELDINRLSDYDVDHIVPQSFLKDDSIDNKVLTRSDKARGKSDNVPSEEVVKKMKNYWRQLLNAKLITQRKFDNLTKAERGGLSELDKAGFIKRQLVETRQITKHVAQILDSRMNTKYDENDKLIREVKVITLKSKLVSDFRKDFQFYKVREINNYHHAHDAYLNAVVGTALIKKYPKLESEFVYGDYKVYDVRKMIAKSEQEIGKATAKYFFYSNIMNFFKTEITLANGEIRKRPLIETNGETGEIVWDKGRDFATVRKVLSMPQVNIVKKTEVQTGGFSKESILPKRNSDKLIARKKDWDPKKYGGFDSPTVAYSVLVVAKVEKGKSKKLKSVKELLGITIMERSSFEKNPIDFLEAKGYKEVKKDLIIKLPKYSLFELENGRKRMLASAGELQKGNELALPSKYVNFLYLASHYEKLKGSPEDNEQKQLFVEQHKHYLDEIIEQISEFSKRVILADANLDKVLSAYNKHRDKPIREQAENIIHLFTLTNLGAPAAFKYFDTTIDRKRYTSTKEVLDATLIHQSITGLYETRIDLSQLGGDGGPAPAPGGTLNLEDEYRLYETSAEPEVSPGSTWLSDFPQAWAETGGMGLAVRQAPLIIPLKATSTPVSIKQYPMSQEAKLGIKPHIQRLLDQGILVPCQSPWNTPLLPVKKPGTNDYRPVQDLREVNKRVEDIHPTVPNPYNLLSGLPPSHRWYTVLDLKDAFFCLRLHPTSQPLFAFEWRDPGMGISGQLTWTRLPQGFKNSPTLFNEALHRDLADFRIQHPDLILLQYVDDILLAATSELDCQQGTRALLLTLGNLGYRASAKKAQLCQKQVKYLGYLLKEGQRWLTEARKETVMGQPTPKTPRQLREFLGKAGFCRLFIPGFAEMAAPLYPLTKPGTLFNWGPDQQKAYQEIKQALLTAPALGLPDLTKPFELFVDEKQGYAKGVLTQKLGPWRRPVAYLSKKLDPVAAGWPPCLRMVAAIAVLRKDAGKLTMGQPLVILAPHAVEALVKQPPDRWLSNARMTHYQAMLLDTDRVQFGPVVALNPATLLPLPEEGAPHDCLEILAETHGTRPDLTDQPIPDADHTWYTDGSSFLQEGQRKAGAAVTTETEVIWARALPAGTSAQRAELIALTQALKMAEGKRLNVYTDSRYAFATAHIHGEIYRRRGWLTSEGREIKNKSEILALLKALFLPKRLSIIHCLGHQKGDSAEARGNRLADQAAREAAIKTPPDTSTLLAGKRTADGSEFEKRTADGSEFESPKKKAKVE

SEQ ID NO: 6485 - protein, 2110 aa, synthetic construct
MPAAKRVKLDGGDKKYSIGLDIGTNSVGWAVITDEYKVPSKKFKVLGNTDRHSIKKNLIGALLFDSGETAEATRLKRTARRRYTRRKNRICYLQEIFSNEMAKVDDSFFHRLEESFLVEEDKKHERHPIFGNIVDEVAYHEKYPTIYHLRKKLVDSTDKADLRLIYLALAHMIKFRGHFLIEGDLNPDNSDVDKLFIQLVQTYNQLFEENPINASGVDAKAILSARLSKSRRLENLIAQLPGEKKNGLFGNLIALSLGLTPNFKSNFDLAEDAKLQLSKDTYDDDLDNLLAQIGDQYADLFLAAKNLSDAILLSDILRVNTEITKAPLSASMIKRYDEHHQDLTLLKALVRQQLPEKYKEIFFDQSKNGYAGYIDGGASQEEFYKFIKPILEKMDGTEELLVKLNREDLLRKQRTFDNGSIPHQIHLGELHAILRRQEDFYPFLKDNREKIEKILTFRIPYYVGPLARGNSRFAWMTRKSEETITPWNFEEVVDKGASAQSFIERMTNFDKNLPNEKVLPKHSLLYEYFTVYNELTKVKYVTEGMRKPAFLSGEQKKAIVDLLFKTNRKVTVKQLKEDYFKKIECFDSVEISGVEDRFNASLGTYHDLLKIIKDKDFLDNEENEDILEDIVLTLTLFEDREMIEERLKTYAHLFDDKVMKQLKRRRYTGWGRLSRKLINGIRDKQSGKTILDFLKSDGFANRNFMQLIHDDSLTFKEDIQKAQVSGQGDSLHEHIANLAGSPAIKKGILQTVKVVDELVKVMGRHKPENIVIEMARENQTTQKGQKNSRERMKRIEEGIKELGSQILKEHPVENTQLQNEKLYLYYLQNGRDMYVDQELDINRLSDYDVDHIVPQSFLKDDSIDNKVLTRSDKARGKSDNVPSEEVVKKMKNYWRQLLNAKLITQRKFDNLTKAERGGLSELDKAGFIKRQLVETRQITKHVAQILDSRMNTKYDENDKLIREVKVITLKSKLVSDFRKDFQFYKVREINNYHHAHDAYLNAVVGTALIKKYPKLESEFVYGDYKVYDVRKMIAKSEQEIGKATAKYFFYSNIMNFFKTEITLANGEIRKRPLIETNGETGEIVWDKGRDFATVRKVLSMPQVNIVKKTEVQTGGFSKESILPKRNSDKLIARKKDWDPKKYGGFDSPTVAYSVLVVAKVEKGKSKKLKSVKELLGITIMERSSFEKNPIDFLEAKGYKEVKKDLIIKLPKYSLFELENGRKRMLASAGELQKGNELALPSKYVNFLYLASHYEKLKGSPEDNEQKQLFVEQHKHYLDEIIEQISEFSKRVILADANLDKVLSAYNKHRDKPIREQAENIIHLFTLTNLGAPAAFKYFDTTIDRKRYTSTKEVLDATLIHQSITGLYETRIDLSQLGGDGGPAPAPGGTLNIEDEYRLHETSKEPDVSLGSTWLSDFPQAWAETGGMGLAVRQAPLIIPLKATSTPVSIKQYPMSQEARLGIKPHIQRLLDQGILVPCQSPWNTPLLPVKKPGTNDYRPVQDLREVNKRVEDIHPTVPNPYNLLSGLPPSHQWYTVLDLKDAFFCLRLHPTSQPLFAFEWRDPEMGISGQLTWTRLPQGFKNSPTLFNEALHRDLADFRIQHPDLILLQYVDDLLLAATSELDCQQGTRALLQTLGNLGYRASAKKAQICQKQVKYLGYLLKEGQRWLTEARKETVMGQPTPKTPRQLREFLGKAGFCRLFIPGFAEMAAPLYPLTKPGTLFNWGPDQQKAYQEIKQALLTAPALGLPDLTKPFELFVDEKQGYAKGVLTQKLGPWRRPVAYLSKKLDPVAAGWPPCLRMVAAIAVLTKDAGKLTMGQPLVILAPHAVEALVKQPPDRWLSNARMTHYQALLLDTDRVQFGPVVALNPATLLPLPEEGLQHNCLDILAEAHGTRPDLTDQPLPDADHTWYTDGSSLLQEGQRKAGAAVTTETEVIWAKALPAGTSAQRAELIALTQALKMAEGKKLNVYTDSRYAFATAHIHGEIYRRRGWLTSEGKEIKNKDEILALLKALFLPKRLSIIHCPGHQKGHSAEARGNRMADQAARKAAITETPDTSTLLIENSSPSGGSKRTADGSEFEAGKRTADGSEFEKRTADGSEFESPKKKAKVE

SEQ ID NO: 6486 - protein, 2110 aa, synthetic construct; identical to SEQ ID NO: 6485

SEQ ID NO: 6487 - protein, 2110 aa, synthetic construct
MPAAKRVKLDGGDKKYSIGLDIGTNSVGWAVITDEYKVPSKKFKVLGNTDRHSIKKNLIGALLFDSGETAEATRLKRTARRRYTRRKNRICYLQEIFSNEMAKVDDSFFHRLEESFLVEEDKKHERHPIFGNIVDEVAYHEKYPTIYHLRKKLVDSTDKADLRLIYLALAHMIKFRGHFLIEGDLNPDNSDVDKLFIQLVQTYNQLFEENPINASGVDAKAILSARLSKSRRLENLIAQLPGEKKNGLFGNLIALSLGLTPNFKSNFDLAEDAKLQLSKDTYDDDLDNLLAQIGDQYADLFLAAKNLSDAILLSDILRVNTEITKAPLSASMIKRYDEHHQDLTLLKALVRQQLPEKYKEIFFDQSKNGYAGYIDGGASQEEFYKFIKPILEKMDGTEELLVKLNREDLLRKQRTFDNGSIPHQIHLGELHAILRRQEDFYPFLKDNREKIEKILTFRIPYYVGPLARGNSRFAWMTRKSEETITPWNFEEVVDKGASAQSFIERMTNFDKNLPNEKVLPKHSLLYEYFTVYNELTKVKYVTEGMRKPAFLSGEQKKAIVDLLFKTNRKVTVKQLKEDYFKKIECFDSVEISGVEDRFNASLGTYHDLLKIIKDKDFLDNEENEDILEDIVLTLTLFEDREMIEERLKTYAHLFDDKVMKQLKRRRYTGWGRLSRKLINGIRDKQSGKTILDFLKSDGFANRNFMQLIHDDSLTFKEDIQKAQVSGQGDSLHEHIANLAGSPAIKKGILQTVKVVDELVKVMGRHKPENIVIEMARENQTTQKGQKNSRERMKRIEEGIKELGSQILKEHPVENTQLQNEKLYLYYLQNGRDMYVDQELDINRLSDYDVDHIVPQSFLKDDSIDNKVLTRSDKARGKSDNVPSEEVVKKMKNYWRQLLNAKLITQRKFDNLTKAERGGLSELDKAGFIKRQLVETRQITKHVAQILDSRMNTKYDENDKLIREVKVITLKSKLVSDFRKDFQFYKVREINNYHHAHDAYLNAVVGTALIKKYPKLESEFVYGDYKVYDVRKMIAKSEQEIGKATAKYFFYSNIMNFFKTEITLANGEIRKRPLIETNGETGEIVWDKGRDFATVRKVLSMPQVNIVKKTEVQTGGFSKESILPKRNSDKLIARKKDWDPKKYGGFDSPTVAYSVLVVAKVEKGKSKKLKSVKELLGITIMERSSFEKNPIDFLEAKGYKEVKKDLIIKLPKYSLFELENGRKRMLASAGELQKGNELALPSKYVNFLYLASHYEKLKGSPEDNEQKQLFVEQHKHYLDEIIEQISEFSKRVILADANLDKVLSAYNKHRDKPIREQAENIIHLFTLTNLGAPAAFKYFDTTIDRKRYTSTKEVLDATLIHQSITGLYETRIDLSQLGGDGGPAPAPGGVQEISDSRPMLHIYLNGRRFLGLLDTGADKTCIAGRDWPANWPIHQTESSLQGLGMACGVARSSQPLRWQHEDKSGIIHPFVIPTLPFTLWGRDIMKDIKVRLMTDSPDDSQDLMIGAIESNLFADQISWKSDQPVWLNQWPLKQEKLQALQQLVTEQLQLGHLEESNSPWNTPVFVIKKKSGKWRLLQDLRAVNATMHDMGALQPGLPSPVAVPKGWEIIIIDLQDCFFNIKLHPEDCKRFAFSVPSPNFKRPYQRFQWKVLPQGMKNSPTLCQKFVDKAILTVRDKYQDSYIVHYMDDILLAHPSRSIVDEILTSMIQALNKHGLVVSTEKIQKYDNLKYLGTHIQGDSVSYQKLQIRTDKLRTLNDFQKLLGNINWIRPFLKLTTGELKPLFEILNGDSNPISTRKLTPEACKALQLMNERLSTARVKRLDLSQPWSLCILKTEYTPTACLWQDGVVEWIHLPHISPKVITPYDIFCTQLIIKGRHRSKELFSKDPDYIVVPYTKVQFDLLLQEKEDWPISLLGFLGEVHFHLPKDPLLTFTLQTAIIFPHMTSTTPLEKGIVIFTDGSANGRSVTYIQGREPIIKENTQNTAQQAEIVAVITAFEEVSQPFNLYTDSKYVTGLFPEIETATLSPRTKIYTELKHLQRLIHKRQEKFYIGHIRGHTGLPGPLAQGNAYADSLTRILTAAGKRTADGSEFEKRTADGSEFESPKKKAKVE

SEQ ID NO: 6488 - protein, 2084 aa, synthetic construct
MPAAKRVKLDGGDKKYSIGLDIGTNSVGWAVITDEYKVPSKKFKVLGNTDRHSIKKNLIGALLFDSGETAEATRLKRTARRRYTRRKNRICYLQEIFSNEMAKVDDSFFHRLEESFLVEEDKKHERHPIFGNIVDEVAYHEKYPTIYHLRKKLVDSTDKADLRLIYLALAHMIKFRGHFLIEGDLNPDNSDVDKLFIQLVQTYNQLFEENPINASGVDAKAILSARLSKSRRLENLIAQLPGEKKNGLFGNLIALSLGLTPNFKSNFDLAEDAKLQLSKDTYDDDLDNLLAQIGDQYADLFLAAKNLSDAILLSDILRVNTEITKAPLSASMIKRYDEHHQDLTLLKALVRQQLPEKYKEIFFDQSKNGYAGYIDGGASQEEFYKFIKPILEKMDGTEELLVKLNREDLLRKQRTFDNGSIPHQIHLGELHAILRRQEDFYPFLKDNREKIEKILTFRIPYYVGPLARGNSRFAWMTRKSEETITPWNFEEVVDKGASAQSFIERMTNFDKNLPNEKVLPKHSLLYEYFTVYNELTKVKYVTEGMRKPAFLSGEQKKAIVDLLFKTNRKVTVKQLKEDYFKKIECFDSVEISGVEDRFNASLGTYHDLLKIIKDKDFLDNEENEDILEDIVLTLTLFEDREMIEERLKTYAHLFDDKVMKQLKRRRYTGWGRLSRKLINGIRDKQSGKTILDFLKSDGFANRNFMQLIHDDSLTFKEDIQKAQVSGQGDSLHEHIANLAGSPAIKKGILQTVKVVDELVKVMGRHKPENIVIEMARENQTTQKGQKNSRERMKRIEEGIKELGSQILKEHPVENTQLQNEKLYLYYLQNGRDMYVDQELDINRLSDYDVDHIVPQSFLKDDSIDNKVLTRSDKARGKSDNVPSEEVVKKMKNYWRQLLNAKLITQRKFDNLTKAERGGLSELDKAGFIKRQLVETRQITKHVAQILDSRMNTKYDENDKLIREVKVITLKSKLVSDFRKDFQFYKVREINNYHHAHDAYLNAVVGTALIKKYPKLESEFVYGDYKVYDVRKMIAKSEQEIGKATAKYFFYSNIMNFFKTEITLANGEIRKRPLIETNGETGEIVWDKGRDFATVRKVLSMPQVNIVKKTEVQTGGFSKESILPKRNSDKLIARKKDWDPKKYGGFDSPTVAYSVLVVAKVEKGKSKKLKSVKELLGITIMERSSFEKNPIDFLEAKGYKEVKKDLIIKLPKYSLFELENGRKRMLASAGELQKGNELALPSKYVNFLYLASHYEKLKGSPEDNEQKQLFVEQHKHYLDEIIEQISEFSKRVILADANLDKVLSAYNKHRDKPIREQAENIIHLFTLTNLGAPAAFKYFDTTIDRKRYTSTKEVLDATLIHQSITGLYETRIDLSQLGGDGGPAPAPGGTLQLDDEYRLYSPLVKPDQNIQFWLEQFPQAWAETAGMGLAKQVPPQVIQLKASATPVSVRQYPLSKEAQEGIRPHVQRLIQQGILVPVQSPWNTPLLPVRKPGTNDYRPVQDLREVNKRVQDIHPTVPNPYNLLCALPPQRSWYTVLDLKDAFFCLRLHPTSQPLFAFEWRDPGTGRTGQLTWTRLPQGFKNSPTIFDEALHRDLANFRIQHPQVTLLQYVDDLLLAGATKQDCLEGTKALLLELSDLGYRASAKKAQICRREVTYLGYSLRDGQRWLTEARKKTVVQIPAPTTAKQVREFLGTAGFCRLWIPGFATLAAPLYPLTKEKGEFSWAPEHQKAFDAIKKALLSAPALALPDVTKPFTLYVDERKGVARGVLTQTLGPWRRPVAYLSKKLDPVASGWPVCLKAIAAVAILVKDADKLTLGQNITVIAPHALENIVRQPPDRWMTNARMTHYQSLLLTERVTFAPPAALNPATLLPEETDEPVTHDCHQLLIEETGVRKDLTDIPLTGEVLTWFTDGSSYVVEGKRMAGAAVVDGTRTIWASSLPEGTSAQKAELMALTQALRLAEGKSINIYTDSRYAFATAHVHGAIYKQRGLLTSAGREIKNKEEILSLLEALHLPKRLAIIHCPGHQKAKDPISRGNQMADRVAKQAAQGVNLLAGKRTADGSEFEKRTADGSEFESPKKKAKVE

SEQ ID NO: 6489 - protein, 2081 aa, synthetic construct
MPAAKRVKLDGGDKKYSIGLDIGTNSVGWAVITDEYKVPSKKFKVLGNTDRHSIKKNLIGALLFDSGETAEATRLKRTARRRYTRRKNRICYLQEIFSNEMAKVDDSFFHRLEESFLVEEDKKHERHPIFGNIVDEVAYHEKYPTIYHLRKKLVDSTDKADLRLIYLALAHMIKFRGHFLIEGDLNPDNSDVDKLFIQLVQTYNQLFEENPINASGVDAKAILSARLSKSRRLENLIAQLPGEKKNGLFGNLIALSLGLTPNFKSNFDLAEDAKLQLSKDTYDDDLDNLLAQIGDQYADLFLAAKNLSDAILLSDILRVNTEITKAPLSASMIKRYDEHHQDLTLLKALVRQQLPEKYKEIFFDQSKNGYAGYIDGGASQEEFYKFIKPILEKMDGTEELLVKLNREDLLRKQRTFDNGSIPHQIHLGELHAILRRQEDFYPFLKDNREKIEKILTFRIPYYVGPLARGNSRFAWMTRKSEETITPWNFEEVVDKGASAQSFIERMTNFDKNLPNEKVLPKHSLLYEYFTVYNELTKVKYVTEGMRKPAFLSGEQKKAIVDLLFKTNRKVTVKQLKEDYFKKIECFDSVEISGVEDRFNASLGTYHDLLKIIKDKDFLDNEENEDILEDIVLTLTLFEDREMIEERLKTYAHLFDDKVMKQLKRRRYTGWGRLSRKLINGIRDKQSGKTILDFLKSDGFANRNFMQLIHDDSLTFKEDIQKAQVSGQGDSLHEHIANLAGSPAIKKGILQTVKVVDELVKVMGRHKPENIVIEMARENQTTQKGQKNSRERMKRIEEGIKELGSQILKEHPVENTQLQNEKLYLYYLQNGRDMYVDQELDINRLSDYDVDHIVPQSFLKDDSIDNKVLTRSDKARGKSDNVPSEEVVKKMKNYWRQLLNAKLITQRKFDNLTKAERGGLSELDKAGFIKRQLVETRQITKHVAQILDSRMNTKYDENDKLIREVKVITLKSKLVSDFRKDFQFYKVREINNYHHAHDAYLNAVVGTALIKKYPKLESEFVYGDYKVYDVRKMIAKSEQEIGKATAKYFFYSNIMNFFKTEITLANGEIRKRPLIETNGETGEIVWDKGRDFATVRKVLSMPQVNIVKKTEVQTGGFSKESILPKRNSDKLIARKKDWDPKKYGGFDSPTVAYSVLVVAKVEKGKSKKLKSVKELLGITIMERSSFEKNPIDFLEAKGYKEVKKDLIIKLPKYSLFELENGRKRMLASAGELQKGNELALPSKYVNFLYLASHYEKLKGSPEDNEQKQLFVEQHKHYLDEIIEQISEFSKRVILADANLDKVLSAYNKHRDKPIREQAENIIHLFTLTNLGAPAAFKYFDTTIDRKRYTSTKEVLDATLIHQSITGLYETRIDLSQLGGDGGPAPAPGGIPWLMKKPLQLTTLVPLQEYEERLLKQTMLTGSYKEKLQSLFLKYDALWQHWENQVGHRRIKPHHIATGTVNPRPQKQYPINPKAKASIQTVINDLLKQGVLIQQNSIMNTPVYPVPKPDGKWRMVLDYREVNKTIPLIAAQNQHSAGILSSIFRGKYKTTLDLSNGFWAHSITPESYWLTAFTWLGQQYCWTRLPQGFLNSPALFNADVVDLLKEVPNVQVYVDDIYISHDDPREHLEQLEKVFSLLLNAGYVVSLKKSEIAQHEVEFLGFNITKEGRGLTETFKQKLLNITPPRDLKQLQSILGKLNFARNFIPNFSELVKPLYNIIATAPGKYITWTTDNSQQLQNIISMLNSAENLEERNPEVRLIMKVNTSPSAGYIRFYNEFAKRPIMYLNYVYTKAEVKFTNTEKLLTTIHKGLIKALDLGMGQEILVYSPIVSMTKIQKTPLPERKALPIRWITWMSYLEDPRIQFHYDKTLPELQQVPTVTDDIIAKIKHPSEFSMVFYTDGSAIKHPNVNKSHNAGMGIAQVQFKPEFTVINTWSIPLGDHTAQLAEVAAVEFACKKALKIDGPVLIVTDSFYVAESVNKELPYWQSNGFFNNKKKPLKHVSKWKSIADCIQLKPDIIIIHEKGHQPTASTFHTEGNNLADKLATQGSYVVNAGKRTADGSEFEKRTADGSEFESPKKKAKVE

SEQ ID NO: 6490 - protein, 2170 aa, synthetic construct
MPAAKRVKLDGGDKKYSIGLDIGTNSVGWAVITDEYKVPSKKFKVLGNTDRHSIKKNLIGALLFDSGETAEATRLKRTARRRYTRRKNRICYLQEIFSNEMAKVDDSFFHRLEESFLVEEDKKHERHPIFGNIVDEVAYHEKYPTIYHLRKKLVDSTDKADLRLIYLALAHMIKFRGHFLIEGDLNPDNSDVDKLFIQLVQTYNQLFEENPINASGVDAKAILSARLSKSRRLENLIAQLPGEKKNGLFGNLIALSLGLTPNFKSNFDLAEDAKLQLSKDTYDDDLDNLLAQIGDQYADLFLAAKNLSDAILLSDILRVNTEITKAPLSASMIKRYDEHHQDLTLLKALVRQQLPEKYKEIFFDQSKNGYAGYIDGGASQEEFYKFIKPILEKMDGTEELLVKLNREDLLRKQRTFDNGSIPHQIHLGELHAILRRQEDFYPFLKDNREKIEKILTFRIPYYVGPLARGNSRFAWMTRKSEETITPWNFEEVVDKGASAQSFIERMTNFDKNLPNEKVLPKHSLLYEYFTVYNELTKVKYVTEGMRKPAFLSGEQKKAIVDLLFKTNRKVTVKQLKEDYFKKIECFDSVEISGVEDRFNASLGTYHDLLKIIKDKDFLDNEENEDILEDIVLTLTLFEDREMIEERLKTYAHLFDDKVMKQLKRRRYTGWGRLSRKLINGIRDKQSGKTILDFLKSDGFANRNFMQLIHDDSLTFKEDIQKAQVSGQGDSLHEHIANLAGSPAIKKGILQTVKVVDELVKVMGRHKPENIVIEMARENQTTQKGQKNSRERMKRIEEGIKELGSQILKEHPVENTQLQNEKLYLYYLQNGRDMYVDQELDINRLSDYDVDHIVPQSFLKDDSIDNKVLTRSDKARGKSDNVPSEEVVKKMKNYWRQLLNAKLITQRKFDNLTKAERGGLSELDKAGFIKRQLVETRQITKHVAQILDSRMNTKYDENDKLIREVKVITLKSKLVSDFRKDFQFYKVREINNYHHAHDAYLNAVVGTALIKKYPKLESEFVYGDYKVYDVRKMIAKSEQEIGKATAKYFFYSNIMNFFKTEITLANGEIRKRPLIETNGETGEIVWDKGRDFATVRKVLSMPQVNIVKKTEVQTGGFSKESILPKRNSDKLIARKKDWDPKKYGGFDSPTVAYSVLVVAKVEKGKSKKLKSVKELLGITIMERSSFEKNPIDFLEAKGYKEVKKDLIIKLPKYSLFELENGRKRMLASAGELQKGNELALPSKYVNFLYLASHYEKLKGSPEDNEQKQLFVEQHKHYLDEIIEQISEFSKRVILADANLDKVLSAYNKHRDKPIREQAENIIHLFTLTNLGAPAAFKYFDTTIDRKRYTSTKEVLDATLIHQSITGLYETRIDLSQLGGDGGPAPAPGGMDPLQLLQPLEAEIKGTKLKAHWNSGATITCVPQAFLEEEVPIKNIWIKTIHGEKEQPVYYLTFKIQGRKVEAEVISSPYDYILVSPSDIPWLMKKPLQLTTLVPLQEYEERLLKQTMLTGSYKEKLQSLFLKYDALWQHWENQVGHRRIKPHHIATGTVNPRPQKQYPINPKAKASIQTVINDLLKQGVLIQQNSIMNTPVYPVPKPDGKWRMVLDYREVNKTIPLIAAQNQHSAGILSSIFRGKYKTTLDLSNGFWAHSITPESYWLTAFTWLGQQYCWTRLPQGFLNSPALFNADVVDLLKEVPNVQVYVDDIYISHDDPREHLEQLEKVFSLLLNAGYVVSLKKSEIAQHEVEFLGFNITKEGRGLTETFKQKLLNITPPRDLKQLQSILGKLNFARNFIPNFSELVKPLYNIIATAPGKYITWTTDNSQQLQNIISMLNSAENLEERNPEVRLIMKVNTSPSAGYIRFYNEFAKRPIMYLNYVYTKAEVKFTNTEKLLTTIHKGLIKALDLGMGQEILVYSPIVSMTKIQKTPLPERKALPIRWITWMSYLEDPRIQFHYDKTLPELQQVPTVTDDIIAKIKHPSEFSMVFYTDGSAIKHPNVNKSHNAGMGIAQVQFKPEFTVINTWSIPLGDHTAQLAEVAAVEFACKKALKIDGPVLIVTDSFYVAESVNKELPYWQSNGFFNNKKKPLKHVSKWKSIADCIQLKPDIIIIHEKGHQPTASTFHTEGNNLADKLATQGSYVVNAGKRTADGSEFEKRTADGSEFESPKKKAKVE

SEQ ID NO: 6491 - protein, 2090 aa, synthetic construct
MPAAKRVKLDGGDKKYSIGLDIGTNSVGWAVITDEYKVPSKKFKVLGNTDRHSIKKNLIGALLFDSGETAEATRLKRTARRRYTRRKNRICYLQEIFSNEMAKVDDSFFHRLEESFLVEEDKKHERHPIFGNIVDEVAYHEKYPTIYHLRKKLVDSTDKADLRLIYLALAHMIKFRGHFLIEGDLNPDNSDVDKLFIQLVQTYNQLFEENPINASGVDAKAILSARLSKSRRLENLIAQLPGEKKNGLFGNLIALSLGLTPNFKSNFDLAEDAKLQLSKDTYDDDLDNLLAQIGDQYADLFLAAKNLSDAILLSDILRVNTEITKAPLSASMIKRYDEHHQDLTLLKALVRQQLPEKYKEIFFDQSKNGYAGYIDGGASQEEFYKFIKPILEKMDGTEELLVKLNREDLLRKQRTFDNGSIPHQIHLGELHAILRRQEDFYPFLKDNREKIEKILTFRIPYYVGPLARGNSRFAWMTRKSEETITPWNFEEVVDKGASAQSFIERMTNFDKNLPNEKVLPKHSLLYEYFTVYNELTKVKYVTEGMRKPAFLSGEQKKAIVDLLFKTNRKVTVKQLKEDYFKKIECFDSVEISGVEDRFNASLGTYHDLLKIIKDKDFLDNEENEDILEDIVLTLTLFEDREMIEERLKTYAHLFDDKVMKQLKRRRYTGWGRLSRKLINGIRDKQSGKTILDFLKSDGFANRNFMQLIHDDSLTFKEDIQKAQVSGQGDSLHEHIANLAGSPAIKKGILQTVKVVDELVKVMGRHKPENIVIEMARENQTTQKGQKNSRERMKRIEEGIKELGSQILKEHPVENTQLQNEKLYLYYLQNGRDMYVDQELDINRLSDYDVDHIVPQSFLKDDSIDNKVLTRSDKARGKSDNVPSEEVVKKMKNYWRQLLNAKLITQRKFDNLTKAERGGLSELDKAGFIKRQLVETRQITKHVAQILDSRMNTKYDENDKLIREVKVITLKSKLVSDFRKDFQFYKVREINNYHHAHDAYLNAVVGTALIKKYPKLESEFVYGDYKVYDVRKMIAKSEQEIGKATAKYFFYSNIMNFFKTEITLANGEIRKRPLIETNGETGEIVWDKGRDFATVRKVLSMPQVNIVKKTEVQTGGFSKESILPKRNSDKLIARKKDWDPKKYGGFDSPTVAYSVLVVAKVEKGKSKKLKSVKELLGITIMERSSFEKNPIDFLEAKGYKEVKKDLIIKLPKYSLFELENGRKRMLASAGELQKGNELALPSKYVNFLYLASHYEKLKGSPEDNEQKQLFVEQHKHYLDEIIEQISEFSKRVILADANLDKVLSAYNKHRDKPIREQAENIIHLFTLTNLGAPAAFKYFDTTIDRKRYTSTKEVLDATLIHQSITGLYETRIDLSQLGGDGGPAPAPGGTLNIEDEYRLHETSKEPDVPLGSTWLSDFPQAWAETGGMGLAVRQAPLIIPLKATSTPVSIKQYPMSQEARLGIKPHIQRLLDQGILVPCQSPWNTPLLPVKKPGTNDYRPVQDLREVNKRVEDIHPTVPNPYNLLSGLPPSHQWYTVLDLKDAFFCLRLHPTSQPLFAFEWRDPEMGISGQLTWTRLPQGFKNSPTLFNEALHRDLADFRIQHPDLILLQYVDDLLLAATSEQDCQRGTRALLQTLGNLGYRASAKKAQICQKQVKYLGYLLKEGQRWLTEARKETVMGQPTPKTPRQLREFLGKAGFCRLFIPGFAEMAAPLYPLTKPGTLFNWGPDQQKAYQEIKQALLTAPALGLPDLTKPFELFVDEKQGYAKGVLTQKLGPWRRPVAYLSKKLDPVAAGWPPCLRMVAAIAVLTKDAGKLTMGQPLVILAPHAVEALVKQPPDRWLSNARMTHYQAMLLDTDRVQFGPVVALNPATLLPLPEKEAPHDCLEILAETHGTRPDLTDQPIPDADYTWYTDGSSFLQEGQRRAGAAVTTETEVIWARALPAGTSAQRAELIALTQALKMAEGKKLNVYTDSRYAFATAHVHGEIYRRRGWLTSEGREIKNKNEILALLKALFLPKRLSIIHCPGHQKGNSAEARGNRMADQAAREAAMKAVLETSTLLAGKRTADGSEFEKRTADGSEFESPKKKAKVE

SEQ ID NO: 6492 - protein, 2094 aa, synthetic construct
MPAAKRVKLDGGDKKYSIGLDIGTNSVGWAVITDEYKVPSKKFKVLGNTDRHSIKKNLIGALLFDSGETAEATRLKRTARRRYTRRKNRICYLQEIFSNEMAKVDDSFFHRLEESFLVEEDKKHERHPIFGNIVDEVAYHEKYPTIYHLRKKLVDSTDKADLRLIYLALAHMIKFRGHFLIEGDLNPDNSDVDKLFIQLVQTYNQLFEENPINASGVDAKAILSARLSKSRRLENLIAQLPGEKKNGLFGNLIALSLGLTPNFKSNFDLAEDAKLQLSKDTYDDDLDNLLAQIGDQYADLFLAAKNLSDAILLSDILRVNTEITKAPLSASMIKRYDEHHQDLTLLKALVRQQLPEKYKEIFFDQSKNGYAGYIDGGASQEEFYKFIKPILEKMDGTEELLVKLNREDLLRKQRTFDNGSIPHQIHLGELHAILRRQEDFYPFLKDNREKIEKILTFRIPYYVGPLARGNSRFAWMTRKSEETITPWNFEEVVDKGASAQSFIERMTNFDKNLPNEKVLPKHSLLYEYFTVYNELTKVKYVTEGMRKPAFLSGEQKKAIVDLLFKTNRKVTVKQLKEDYFKKIECFDSVEISGVEDRFNASLGTYHDLLKIIKDKDFLDNEENEDILEDIVLTLTLFEDREMIEERLKTYAHLFDDKVMKQLKRRRYTGWGRLSRKLINGIRDKQSGKTILDFLKSDGFANRNFMQLIHDDSLTFKEDIQKAQVSGQGDSLHEHIANLAGSPAIKKGILQTVKVVDELVKVMGRHKPENIVIEMARENQTTQKGQKNSRERMKRIEEGIKELGSQILKEHPVENTQLQNEKLYLYYLQNGRDMYVDQELDINRLSDYDVDHIVPQSFLKDDSIDNKVLTRSDKARGKSDNVPSEEVVKKMKNYWRQLLNAKLITQRKFDNLTKAERGGLSELDKAGFIKRQLVETRQITKHVAQILDSRMNTKYDENDKLIREVKVITLKSKLVSDFRKDFQFYKVREINNYHHAHDAYLNAVVGTALIKKYPKLESEFVYGDYKVYDVRKMIAKSEQEIGKATAKYFFYSNIMNFFKTEITLANGEIRKRPLIETNGETGEIVWDKGRDFATVRKVLSMPQVNIVKKTEVQTGGFSKESILPKRNSDKLIARKKDWDPKKYGGFDSPTVAYSVLVVAKVEKGKSKKLKSVKELLGITIMERSSFEKNPIDFLEAKGYKEVKKDLIIKLPKYSLFELENGRKRMLASAGELQKGNELALPSKYVNFLYLASHYEKLKGSPEDNEQKQLFVEQHKHYLDEIIEQISEFSKRVILADANLDKVLSAYNKHRDKPIREQAENIIHLFTLTNLGAPAAFKYFDTTIDRKRYTSTKEVLDATLIHQSITGLYETRIDLSQLGGDGGPAPAPAPGGTAPLEEEYRLFLEAPIQNVTLLEQWKREIPKVWAEINPPGLASTQAPIHVQLLSTALPVRVRQYPITLEAKRSLRETIRKFRAAGILRPVHSPWNTPLLPVRKSGTSEYRMVQDLREVNKRVETIHPTVPNPYTLLSLLPPDRIWYSVLDLKDAFFCIPLAPESQLIFAFEWADAEEGESGQLTWTRLPQGFKNSPTLFNEALNRDLQGFRLDHPSVSLLQYVDDLLIAADTQAACLSATRDLLMTLAELGYRVSGKKAQLCQEEVTYLGFKIHKGSRSLSNSRTQAILQIPVPKTKRQVREFLGTIGYCRLWIPGFAELAQPLYAATRPGNDPLVWGEKEEEAFQSLKLALTQPPALALPSLDKPFQLFVEETSGAAKGVLTQALGPWKRPVAYLSKRLDPVAAGWPRCLRAIAAAALLTREASKLTFGQDIEITSSHNLESLLRSPPDKWLTNARITQYQVLLLDPPRVRFKQTAALNPATLLPETDDTLPIHHCLDTLDSLTSTRPDLTDQPLAQAEATLFTDGSSYIRDGKRYAGAAVVTLDSVIWAEPLPIGTSAQKAELIALTKALEWSKDKSVNIYTDSRYAFATLHVHGMIYRERGWLTAGGKAIKNAPEILALLTAVWLPKRVAVMHCKGHQKDDAPTSTGNRRADEVAREVAIRPLSTQATISAGKRTADGSEFEKRTADGSEFESPKKKAKVE

SEQ ID NO: 6493 - protein, 2098 aa, synthetic construct
MPAAKRVKLDGGDKKYSIGLDIGTNSVGWAVITDEYKVPSKKFKVLGNTDRHSIKKNLIGALLFDSGETAEATRLKRTARRRYTRRKNRICYLQEIFSNEMAKVDDSFFHRLEESFLVEEDKKHERHPIFGNIVDEVAYHEKYPTIYHLRKKLVDSTDKADLRLIYLALAHMIKFRGHFLIEGDLNPDNSDVDKLFIQLVQTYNQLFEENPINASGVDAKAILSARLSKSRRLENLIAQLPGEKKNGLFGNLIALSLGLTPNFKSNFDLAEDAKLQLSKDTYDDDLDNLLAQIGDQYADLFLAAKNLSDAILLSDILRVNTEITKAPLSASMIKRYDEHHQDLTLLKALVRQQLPEKYKEIFFDQSKNGYAGYIDGGASQEEFYKFIKPILEKMDGTEELLVKLNREDLLRKQRTFDNGSIPHQIHLGELHAILRRQEDFYPFLKDNREKIEKILTFRIPYYVGPLARGNSRFAWMTRKSEETITPWNFEEVVDKGASAQSFIERMTNFDKNLPNEKVLPKHSLLYEYFTVYNELTKVKYVTEGMRKPAFLSGEQKKAIVDLLFKTNRKVTVKQLKEDYFKKIECFDSVEISGVEDRFNASLGTYHDLLKIIKDKDFLDNEENEDILEDIVLTLTLFEDREMIEERLKTYAHLFDDKVMKQLKRRRYTGWGRLSRKLINGIRDKQSGKTILDFLKSDGFANRNFMQLIHDDSLTFKEDIQKAQVSGQGDSLHEHIANLAGSPAIKKGILQTVKVVDELVKVMGRHKPENIVIEMARENQTTQKGQKNSRERMKRIEEGIKELGSQILKEHPVENTQLQNEKLYLYYLQNGRDMYVDQELDINRLSDYDVDHIVPQSFLKDDSIDNKVLTRSDKARGKSDNVPSEEVVKKMKNYWRQLLNAKLITQRKFDNLTKAERGGLSELDKAGFIKRQLVETRQITKHVAQILDSRMNTKYDENDKLIREVKVITLKSKLVSDFRKDFQFYKVREINNYHHAHDAYLNAVVGTALIKKYPKLESEFVYGDYKVYDVRKMIAKSEQEIGKATAKYFFYSNIMNFFKTEITLANGEIRKRPLIETNGETGEIVWDKGRDFATVRKVLSMPQVNIVKKTEVQTGGFSKESILPKRNSDKLIARKKDWDPKKYGGFDSPTVAYSVLVVAKVEKGKSKKLKSVKELLGITIMERSSFEKNPIDFLEAKGYKEVKKDLIIKLPKYSLFELENGRKRMLASAGELQKGNELALPSKYVNFLYLASHYEKLKGSPEDNEQKQLFVEQHKHYLDEIIEQISEFSKRVILADANLDKVLSAYNKHRDKPIREQAENIIHLFTLTNLGAPAAFKYFDTTIDRKRYTSTKEVLDATLIHQSITGLYETRIDLSQLGGDGGPAPAPAPGGTVSLQDEHRLFDIPVTTSLPDVWLQDFPQAWAETGGLGRAKCQAPIIIDLKPTAVPVSIKQYPMSLEAHMGIRQHIIKFLELGVLRPCRSPWNTPLLPVKKPGTQDYRPVQDLREINKRTVDIHPTVPNPYNLLSTLKPDYSWYTVLDLKDAFFCLPLAPQSQELFAFEWKDPERGISGQLTWTRLPQGFKNSPTLFNEALHRDLTDFRTQHPEVTLLQYVDDLLLAAPTKKACTQGTRHLLQELGEKGYRASAKKAQICQTKVTYLGYILSEGKRWLTPGRIETVARIPPPRNPREVREFLGTAGFCRLWIPGFAELAAPLYALTKPSTPFTWQTEHQLAFEALKKALLSAPALGLPDTSKPFTLFLDERQGIAKGVLTQKLGPWKRPVAYLSKKLDPVAAGWPPCLRIMAATAMLVKDSAKLTLGQPLTVITPHTLEAIVRQPPDRWITNARLTHYQALLLDTDRVQFGPPVTLNPATLLPVPENQPSPHDCRQVLAETHGTREDLKDQELPDADHTWYTDGSSYLDSGTRRAGAAVVDGHNTIWAQSLPPGTSAQKAELIALTKALELSKGKKANIYTDSRYAFATAHTHGSIYERRGWLTSEGKEIKNKAEIIALLKALFLPQEVAIIHCPGHQKGQDPVAVGNRQADRVARQAAMAEVLTLATEPDNTSHITAGKRTADGSEFEKRTADGSEFESPKKKAKVE

SEQ ID NO: 6494 - protein, 2169 aa, synthetic construct
MPAAKRVKLDGGDKKYSIGLDIGTNSVGWAVITDEYKVPSKKFKVLGNTDRHSIKKNLIGALLFDSGETAEATRLKRTARRRYTRRKNRICYLQEIFSNEMAKVDDSFFHRLEESFLVEEDKKHERHPIFGNIVDEVAYHEKYPTIYHLRKKLVDSTDKADLRLIYLALAHMIKFRGHFLIEGDLNPDNSDVDKLFIQLVQTYNQLFEENPINASGVDAKAILSARLSKSRRLENLIAQLPGEKKNGLFGNLIALSLGLTPNFKSNFDLAEDAKLQLSKDTYDDDLDNLLAQIGDQYADLFLAAKNLSDAILLSDILRVNTEITKAPLSASMIKRYDEHHQDLTLLKALVRQQLPEKYKEIFFDQSKNGYAGYIDGGASQEEFYKFIKPILEKMDGTEELLVKLNREDLLRKQRTFDNGSIPHQIHLGELHAILRRQEDFYPFLKDNREKIEKILTFRIPYYVGPLARGNSRFAWMTRKSEETITPWNFEEVVDKGASAQSFIERMTNFDKNLPNEKVLPKHSLLYEYFTVYNELTKVKYVTEGMRKPAFLSGEQKKAIVDLLFKTNRKVTVKQLKEDYFKKIECFDSVEISGVEDRFNASLGTYHDLLKIIKDKDFLDNEENEDILEDIVLTLTLFEDREMIEERLKTYAHLFDDKVMKQLKRRRYTGWGRLSRKLINGIRDKQSGKTILDFLKSDGFANRNFMQLIHDDSLTFKEDIQKAQVSGQGDSLHEHIANLAGSPAIKKGILQTVKVVDELVKVMGRHKPENIVIEMARENQTTQKGQKNSRERMKRIEEGIKELGSQILKEHPVENTQLQNEKLYLYYLQNGRDMYVDQELDINRLSDYDVDHIVPQSFLKDDSIDNKVLTRSDKARGKSDNVPSEEVVKKMKNYWRQLLNAKLITQRKFDNLTKAERGGLSELDKAGFIKRQLVETRQITKHVAQILDSRMNTKYDENDKLIREVKVITLKSKLVSDFRKDFQFYKVREINNYHHAHDAYLNAVVGTALIKKYPKLESEFVYGDYKVYDVRKMIAKSEQEIGKATAKYFFYSNIMNFFKTEITLANGEIRKRPLIETNGETGEIVWDKGRDFATVRKVLSMPQVNIVKKTEVQTGGFSKESILPKRNSDKLIARKKDWDPKKYGGFDSPTVAYSVLVVAKVEKGKSKKLKSVKELLGITIMERSSFEKNPIDFLEAKGYKEVKKDLIIKLPKYSLFELENGRKRMLASAGELQKGNELALPSKYVNFLYLASHYEKLKGSPEDNEQKQLFVEQHKHYLDEIIEQISEFSKRVILADANLDKVLSAYNKHRDKPIREQAENIIHLFTLTNLGAPAAFKYFDTTIDRKRYTSTKEVLDATLIHQSITGLYETRIDLSQLGGDGGPAPAPAPGGMDLLKPLTVERKGVKIKGYWNSQADITCVPKDLLQGEEPVRQQNVTTIHGTQEGDVYYVNLKIDGRRINTEVIGTTLDYAIITPGDVPWILKKPLELTIKLDLEEQQGTLLNNSILSKKGKEELKQLFEKYSALWQSWENQVGHRRIRPHKIATGTVKPTPQKQYHINPKAKPDIQIVINDLLKQGVLIQKESTMNTPVYPVPKPNGRWRMVLDYRAVNKVTPLIAVQNQHSYGILGSLFKGRYKTTIDLSNGFWAHPIVPEDYWITAFTWQGKQYCWTVLPQGFLNSPGLFNGDVVDLLQGIPNVEVYVDDVYISHDSEKEHLEYLDILFNRLKEAGYIISLKKSNIANSIVDFLGFQITNEGRGLTDTFKEKLENITAPTTLKQLQSILGLLNFARNFIPDFTELIAPLYALIPKSPKNYVPWQIEHSTTLETLITKLNGAEYLQGRKGDKTLIMKVNASYTTGYIRYYNEGEKKPISYVSIVFSKTELKFTELEKLLTTVHKGLLKALDLSMGQNIHVYSPIVSMQNIQKTPQTAKKALASRWLSWLSYLEDPRIRFFYDPQMPALKDLPAVDTGKDNKKHPSNFQHIFYTDGSAITSPTKEGHLNAGMGIVYFINKDGNLQKQQEWSISLGNHTAQFAEIAAFEFALKKCLPLGGNILVVTDSNYVAKAYNEELDVWASNGFVNNRKKPLKHISKWKSVADLKRLRPDVVVTHEPGHQKLDSSPHAYGNNLADQLATQASFKVHAGKRTADGSEFEKRTADGSEFESPKKKAKVE

SEQ ID NO: 6495 - protein, 2091 aa, synthetic construct
MPAAKRVKLDGGDKKYSIGLDIGTNSVGWAVITDEYKVPSKKFKVLGNTDRHSIKKNLIGALLFDSGETAEATRLKRTARRRYTRRKNRICYLQEIFSNEMAKVDDSFFHRLEESFLVEEDKKHERHPIFGNIVDEVAYHEKYPTIYHLRKKLVDSTDKADLRLIYLALAHMIKFRGHFLIEGDLNPDNSDVDKLFIQLVQTYNQLFEENPINASGVDAKAILSARLSKSRRLENLIAQLPGEKKNGLFGNLIALSLGLTPNFKSNFDLAEDAKLQLSKDTYDDDLDNLLAQIGDQYADLFLAAKNLSDAILLSDILRVNTEITKAPLSASMIKRYDEHHQDLTLLKALVRQQLPEKYKEIFFDQSKNGYAGYIDGGASQEEFYKFIKPILEKMDGTEELLVKLNREDLLRKQRTFDNGSIPHQIHLGELHAILRRQEDFYPFLKDNREKIEKILTFRIPYYVGPLARGNSRFAWMTRKSEETITPWNFEEVVDKGASAQSFIERMTNFDKNLPNEKVLPKHSLLYEYFTVYNELTKVKYVTEGMRKPAFLSGEQKKAIVDLLFKTNRKVTVKQLKEDYFKKIECFDSVEISGVEDRFNASLGTYHDLLKIIKDKDFLDNEENEDILEDIVLTLTLFEDREMIEERLKTYAHLFDDKVMKQLKRRRYTGWGRLSRKLINGIRDKQSGKTILDFLKSDGFANRNFMQLIHDDSLTFKEDIQKAQVSGQGDSLHEHIANLAGSPAIKKGILQTVKVVDELVKVMGRHKPENIVIEMARENQTTQKGQKNSRERMKRIEEGIKELGSQILKEHPVENTQLQNEKLYLYYLQNGRDMYVDQELDINRLSDYDVDHIVPQSFLKDDSIDNKVLTRSDKARGKSDNVPSEEVVKKMKNYWRQLLNAKLITQRKFDNLTKAERGGLSELDKAGFIKRQLVETRQITKHVAQILDSRMNTKYDENDKLIREVKVITLKSKLVSDFRKDFQFYKVREINNYHHAHDAYLNAVVGTALIKKYPKLESEFVYGDYKVYDVRKMIAKSEQEIGKATAKYFFYSNIMNFFKTEITLANGEIRKRPLIETNGETGEIVWDKGRDFATVRKVLSMPQVNIVKKTEVQTGGFSKESILPKRNSDKLIARKKDWDPKKYGGFDSPTVAYSVLVVAKVEKGKSKKLKSVKELLGITIMERSSFEKNPIDFLEAKGYKEVKKDLIIKLPKYSLFELENGRKRMLASAGELQKGNELALPSKYVNFLYLASHYEKLKGSPEDNEQKQLFVEQHKHYLDEIIEQISEFSKRVILADANLDKVLSAYNKHRDKPIREQAENIIHLFTLTNLGAPAAFKYFDTTIDRKRYTSTKEVLDATLIHQSITGLYETRIDLSQLGGDGGPAPAPAPGGTLQLEEEYRLFEPESTQKQEMDIWLKNFPQAWAETGGMGTAHCQAPVLIQLKATATPISIRQYPMPHEAYQGIKPHIRRMLDQGILKPCQSPWNTPLLPVKKPGTEDYRPVQDLREVNKRVEDIHPTVPNPYNLLSTLPPSHPWYTVLDLKDAFFCLRLHSESQLLFAFEWRDPEIGLSGQLTWTRLPQGFKNSPTLFNEALHSDLADFRVRYPALVLLQYVDDLLLAAATRTECLEGTKALLETLGNKGYRASAKKAQICLQEVTYLGYSLKDGQRWLTKARKEAILSIPVPKNSRQVREFLGTAGYCRLWIPGFAELAAPLYPLTRPGTLFQWGTEQQLAFEDIKKALLSSPALGLPDITKPFELFIDENSGFAKGVLVQKLGPWKRPVAYLSKKLDTVASGWPPCLRMVAAIAILVKDAGKLTLGQPLTILTSHPVEALVRQPPNKWLSNARMTHYQAMLLDAERVHFGPTVSLNPATLLPLPSGGNHHDCLQILAETHGTRPDLTDQPLPDADLTWYTDGSSFIRNGEREAGAAVTTESEVIWAAPLPPGTSAQRAELIALTQALKMAEGKKLTVYTDSRYAFATTHVHGEIYRRRGWLTSEGKEIKNKNEILALLEALFLPKRLSIIHCPGHQKGDSPQAKGNRLADDTAKKAATETHSSLTVLPAGKRTADGSEFEKRTADGSEFESPKKKAKVE

SEQ ID NO: 6496 - protein, 2091 aa, synthetic construct
MPAAKRVKLDGGDKKYSIGLDIGTNSVGWAVITDEYKVPSKKFKVLGNTDRHSIKKNLIGALLFDSGETAEATRLKRTARRRYTRRKNRICYLQEIFSNEMAKVDDSFFHRLEESFLVEEDKKHERHPIFGNIVDEVAYHEKYPTIYHLRKKLVDSTDKADLRLIYLALAHMIKFRGHFLIEGDLNPDNSDVDKLFIQLVQTYNQLFEENPINASGVDAKAILSARLSKSRRLENLIAQLPGEKKNGLFGNLIALSLGLTPNFKSNFDLAEDAKLQLSKDTYDDDLDNLLAQIGDQYADLFLAAKNLSDAILLSDILRVNTEITKAPLSASMIKRYDEHHQDLTLLKALVRQQLPEKYKEIFFDQSKNGYAGYIDGGASQEEFYKFIKPILEKMDGTEELLVKLNREDLLRKQRTFDNGSIPHQIHLGELHAILRRQEDFYPFLKDNREKIEKILTFRIPYYVGPLARGNSRFAWMTRKSEETITPWNFEEVVDKGASAQSFIERMTNFDKNLPNEKVLPKHSLLYEYFTVYNELTKVKYVTEGMRKPAFLSGEQKKAIVDLLFKTNRKVTVKQLKEDYFKKIECFDSVEISGVEDRFNASLGTYHDLLKIIKDKDFLDNEENEDILEDIVLTLTLFEDREMIEERLKTYAHLFDDKVMKQLKRRRYTGWGRLSRKLINGIRDKQSGKTILDFLKSDGFANRNFMQLIHDDSLTFKEDIQKAQVSGQGDSLHEHIANLAGSPAIKKGILQTVKVVDELVKVMGRHKPENIVIEMARENQTTQKGQKNSRERMKRIEEGIKELGSQILKEHPVENTQLQNEKLYLYYLQNGRDMYVDQELDINRLSDYDVDHIVPQSFLKDDSIDNKVLTRSDKARGKSDNVPSEEVVKKMKNYWRQLLNAKLITQRKFDNLTKAERGGLSELDKAGFIKRQLVETRQITKHVAQILDSRMNTKYDENDKLIREVKVITLKSKLVSDFRKDFQFYKVREINNYHHAHDAYLNAVVGTALIKKYPKLESEFVYGDYKVYDVRKMIAKSEQEIGKATAKYFFYSNIMNFFKTEITLANGEIRKRPLIETNGETGEIVWDKGRDFATVRKVLSMPQVNIVKKTEVQTGGFSKESILPKRNSDKLIARKKDWDPKKYGGFDSPTVAYSVLVVAKVEKGKSKKLKSVKELLGITIMERSSFEKNPIDFLEAKGYKEVKKDLIIKLPKYSLFELENGRKRMLASAGELQKGNELALPSKYVNFLYLASHYEKLKGSPEDNEQKQLFVEQHKHYLDEIIEQISEFSKRVILADANLDKVLSAYNKHRDKPIREQAENIIHLFTLTNLGAPAAFKYFDTTIDRKRYTSTKEVLDATLIHQSITGLYETRIDLSQLGGDGGPAPAPAPGGTLQLEEEYRLFEPESTQKQEMDIWLKNFPQAWAETGGMGTAHCQAPVLIQLKATATPISIRQYPMPHEAYQGIKPHIRRMLDQGILKPCQSPWNTPLLPVKKPGTEDYRPVQDLREVNKRVEDIHPTVPNPYNLLSTLPPSHPWYTVLDLKDAFFCLRLHSESQLLFAFEWRDPEIGLSGQLTWTRLPQGFKNSPTLFNEALHSDLADFRVRYPALVLLQYVDDLLLAAATRTECLEGTKALLETLGNKGYRASAKKAQICLQEVTYLGYSLKDGQRWLTKARKEAILSIPVPKNSRQVREFLGKAGYCRLFIPGFAELAAPLYPLTRPGTLFQWGTEQQLAFEDIKKALLSSPALGLPDITKPFELFIDENSGFAKGVLVQKLGPWKRPVAYLSKKLDTVASGWPPCLRMVAAIAILVKDAGKLTLGQPLTILTSHPVEALVRQPPNKWLSNARMTHYQAMLLDAERVHFGPTVSLNPATLLPLPSGGNHHDCLQILAETHGTRPDLTDQPLPDADLTWYTDGSSFIRNGEREAGAAVTTESEVIWAAPLPPGTSAQRAELIALTQALKMAEGKKLTVYTDSRYAFATTHVHGEIYRRRGWLTSEGKEIKNKNEILALLEALFLPKRLSIIHCPGHQKGDSPQAKGNRLADDTAKKAATETHSSLTVLPAGKRTADGSEFEKRTADGSEFESPKKKAKVE

SEQ ID NO: 6497 - protein, 2090 aa, synthetic construct
MPAAKRVKLDGGDKKYSIGLDIGTNSVGWAVITDEYKVPSKKFKVLGNTDRHSIKKNLIGALLFDSGETAEATRLKRTARRRYTRRKNRICYLQEIFSNEMAKVDDSFFHRLEESFLVEEDKKHERHPIFGNIVDEVAYHEKYPTIYHLRKKLVDSTDKADLRLIYLALAHMIKFRGHFLIEGDLNPDNSDVDKLFIQLVQTYNQLFEENPINASGVDAKAILSARLSKSRRLENLIAQLPGEKKNGLFGNLIALSLGLTPNFKSNFDLAEDAKLQLSKDTYDDDLDNLLAQIGDQYADLFLAAKNLSDAILLSDILRVNTEITKAPLSASMIKRYDEHHQDLTLLKALVRQQLPEKYKEIFFDQSKNGYAGYIDGGASQEEFYKFIKPILEKMDGTEELLVKLNREDLLRKQRTFDNGSIPHQIHLGELHAILRRQEDFYPFLKDNREKIEKILTFRIPYYVGPLARGNSRFAWMTRKSEETITPWNFEEVVDKGASAQSFIERMTNFDKNLPNEKVLPKHSLLYEYFTVYNELTKVKYVTEGMRKPAFLSGEQKKAIVDLLFKTNRKVTVKQLKEDYFKKIECFDSVEISGVEDRFNASLGTYHDLLKIIKDKDFLDNEENEDILEDIVLTLTLFEDREMIEERLKTYAHLFDDKVMKQLKRRRYTGWGRLSRKLINGIRDKQSGKTILDFLKSDGFANRNFMQLIHDDSLTFKEDIQKAQVSGQGDSLHEHIANLAGSPAIKKGILQTVKVVDELVKVMGRHKPENIVIEMARENQTTQKGQKNSRERMKRIEEGIKELGSQILKEHPVENTQLQNEKLYLYYLQNGRDMYVDQELDINRLSDYDVDHIVPQSFLKDDSIDNKVLTRSDKARGKSDNVPSEEVVKKMKNYWRQLLNAKLITQRKFDNLTKAERGGLSELDKAGFIKRQLVETRQITKHVAQILDSRMNTKYDENDKLIREVKVITLKSKLVSDFRKDFQFYKVREINNYHHAHDAYLNAVVGTALIKKYPKLESEFVYGDYKVYDVRKMIAKSEQEIGKATAKYFFYSNIMNFFKTEITLANGEIRKRPLIETNGETGEIVWDKGRDFATVRKVLSMPQVNIVKKTEVQTGGFSKESILPKRNSDKLIARKKDWDPKKYGGFDSPTVAYSVLVVAKVEKGKSKKLKSVKELLGITIMERSSFEKNPIDFLEAKGYKEVKKDLIIKLPKYSLFELENGRKRMLASAGELQKGNELALPSKYVNFLYLASHYEKLKGSPEDNEQKQLFVEQHKHYLDEIIEQISEFSKRVILADANLDKVLSAYNKHRDKPIREQAENIIHLFTLTNLGAPAAFKYFDTTIDRKRYTSTKEVLDATLIHQSITGLYETRIDLSQLGGDGGPAPAPAPGGVLNLEEEYRLHEKPVPSSIDPSWLQLFPTVWAERAGMGLANQVPPVVVELRSGASPVAVRQYPMSKEAREGIRPHIQKFLDLGVLVPCRSPWNTPLLPVKKPGTNDYRPVQDLREINKRVQDIHPTVPNPYNLLSSLPPSYTWYSVLDLKDAFFCLRLHPNSQPLFAFEWKDPEKGNTGQLTWTRLPQGFKNSPTLFNEALHRDLAPFRALNPQVVLLQYVDDLLVAAPTYEDCKKGTQKLLQELSKLGYRVSAKKAQLCQREVTYLGYLLKEGKRWLTPARKATVMKIPVPTTPRQVREFLGKAGFCRLFIPGFASLAAPLYPLTKPSIPFIWTEEHQQAFDHIKKALLSAPALALPDLTKPFTLYIDERAGVARGVLTQTLGPWRRPVAYLSKKLDPVASGWPTCLKAVAAVALLLKDADKLTLGQNVTVIASHSLESIVRQPPDRWMTNARMTHYQSLLLNERVSFAPPAVLNPATLLPVESEATPVHRCSEILAEETGTRRDLEDQPLPGVPTWYTDGSSFITEGKRRAGAPIVDGKRTVWASSLPEGTSAQKAELVALTQALRLAEGKNINIYTDSRYAFATAHIHGAIYKQRGWLTSAGKDIKNKEEILALLEAIHLPRRVAIIHCPGHQRGSNPVATGNRRADEAAKQAALSTRVLAGTTKPAGKRTADGSEFEKRTADGSEFESPKKKAKVE

SEQ ID NO: 6498 - protein, 2005 aa, synthetic construct
MPAAKRVKLDGGDKKYSIGLDIGTNSVGWAVITDEYKVPSKKFKVLGNTDRHSIKKNLIGALLFDSGETAEATRLKRTARRRYTRRKNRICYLQEIFSNEMAKVDDSFFHRLEESFLVEEDKKHERHPIFGNIVDEVAYHEKYPTIYHLRKKLVDSTDKADLRLIYLALAHMIKFRGHFLIEGDLNPDNSDVDKLFIQLVQTYNQLFEENPINASGVDAKAILSARLSKSRRLENLIAQLPGEKKNGLFGNLIALSLGLTPNFKSNFDLAEDAKLQLSKDTYDDDLDNLLAQIGDQYADLFLAAKNLSDAILLSDILRVNTEITKAPLSASMIKRYDEHHQDLTLLKALVRQQLPEKYKEIFFDQSKNGYAGYIDGGASQEEFYKFIKPILEKMDGTEELLVKLNREDLLRKQRTFDNGSIPHQIHLGELHAILRRQEDFYPFLKDNREKIEKILTFRIPYYVGPLARGNSRFAWMTRKSEETITPWNFEEVVDKGASAQSFIERMTNFDKNLPNEKVLPKHSLLYEYFTVYNELTKVKYVTEGMRKPAFLSGEQKKAIVDLLFKTNRKVTVKQLKEDYFKKIECFDSVEISGVEDRFNASLGTYHDLLKIIKDKDFLDNEENEDILEDIVLTLTLFEDREMIEERLKTYAHLFDDKVMKQLKRRRYTGWGRLSRKLINGIRDKQSGKTILDFLKSDGFANRNFMQLIHDDSLTFKEDIQKAQVSGQGDSLHEHIANLAGSPAIKKGILQTVKVVDELVKVMGRHKPENIVIEMARENQTTQKGQKNSRERMKRIEEGIKELGSQILKEHPVENTQLQNEKLYLYYLQNGRDMYVDQELDINRLSDYDVDHIVPQSFLKDDSIDNKVLTRSDKARGKSDNVPSEEVVKKMKNYWRQLLNAKLITQRKFDNLTKAERGGLSELDKAGFIKRQLVETRQITKHVAQILDSRMNTKYDENDKLIREVKVITLKSKLVSDFRKDFQFYKVREINNYHHAHDAYLNAVVGTALIKKYPKLESEFVYGDYKVYDVRKMIAKSEQEIGKATAKYFFYSNIMNFFKTEITLANGEIRKRPLIETNGETGEIVWDKGRDFATVRKVLSMPQVNIVKKTEVQTGGFSKESILPKRNSDKLIARKKDWDPKKYGGFDSPTVAYSVLVVAKVEKGKSKKLKSVKELLGITIMERSSFEKNPIDFLEAKGYKEVKKDLIIKLPKYSLFELENGRKRMLASAGELQKGNELALPSKYVNFLYLASHYEKLKGSPEDNEQKQLFVEQHKHYLDEIIEQISEFSKRVILADANLDKVLSAYNKHRDKPIREQAENIIHLFTLTNLGAPAAFKYFDTTIDRKRYTSTKEVLDATLIHQSITGLYETRIDLSQLGGDGGPAPAPAPGGHLPPPPQVDQFPLNLPERLQALNDLVSKALEAGHIEPYSGPGNNPVFPVKKPNGKWRFIHDLRATNAITTTLTSPSPGPPDLTSLPTALPHLQTIDLTDAFFQIPLPKQYQPYFAFTIPQPCNYGPGTRYAWTVLPQGFKNSPTLFQQQLAAVLNPMRKMFPTSTIVQYMDDILLASPTNEELQQLSQLTLQALTTHGLPISQEKTQQTPGQIRFLGQVISPNHITYESTPTIPIKSQWTLTELQVILGEIQWVSKGTPILRKHLQSLYSALHPYRDPRACITLTPQQLHALHAIQQALQHNCRGRLNPALPLLGLISLSTSGTTSVIFQPKQNWPLAWLHTPHPPTSLCPWGHLLACTILTLDKYTLQHYGQLCQSFHHNMSKQALCDFLRNSPHPSVGILIHHMGRFHNLGSQPSGPWKTLLHLPTLLQEPRLLRPIFTLSPVVLDTAPCLFSDGSPQKAAYVLWDQTILQQDITPLPSHETHSAQKGELLALICGLRAAKPWPSLNIFLDSKYLIKYLHSLAIGAFLGTSAHQTLQAALPPLLQGKTIYLHHVRSHTNLPDPISTFNEYTDSLILAPLVPLAGKRTADGSEFEKRTADGSEFESPKKKAKVE

SEQ ID NO: 6499 - protein, 2214 aa, synthetic construct
MPAAKRVKLDGGDKKYSIGLDIGTNSVGWAVITDEYKVPSKKFKVLGNTDRHSIKKNLIGALLFDSGETAEATRLKRTARRRYTRRKNRICYLQEIFSNEMAKVDDSFFHRLEESFLVEEDKKHERHPIFGNIVDEVAYHEKYPTIYHLRKKLVDSTDKADLRLIYLALAHMIKFRGHFLIEGDLNPDNSDVDKLFIQLVQTYNQLFEENPINASGVDAKAILSARLSKSRRLENLIAQLPGEKKNGLFGNLIALSLGLTPNFKSNFDLAEDAKLQLSKDTYDDDLDNLLAQIGDQYADLFLAAKNLSDAILLSDILRVNTEITKAPLSASMIKRYDEHHQDLTLLKALVRQQLPEKYKEIFFDQSKNGYAGYIDGGASQEEFYKFIKPILEKMDGTEELLVKLNREDLLRKQRTFDNGSIPHQIHLGELHAILRRQEDFYPFLKDNREKIEKILTFRIPYYVGPLARGNSRFAWMTRKSEETITPWNFEEVVDKGASAQSFIERMTNFDKNLPNEKVLPKHSLLYEYFTVYNELTKVKYVTEGMRKPAFLSGEQKKAIVDLLFKTNRKVTVKQLKEDYFKKIECFDSVEISGVEDRFNASLGTYHDLLKIIKDKDFLDNEENEDILEDIVLTLTLFEDREMIEERLKTYAHLFDDKVMKQLKRRRYTGWGRLSRKLINGIRDKQSGKTILDFLKSDGFANRNFMQLIHDDSLTFKEDIQKAQVSGQGDSLHEHIANLAGSPAIKKGILQTVKVVDELVKVMGRHKPENIVIEMARENQTTQKGQKNSRERMKRIEEGIKELGSQILKEHPVENTQLQNEKLYLYYLQNGRDMYVDQELDINRLSDYDVDHIVPQSFLKDDSIDNKVLTRSDKARGKSDNVPSEEVVKKMKNYWRQLLNAKLITQRKFDNLTKAERGGLSELDKAGFIKRQLVETRQITKHVAQILDSRMNTKYDENDKLIREVKVITLKSKLVSDFRKDFQFYKVREINNYHHAHDAYLNAVVGTALIKKYPKLESEFVYGDYKVYDVRKMIAKSEQEIGKATAKYFFYSNIMNFFKTEITLANGEIRKRPLIETNGETGEIVWDKGRDFATVRKVLSMPQVNIVKKTEVQTGGFSKESILPKRNSDKLIARKKDWDPKKYGGFDSPTVAYSVLVVAKVEKGKSKKLKSVKELLGITIMERSSFEKNPIDFLEAKGYKEVKKDLIIKLPKYSLFELENGRKRMLASAGELQKGNELALPSKYVNFLYLASHYEKLKGSPEDNEQKQLFVEQHKHYLDEIIEQISEFSKRVILADANLDKVLSAYNKHRDKPIREQAENIIHLFTLTNLGAPAAFKYFDTTIDRKRYTSTKEVLDATLIHQSITGLYETRIDLSQLGGDGGPAPAPAPGGTLGDQGSRGSDPLPEPRVTLTVEGIPTEFLVNTGAEHSVLTKPMGKMGSKRTVVAGATGSKVYPWTTKRLLKIGQKQVTHSFLVIPECPAPLLGRDLLTKLKAQIQFSTEGPQVTWEDRPAMCLVLNLEEEYRLHEKPVPPSIDPSWLQLFPMVWAEKAGMGLANQVPPVVVELKSDASPVAVRQYPMSKEAREGIRPHIQRFLDLGILVPCQSPWNTPLLPVKKPGTNDYRPVQDLREVNKRVQDIHPTVPNPYNLLSSLPPSHTWYSVLDLKDAFFCLKLHPNSQPLFAFEWRDPEKGNTGQLTWTRLPQGFKNSPTLFNEALHRDLASFRALNPQVVMLQYVDDLLVAAPTYRDCKEGTRRLLQELSKLGYRVSAKKAQLCREEVTYLGYLLKGGKRWLTPARKATVMKIPTPTTPRQVREFLGKAGFCRLFIPGFASLAAPLYPLTRPKVPFTWTEAHQEAFGRIKEALLSAPALALPDLTKPFALYVDEKEGVARGVLTQTLGPWRRPVAYLSKKLDPVASGWPTCLKAIAAVALLLKDADKLTLGQNVLVIAPHNLESIVRQPPDRWMTNARMTHYQSLLLNERVSFAPPAILNPATLLPVESDDTPIHICSEILAEETGTRPDLRDQPLPGVPAWYTDGSSFIMDGRRQAGAAIVDNKRTVWASNLPEGTSAQKAELIALTQALRLAEGKSINIYTDSRYAFATAHVHGAIYKQRGWLTSAGKDIKNKEEILALLEAIHLPKRVAIIHCPGHQRGTDPVATGNRKADEAAKQAAQSTRILTETTKNAGKRTADGSEFEKRTADGSEFESPKKKAKVE

SEQ ID NO: 6500 - protein, 2092 aa, synthetic construct
MPAAKRVKLDGGDKKYSIGLDIGTNSVGWAVITDEYKVPSKKFKVLGNTDRHSIKKNLIGALLFDSGETAEATRLKRTARRRYTRRKNRICYLQEIFSNEMAKVDDSFFHRLEESFLVEEDKKHERHPIFGNIVDEVAYHEKYPTIYHLRKKLVDSTDKADLRLIYLALAHMIKFRGHFLIEGDLNPDNSDVDKLFIQLVQTYNQLFEENPINASGVDAKAILSARLSKSRRLENLIAQLPGEKKNGLFGNLIALSLGLTPNFKSNFDLAEDAKLQLSKDTYDDDLDNLLAQIGDQYADLFLAAKNLSDAILLSDILRVNTEITKAPLSASMIKRYDEHHQDLTLLKALVRQQLPEKYKEIFFDQSKNGYAGYIDGGASQEEFYKFIKPILEKMDGTEELLVKLNREDLLRKQRTFDNGSIPHQIHLGELHAILRRQEDFYPFLKDNREKIEKILTFRIPYYVGPLARGNSRFAWMTRKSEETITPWNFEEVVDKGASAQSFIERMTNFDKNLPNEKVLPKHSLLYEYFTVYNELTKVKYVTEGMRKPAFLSGEQKKAIVDLLFKTNRKVTVKQLKEDYFKKIECFDSVEISGVEDRFNASLGTYHDLLKIIKDKDFLDNEENEDILEDIVLTLTLFEDREMIEERLKTYAHLFDDKVMKQLKRRRYTGWGRLSRKLINGIRDKQSGKTILDFLKSDGFANRNFMQLIHDDSLTFKEDIQKAQVSGQGDSLHEHIANLAGSPAIKKGILQTVKVVDELVKVMGRHKPENIVIEMARENQTTQKGQKNSRERMKRIEEGIKELGSQILKEHPVENTQLQNEKLYLYYLQNGRDMYVDQELDINRLSDYDVDHIVPQSFLKDDSIDNKVLTRSDKARGKSDNVPSEEVVKKMKNYWRQLLNAKLITQRKFDNLTKAERGGLSELDKAGFIKRQLVETRQITKHVAQILDSRMNTKYDENDKLIREVKVITLKSKLVSDFRKDFQFYKVREINNYHHAHDAYLNAVVGTALIKKYPKLESEFVYGDYKVYDVRKMIAKSEQEIGKATAKYFFYSNIMNFFKTEITLANGEIRKRPLIETNGETGEIVWDKGRDFATVRKVLSMPQVNIVKKTEVQTGGFSKESILPKRNSDKLIARKKDWDPKKYGGFDSPTVAYSVLVVAKVEKGKSKKLKSVKELLGITIMERSSFEKNPIDFLEAKGYKEVKKDLIIKLPKYSLFELENGRKRMLASAGELQKGNELALPSKYVNFLYLASHYEKLKGSPEDNEQKQLFVEQHKHYLDEIIEQISEFSKRVILADANLDKVLSAYNKHRDKPIREQAENIIHLFTLTNLGAPAAFKYFDTTIDRKRYTSTKEVLDATLIHQSITGLYETRIDLSQLGGDGGPAPAPAPGGTLNLEDEYRLYETSAEPEVSPGSTWLSDFPQAWAETGGMGLAVRQAPLIIPLKATSTPVSIKQYPMSQEAKLGIKPHIQRLLDQGILVPCQSPWNTPLLPVKKPGTNDYRPVQDLREVNKRVEDIHPTVPNPYNLLSGLPPSHRWYTVLDLKDAFFCLRLHPTSQPLFAFEWRDPGMGISGQLTWTRLPQGFKNSPTLFNEALHRDLADFRIQHPDLILLQYVDDILLAATSELDCQQGTRALLLTLGNLGYRASAKKAQLCQKQVKYLGYLLKEGQRWLTEARKETVMGQPTPKTPRQLREFLGTAGFCRLWIPGFAEMAAPLYPLTKPGTLFNWGPDQQKAYQEIKQALLTAPALGLPDLTKPFELFVDEKQGYAKGVLTQKLGPWRRPVAYLSKKLDPVAAGWPPCLRMVAAIAVLRKDAGKLTMGQPLVILAPHAVEALVKQPPDRWLSNARMTHYQAMLLDTDRVQFGPVVALNPATLLPLPEEGAPHDCLEILAETHGTRPDLTDQPIPDADHTWYTDGSSFLQEGQRKAGAAVTTETEVIWARALPAGTSAQRAELIALTQALKMAEGKRLNVYTDSRYAFATAHIHGEIYRRRGWLTSEGREIKNKSEILALLKALFLPKRLSIIHCLGHQKGDSAEARGNRLADQAAREAAIKTPPDTSTLLAGKRTADGSEFEKRTADGSEFESPKKKAKVE

SEQ ID NO: 6501 - protein, 2092 aa, synthetic construct
MPAAKRVKLDGGDKKYSIGLDIGTNSVGWAVITDEYKVPSKKFKVLGNTDRHSIKKNLIGALLFDSGETAEATRLKRTARRRYTRRKNRICYLQEIFSNEMAKVDDSFFHRLEESFLVEEDKKHERHPIFGNIVDEVAYHEKYPTIYHLRKKLVDSTDKADLRLIYLALAHMIKFRGHFLIEGDLNPDNSDVDKLFIQLVQTYNQLFEENPINASGVDAKAILSARLSKSRRLENLIAQLPGEKKNGLFGNLIALSLGLTPNFKSNFDLAEDAKLQLSKDTYDDDLDNLLAQIGDQYADLFLAAKNLSDAILLSDILRVNTEITKAPLSASMIKRYDEHHQDLTLLKALVRQQLPEKYKEIFFDQSKNGYAGYIDGGASQEEFYKFIKPILEKMDGTEELLVKLNREDLLRKQRTFDNGSIPHQIHLGELHAILRRQEDFYPFLKDNREKIEKILTFRIPYYVGPLARGNSRFAWMTRKSEETITPWNFEEVVDKGASAQSFIERMTNFDKNLPNEKVLPKHSLLYEYFTVYNELTKVKYVTEGMRKPAFLSGEQKKAIVDLLFKTNRKVTVKQLKEDYFKKIECFDSVEISGVEDRFNASLGTYHDLLKIIKDKDFLDNEENEDILEDIVLTLTLFEDREMIEERLKTYAHLFDDKVMKQLKRRRYTGWGRLSRKLINGIRDKQSGKTILDFLKSDGFANRNFMQLIHDDSLTFKEDIQKAQVSGQGDSLHEHIANLAGSPAIKKGILQTVKVVDELVKVMGRHKPENIVIEMARENQTTQKGQKNSRERMKRIEEGIKELGSQILKEHPVENTQLQNEKLYLYYLQNGRDMYVDQELDINRLSDYDVDHIVPQSFLKDDSIDNKVLTRSDKARGKSDNVPSEEVVKKMKNYWRQLLNAKLITQRKFDNLTKAERGGLSELDKAGFIKRQLVETRQITKHVAQILDSRMNTKYDENDKLIREVKVITLKSKLVSDFRKDFQFYKVREINNYHHAHDAYLNAVVGTALIKKYPKLESEFVYGDYKVYDVRKMIAKSEQEIGKATAKYFFYSNIMNFFKTEITLANGEIRKRPLIETNGETGEIVWDKGRDFATVRKVLSMPQVNIVKKTEVQTGGFSKESILPKRNSDKLIARKKDWDPKKYGGFDSPTVAYSVLVVAKVEKGKSKKLKSVKELLGITIMERSSFEKNPIDFLEAKGYKEVKKDLIIKLPKYSLFELENGRKRMLASAGELQKGNELALPSKYVNFLYLASHYEKLKGSPEDNEQKQLFVEQHKHYLDEIIEQISEFSKRVILADANLDKVLSAYNKHRDKPIREQAENIIHLFTLTNLGAPAAFKYFDTTIDRKRYTSTKEVLDATLIHQSITGLYETRIDLSQLGGDGGPAPAPAPGGTLGIEDEYRLHETSTEPDVSLGSTWLSDFPQAWAETGGMGLAVRQAPLIIPLKATSTPVSIQQYPMSHEARLGIKPHIQRLLDQGILVPCQSPWNTPLLPVKKPGTNDYRPVQDLREVNKRVEDIHPTVPNPYNLLSGLPPSHQWYTVLDLKDAFFCLRLHPTSQPLFAFEWRDPGMGISGQLTWTRLPQGFKNSPTLFNEALHRDLADFRIQHPDLILLQYVDDILLAATSELDCQQGTRALLQTLGDLGYRASAKKAQICQKQVKYLGYLLREGQRWLTEARKETVMGQPVPKTPRQLREFLGTAGFCRLWIPGFAEMAAPLYPLTKPGTLFSWGPDQQKAYQEIKQALLTAPALGLPDLTKPFELFVDEKQGYAKGVLTQKLGPWRRPVAYLSKKLDPVAAGWPPCLRMVAAIAVLTKDAGKLTMGQPLVILAPHAVEALVKQPPDRWLSNARMTHYQAMLLDTDRVQFGPVVALNPATLLPLPEEGAPHDCLEILAETHGTRPDLTDQPIPDADHTWYTDGSSFLQEGQRKAGAAVTTETEVIWAGALPAGTSAQRAELIALTQALKMAEGKRLNVYTDSRYAFATAHIHGEIYRRRGWLTSEGREIKNKSEILALLKALFLPKRLSIIHCLGHQKGDSAEARGNRLADQAAREAAIKTPPDTSTLLAGKRTADGSEFEKRTADGSEFESPKKKAKVE

SEQ ID NO: 6502 - protein, 2092 aa, synthetic construct
MPAAKRVKLDGGDKKYSIGLDIGTNSVGWAVITDEYKVPSKKFKVLGNTDRHSIKKNLIGALLFDSGETAEATRLKRTARRRYTRRKNRICYLQEIFSNEMAKVDDSFFHRLEESFLVEEDKKHERHPIFGNIVDEVAYHEKYPTIYHLRKKLVDSTDKADLRLIYLALAHMIKFRGHFLIEGDLNPDNSDVDKLFIQLVQTYNQLFEENPINASGVDAKAILSARLSKSRRLENLIAQLPGEKKNGLFGNLIALSLGLTPNFKSNFDLAEDAKLQLSKDTYDDDLDNLLAQIGDQYADLFLAAKNLSDAILLSDILRVNTEITKAPLSASMIKRYDEHHQDLTLLKALVRQQLPEKYKEIFFDQSKNGYAGYIDGGASQEEFYKFIKPILEKMDGTEELLVKLNREDLLRKQRTFDNGSIPHQIHLGELHAILRRQEDFYPFLKDNREKIEKILTFRIPYYVGPLARGNSRFAWMTRKSEETITPWNFEEVVDKGASAQSFIERMTNFDKNLPNEKVLPKHSLLYEYFTVYNELTKVKYVTEGMRKPAFLSGEQKKAIVDLLFKTNRKVTVKQLKEDYFKKIECFDSVEISGVEDRFNASLGTYHDLLKIIKDKDFLDNEENEDILEDIVLTLTLFEDREMIEERLKTYAHLFDDKVMKQLKRRRYTGWGRLSRKLINGIRDKQSGKTILDFLKSDGFANRNFMQLIHDDSLTFKEDIQKAQVSGQGDSLHEHIANLAGSPAIKKGILQTVKVVDELVKVMGRHKPENIVIEMARENQTTQKGQKNSRERMKRIEEGIKELGSQILKEHPVENTQLQNEKLYLYYLQNGRDMYVDQELDINRLSDYDVDHIVPQSFLKDDSIDNKVLTRSDKARGKSDNVPSEEVVKKMKNYWRQLLNAKLITQRKFDNLTKAERGGLSELDKAGFIKRQLVETRQITKHVAQILDSRMNTKYDENDKLIREVKVITLKSKLVSDFRKDFQFYKVREINNYHHAHDAYLNAVVGTALIKKYPKLESEFVYGDYKVYDVRKMIAKSEQEIGKATAKYFFYSNIMNFFKTEITLANGEIRKRPLIETNGETGEIVWDKGRDFATVRKVLSMPQVNIVKKTEVQTGGFSKESILPKRNSDKLIARKKDWDPKKYGGFDSPTVAYSVLVVAKVEKGKSKKLKSVKELLGITIMERSSFEKNPIDFLEAKGYKEVKKDLIIKLPKYSLFELENGRKRMLASAGELQKGNELALPSKYVNFLYLASHYEKLKGSPEDNEQKQLFVEQHKHYLDEIIEQISEFSKRVILADANLDKVLSAYNKHRDKPIREQAENIIHLFTLTNLGAPAAFKYFDTTIDRKRYTSTKEVLDATLIHQSITGLYETRIDLSQLGGDGGPAPAPAPGGTLNIEDEYRLHETSKGPDVPLGSTWLSDFPQAWAETGGMGLAVRQAPLIIPLKATSTPVSIKQYPMSQEARLGIKPHIQRLLDQGILVPCQSPWNTPLLPVKKPGTNDYRPVQDLREVNKRVEDIHPTVPNPYNLLSGLPPSHQWYTVLDLKDAFFCLRLHPTSQSLFAFEWRDPEMGISGQLTWTRLPQGFKNSPTLFNEALHRDLADFRIQHPDLILLQYVDDLLLAATSELDCQQGTRALLQTLGDLGYRASAKKAQICQKQVKYLGYLLKEGQRWLTEARKETVMGQPTPKTPRQLREFLGTAGFCRLWIPGFAEMAAPLYPLTKPGTLFEWGPDQQKAYQEIKQALLTAPALGLPDLTKPFELFVDEKQGYAKGVLTQKLGPWRRPVAYLSKKLDPVAAGWPPCLRMVAAIAVLTKDAGKLTMGQPLVILAPHAVEALVKQPPDRWLSNARMTHYQALLLDTDRVQFGPIVALNPATLLPLPEEGLQHDCLDILAEAHGTRPDLTDQPLPDADHTWYTDGSSFLQEGQRKAGAAVTTETEVVWAKALPAGTSAQRAELIALTQALKMAEGKKLNVYTDSRYAFATAHIHGEIYRRRGWLTSEGKEIKNKDEILALLKALFLPKRLSIIHCPGHQKGNRAEARGNRMADQAAREVATRETPETSTLLAGKRTADGSEFEKRTADGSEFESPKKKAKVE

SEQ ID NO: 6503 - protein, 2092 aa, synthetic construct
MPAAKRVKLDGGDKKYSIGLDIGTNSVGWAVITDEYKVPSKKFKVLGNTDRHSIKKNLIGALLFDSGETAEATRLKRTARRRYTRRKNRICYLQEIFSNEMAKVDDSFFHRLEESFLVEEDKKHERHPIFGNIVDEVAYHEKYPTIYHLRKKLVDSTDKADLRLIYLALAHMIKFRGHFLIEGDLNPDNSDVDKLFIQLVQTYNQLFEENPINASGVDAKAILSARLSKSRRLENLIAQLPGEKKNGLFGNLIALSLGLTPNFKSNFDLAEDAKLQLSKDTYDDDLDNLLAQIGDQYADLFLAAKNLSDAILLSDILRVNTEITKAPLSASMIKRYDEHHQDLTLLKALVRQQLPEKYKEIFFDQSKNGYAGYIDGGASQEEFYKFIKPILEKMDGTEELLVKLNREDLLRKQRTFDNGSIPHQIHLGELHAILRRQEDFYPFLKDNREKIEKILTFRIPYYVGPLARGNSRFAWMTRKSEETITPWNFEEVVDKGASAQSFIERMTNFDKNLPNEKVLPKHSLLYEYFTVYNELTKVKYVTEGMRKPAFLSGEQKKAIVDLLFKTNRKVTVKQLKEDYFKKIECFDSVEISGVEDRFNASLGTYHDLLKIIKDKDFLDNEENEDILEDIVLTLTLFEDREMIEERLKTYAHLFDDKVMKQLKRRRYTGWGRLSRKLINGIRDKQSGKTILDFLKSDGFANRNFMQLIHDDSLTFKEDIQKAQVSGQGDSLHEHIANLAGSPAIKKGILQTVKVVDELVKVMGRHKPENIVIEMARENQTTQKGQKNSRERMKRIEEGIKELGSQILKEHPVENTQLQNEKLYLYYLQNGRDMYVDQELDINRLSDYDVDHIVPQSFLKDDSIDNKVLTRSDKARGKSDNVPSEEVVKKMKNYWRQLLNAKLITQRKFDNLTKAERGGLSELDKAGFIKRQLVETRQITKHVAQILDSRMNTKYDENDKLIREVKVITLKSKLVSDFRKDFQFYKVREINNYHHAHDAYLNAVVGTALIKKYPKLESEFVYGDYKVYDVRKMIAKSEQEIGKATAKYFFYSNIMNFFKTEITLANGEIRKRPLIETNGETGEIVWDKGRDFATVRKVLSMPQVNIVKKTEVQTGGFSKESILPKRNSDKLIARKKDWDPKKYGGFDSPTVAYSVLVVAKVEKGKSKKLKSVKELLGITIMERSSFEKNPIDFLEAKGYKEVKKDLIIKLPKYSLFELENGRKRMLASAGELQKGNELALPSKYVNFLYLASHYEKLKGSPEDNEQKQLFVEQHKHYLDEIIEQISEFSKRVILADANLDKVLSAYNKHRDKPIREQAENIIHLFTLTNLGAPAAFKYFDTTIDRKRYTSTKEVLDATLIHQSITGLYETRIDLSQLGGDGGPAPAPAPGGTLNIEDEYRLHETSKGPDVPLGSTWLSDFPQAWAETGGMGLAVRQAPLIIPLKATSTPVSIKQYPMSQEARLGIKPHIQRLLDQGILVPCQSPWNTPLLPVKKPGTNDYRPVQDLREVNKRVEDIHPTVPNPYNLLSGLPPSHQWYTVLDLKDAFFCLRLHPTSQSLFAFEWRDPEMGISGQLTWTRLPQGFKNSPTLFNEALHRDLADFRIQHPDLILLQYVDDLLLAATSELDCQQGTRALLQTLGDLGYRASAKKAQICQKQVKYLGYLLKEGQRWLTEARKETVMGQPTPKTPRQLREFLGKAGFCRLFIPGFAEMAAPLYPLTKPGTLFEWGPDQQKAYQEIKQALLTAPALGLPDLTKPFELFVDEKQGYAKGVLTQKLGPWRRPVAYLSKKLDPVAAGWPPCLRMVAAIAVLTKDAGKLTMGQPLVILAPHAVEALVKQPPDRWLSNARMTHYQALLLDTDRVQFGPIVALNPATLLPLPEEGLQHDCLDILAEAHGTRPDLTDQPLPDADHTWYTDGSSFLQEGQRKAGAAVTTETEVVWAKALPAGTSAQRAELIALTQALKMAEGKKLNVYTDSRYAFATAHIHGEIYRRRGWLTSEGKEIKNKDEILALLKALFLPKRLSIIHCPGHQKGNRAEARGNRMADQAAREVATRETPETSTLLAGKRTADGSEFEKRTADGSEFESPKKKAKVE

SEQ ID NO: 6504 - protein, 2112 aa, synthetic construct; identical to SEQ ID NO: 4508

SEQ ID NO: 6505 - protein, 2112 aa, synthetic construct; identical to SEQ ID NO: 4508

SEQ ID NO: 6506 - protein, 2092 aa, synthetic construct
MPAAKRVKLDGGDKKYSIGLDIGTNSVGWAVITDEYKVPSKKFKVLGNTDRHSIKKNLIGALLFDSGETAEATRLKRTARRRYTRRKNRICYLQEIFSNEMAKVDDSFFHRLEESFLVEEDKKHERHPIFGNIVDEVAYHEKYPTIYHLRKKLVDSTDKADLRLIYLALAHMIKFRGHFLIEGDLNPDNSDVDKLFIQLVQTYNQLFEENPINASGVDAKAILSARLSKSRRLENLIAQLPGEKKNGLFGNLIALSLGLTPNFKSNFDLAEDAKLQLSKDTYDDDLDNLLAQIGDQYADLFLAAKNLSDAILLSDILRVNTEITKAPLSASMIKRYDEHHQDLTLLKALVRQQLPEKYKEIFFDQSKNGYAGYIDGGASQEEFYKFIKPILEKMDGTEELLVKLNREDLLRKQRTFDNGSIPHQIHLGELHAILRRQEDFYPFLKDNREKIEKILTFRIPYYVGPLARGNSRFAWMTRKSEETITPWNFEEVVDKGASAQSFIERMTNFDKNLPNEKVLPKHSLLYEYFTVYNELTKVKYVTEGMRKPAFLSGEQKKAIVDLLFKTNRKVTVKQLKEDYFKKIECFDSVEISGVEDRFNASLGTYHDLLKIIKDKDFLDNEENEDILEDIVLTLTLFEDREMIEERLKTYAHLFDDKVMKQLKRRRYTGWGRLSRKLINGIRDKQSGKTILDFLKSDGFANRNFMQLIHDDSLTFKEDIQKAQVSGQGDSLHEHIANLAGSPAIKKGILQTVKVVDELVKVMGRHKPENIVIEMARENQTTQKGQKNSRERMKRIEEGIKELGSQILKEHPVENTQLQNEKLYLYYLQNGRDMYVDQELDINRLSDYDVDHIVPQSFLKDDSIDNKVLTRSDKARGKSDNVPSEEVVKKMKNYWRQLLNAKLITQRKFDNLTKAERGGLSELDKAGFIKRQLVETRQITKHVAQILDSRMNTKYDENDKLIREVKVITLKSKLVSDFRKDFQFYKVREINNYHHAHDAYLNAVVGTALIKKYPKLESEFVYGDYKVYDVRKMIAKSEQEIGKATAKYFFYSNIMNFFKTEITLANGEIRKRPLIETNGETGEIVWDKGRDFATVRKVLSMPQVNIVKKTEVQTGGFSKESILPKRNSDKLIARKKDWDPKKYGGFDSPTVAYSVLVVAKVEKGKSKKLKSVKELLGITIMERSSFEKNPIDFLEAKGYKEVKKDLIIKLPKYSLFELENGRKRMLASAGELQKGNELALPSKYVNFLYLASHYEKLKGSPEDNEQKQLFVEQHKHYLDEIIEQISEFSKRVILADANLDKVLSAYNKHRDKPIREQAENIIHLFTLTNLGAPAAFKYFDTTIDRKRYTSTKEVLDATLIHQSITGLYETRIDLSQLGGDGGPAPAPAPGGTLNIEDEYRLHEISTEPDVSPGSTWLSDFPQAWAETGGMGLAVRQAPLIIPLKATSTPVSIKQYPMSQEAKLGIKPHIQRLLDQGILVPCQSPWNTPLLPVKKPGTNDYRPVQGLREVNKRVEDIHPTVPNPYNLLSGLPTSHRWYTVLDLKDAFFCLRLHPTSQPLFASEWRDPGMGISGQLTWTRLPQGFKNSPTLFNEALHRGLADFRIQHPDLILLQYVDDLLLAATSELDCQQGTRALLKTLGNLGYRASAKKAQICQKQVKYLGYLLREGQRWLTEARKETVMGQPTPKTPRQLREFLGTAGFCRLWIPRFAEMAAPLYPLTKPGTLFNWGPDQQKAYHEIKQALLTAPALGLPDLTKPFELFVDEKQGYAKGVLTQKLGPWRRPVAYLSKKLDPVAAGWPPCLRMVAAIAVLTKDAGKLTMGQPLVILAPHAVEALVKQPPDRWLSNARMTHYQAMLLDTDRVQFGPVVALNPATLLPLPEEGAPHDCLEILAETHGTEPDLTDQPIPDADHTWYTDGSSFLQEGQRKAGAAVTTETEVIWARALPAGTSAQRAELIALTQALKMAEGKRLNVYTDSRYAFATAHIHGEIYKRRGWLTSEGREIKNKSEILALLKALFLPKRLSIIHCLGHQKGDSAEARGNRLADQAAREAAIKTPPDTSTLLAGKRTADGSEFEKRTADGSEFESPKKKAKVE

SEQ ID NO: 6507 - protein, 2006 aa, synthetic construct
MPAAKRVKLDGGDKKYSIGLDIGTNSVGWAVITDEYKVPSKKFKVLGNTDRHSIKKNLIGALLFDSGETAEATRLKRTARRRYTRRKNRICYLQEIFSNEMAKVDDSFFHRLEESFLVEEDKKHERHPIFGNIVDEVAYHEKYPTIYHLRKKLVDSTDKADLRLIYLALAHMIKFRGHFLIEGDLNPDNSDVDKLFIQLVQTYNQLFEENPINASGVDAKAILSARLSKSRRLENLIAQLPGEKKNGLFGNLIALSLGLTPNFKSNFDLAEDAKLQLSKDTYDDDLDNLLAQIGDQYADLFLAAKNLSDAILLSDILRVNTEITKAPLSASMIKRYDEHHQDLTLLKALVRQQLPEKYKEIFFDQSKNGYAGYIDGGASQEEFYKFIKPILEKMDGTEELLVKLNREDLLRKQRTFDNGSIPHQIHLGELHAILRRQEDFYPFLKDNREKIEKILTFRIPYYVGPLARGNSRFAWMTRKSEETITPWNFEEVVDKGASAQSFIERMTNFDKNLPNEKVLPKHSLLYEYFTVYNELTKVKYVTEGMRKPAFLSGEQKKAIVDLLFKTNRKVTVKQLKEDYFKKIECFDSVEISGVEDRFNASLGTYHDLLKIIKDKDFLDNEENEDILEDIVLTLTLFEDREMIEERLKTYAHLFDDKVMKQLKRRRYTGWGRLSRKLINGIRDKQSGKTILDFLKSDGFANRNFMQLIHDDSLTFKEDIQKAQVSGQGDSLHEHIANLAGSPAIKKGILQTVKVVDELVKVMGRHKPENIVIEMARENQTTQKGQKNSRERMKRIEEGIKELGSQILKEHPVENTQLQNEKLYLYYLQNGRDMYVDQELDINRLSDYDVDHIVPQSFLKDDSIDNKVLTRSDKARGKSDNVPSEEVVKKMKNYWRQLLNAKLITQRKFDNLTKAERGGLSELDKAGFIKRQLVETRQITKHVAQILDSRMNTKYDENDKLIREVKVITLKSKLVSDFRKDFQFYKVREINNYHHAHDAYLNAVVGTALIKKYPKLESEFVYGDYKVYDVRKMIAKSEQEIGKATAKYFFYSNIMNFFKTEITLANGEIRKRPLIETNGETGEIVWDKGRDFATVRKVLSMPQVNIVKKTEVQTGGFSKESILPKRNSDKLIARKKDWDPKKYGGFDSPTVAYSVLVVAKVEKGKSKKLKSVKELLGITIMERSSFEKNPIDFLEAKGYKEVKKDLIIKLPKYSLFELENGRKRMLASAGELQKGNELALPSKYVNFLYLASHYEKLKGSPEDNEQKQLFVEQHKHYLDEIIEQISEFSKRVILADANLDKVLSAYNKHRDKPIREQAENIIHLFTLTNLGAPAAFKYFDTTIDRKRYTSTKEVLDATLIHQSITGLYETRIDLSQLGGDGGPAPAPAPGGLTAAIDILAPQQCAEPITWKSDEPVWVDQWPLTNDKLAAAQQLVQEQLEAGHITESSSPWNTPIFVIKKKSGKWRLLQDLRAVNATMVLMGALQPGLPSPVAIPQGYLKIIIDLKDCFFSIPLHPSDQKRFAFSLPSTNFKEPMQRFQWKVLPQGMANSPTLCQKYVATAIHKVRHAWKQMYIIHYMDDILIAGKDGQQVLQCFDQLKQELTAAGLHIAPEKVQLQDPYTYLGFELNGPKITNQKAVIRKDKLQTLNDFQKLLGDINWLRPYLKLTTGDLKPLFDTLKGDSDPNSHRSLSKEALASLEKVETAIAEQFVTHINYSLPLIFLIFNTALTPTGLFWQDNPIMWIHLPASPKKVLLPYYDAIADLIILGRDHSKKYFGIEPSTIIQPYSKSQIDWLMQNTEMWPIACASFVGILDNHYPPNKLIQFCKLHTFVFPQIISKTPLNNALLVFTDGSSTGMAAYTLTDTTIKFQTNLNSAQLVELQALIAVLSAFPNQPLNIYTDSAYLAHSIPLLETVAQIKHISETAKLFLQCQQLIYNRSIPFYIGHVRAHSGLPGPIAQGNQRADLATKIVASNINTAGKRTADGSEFEKRTADGSEFESPKKKAKVE

SEQ ID NO: 6508 - protein, 2086 aa, synthetic construct
MPAAKRVKLDGGDKKYSIGLDIGTNSVGWAVITDEYKVPSKKFKVLGNTDRHSIKKNLIGALLFDSGETAEATRLKRTARRRYTRRKNRICYLQEIFSNEMAKVDDSFFHRLEESFLVEEDKKHERHPIFGNIVDEVAYHEKYPTIYHLRKKLVDSTDKADLRLIYLALAHMIKFRGHFLIEGDLNPDNSDVDKLFIQLVQTYNQLFEENPINASGVDAKAILSARLSKSRRLENLIAQLPGEKKNGLFGNLIALSLGLTPNFKSNFDLAEDAKLQLSKDTYDDDLDNLLAQIGDQYADLFLAAKNLSDAILLSDILRVNTEITKAPLSASMIKRYDEHHQDLTLLKALVRQQLPEKYKEIFFDQSKNGYAGYIDGGASQEEFYKFIKPILEKMDGTEELLVKLNREDLLRKQRTFDNGSIPHQIHLGELHAILRRQEDFYPFLKDNREKIEKILTFRIPYYVGPLARGNSRFAWMTRKSEETITPWNFEEVVDKGASAQSFIERMTNFDKNLPNEKVLPKHSLLYEYFTVYNELTKVKYVTEGMRKPAFLSGEQKKAIVDLLFKTNRKVTVKQLKEDYFKKIECFDSVEISGVEDRFNASLGTYHDLLKIIKDKDFLDNEENEDILEDIVLTLTLFEDREMIEERLKTYAHLFDDKVMKQLKRRRYTGWGRLSRKLINGIRDKQSGKTILDFLKSDGFANRNFMQLIHDDSLTFKEDIQKAQVSGQGDSLHEHIANLAGSPAIKKGILQTVKVVDELVKVMGRHKPENIVIEMARENQTTQKGQKNSRERMKRIEEGIKELGSQILKEHPVENTQLQNEKLYLYYLQNGRDMYVDQELDINRLSDYDVDHIVPQSFLKDDSIDNKVLTRSDKARGKSDNVPSEEVVKKMKNYWRQLLNAKLITQRKFDNLTKAERGGLSELDKAGFIKRQLVETRQITKHVAQILDSRMNTKYDENDKLIREVKVITLKSKLVSDFRKDFQFYKVREINNYHHAHDAYLNAVVGTALIKKYPKLESEFVYGDYKVYDVRKMIAKSEQEIGKATAKYFFYSNIMNFFKTEITLANGEIRKRPLIETNGETGEIVWDKGRDFATVRKVLSMPQVNIVKKTEVQTGGFSKESILPKRNSDKLIARKKDWDPKKYGGFDSPTVAYSVLVVAKVEKGKSKKLKSVKELLGITIMERSSFEKNPIDFLEAKGYKEVKKDLIIKLPKYSLFELENGRKRMLASAGELQKGNELALPSKYVNFLYLASHYEKLKGSPEDNEQKQLFVEQHKHYLDEIIEQISEFSKRVILADANLDKVLSAYNKHRDKPIREQAENIIHLFTLTNLGAPAAFKYFDTTIDRKRYTSTKEVLDATLIHQSITGLYETRIDLSQLGGDGGPAPAPAPGGTLQLDDEYRLYSPLVKPDQNIQFWLEQFPQAWAETAGMGLAKQVPPQVIQLKASATPVSVRQYPLSKEAQEGIRPHVQRLIQQGILVPVQSPWNTPLLPVRKPGTNDYRPVQDLREVNKRVQDIHPTVPNPYNLLCALPPQRSWYTVLDLKDAFFCLRLHPTSQPLFAFEWRDPGTGRTGQLTWTRLPQGFKNSPTIFNEALHRDLANFRIQHPQVTLLQYVDDLLLAGATKQDCLEGTKALLLELSDLGYRASAKKAQICRREVTYLGYSLRDGQRWLTEARKKTVVQIPAPTTAKQVREFLGTAGFCRLWIPGFATLAAPLYPLTKPKGEFSWAPEHQKAFDAIKKALLSAPALALPDVTKPFTLYVDERKGVARGVLTQTLGPWRRPVAYLSKKLDPVASGWPVCLKAIAAVAILVKDADKLTLGQNITVIAPHALENIVRQPPDRWMTNARMTHYQSLLLTERVTFAPPAALNPATLLPEETDEPVTHDCHQLLIEETGVRKDLTDIPLTGEVLTWFTDGSSYVVEGKRMAGAAVVDGTRTIWASSLPEGTSAQKAELMALTQALRLAEGKSINIYTDSRYAFATAHVHGAIYKQRGWLTSAGREIKNKEEILSLLEALHLPKRLAIIHCPGHQKAKDPISRGNQMADRVAKQAAQGVNLLAGKRTADGSEFEKRTADGSEFESPKKKAKVE

SEQ ID NO: 6509 - protein, 2086 aa, synthetic construct; identical to SEQ ID NO: 6508

SEQ ID NO: 6510 - protein, 2083 aa, synthetic construct
MPAAKRVKLDGGDKKYSIGLDIGTNSVGWAVITDEYKVPSKKFKVLGNTDRHSIKKNLIGALLFDSGETAEATRLKRTARRRYTRRKNRICYLQEIFSNEMAKVDDSFFHRLEESFLVEEDKKHERHPIFGNIVDEVAYHEKYPTIYHLRKKLVDSTDKADLRLIYLALAHMIKFRGHFLIEGDLNPDNSDVDKLFIQLVQTYNQLFEENPINASGVDAKAILSARLSKSRRLENLIAQLPGEKKNGLFGNLIALSLGLTPNFKSNFDLAEDAKLQLSKDTYDDDLDNLLAQIGDQYADLFLAAKNLSDAILLSDILRVNTEITKAPLSASMIKRYDEHHQDLTLLKALVRQQLPEKYKEIFFDQSKNGYAGYIDGGASQEEFYKFIKPILEKMDGTEELLVKLNREDLLRKQRTFDNGSIPHQIHLGELHAILRRQEDFYPFLKDNREKIEKILTFRIPYYVGPLARGNSRFAWMTRKSEETITPWNFEEVVDKGASAQSFIERMTNFDKNLPNEKVLPKHSLLYEYFTVYNELTKVKYVTEGMRKPAFLSGEQKKAIVDLLFKTNRKVTVKQLKEDYFKKIECFDSVEISGVEDRFNASLGTYHDLLKIIKDKDFLDNEENEDILEDIVLTLTLFEDREMIEERLKTYAHLFDDKVMKQLKRRRYTGWGRLSRKLINGIRDKQSGKTILDFLKSDGFANRNFMQLIHDDSLTFKEDIQKAQVSGQGDSLHEHIANLAGSPAIKKGILQTVKVVDELVKVMGRHKPENIVIEMARENQTTQKGQKNSRERMKRIEEGIKELGSQILKEHPVENTQLQNEKLYLYYLQNGRDMYVDQELDINRLSDYDVDHIVPQSFLKDDSIDNKVLTRSDKARGKSDNVPSEEVVKKMKNYWRQLLNAKLITQRKFDNLTKAERGGLSELDKAGFIKRQLVETRQITKHVAQILDSRMNTKYDENDKLIREVKVITLKSKLVSDFRKDFQFYKVREINNYHHAHDAYLNAVVGTALIKKYPKLESEFVYGDYKVYDVRKMIAKSEQEIGKATAKYFFYSNIMNFFKTEITLANGEIRKRPLIETNGETGEIVWDKGRDFATVRKVLSMPQVNIVKKTEVQTGGFSKESILPKRNSDKLIARKKDWDPKKYGGFDSPTVAYSVLVVAKVEKGKSKKLKSVKELLGITIMERSSFEKNPIDFLEAKGYKEVKKDLIIKLPKYSLFELENGRKRMLASAGELQKGNELALPSKYVNFLYLASHYEKLKGSPEDNEQKQLFVEQHKHYLDEIIEQISEFSKRVILADANLDKVLSAYNKHRDKPIREQAENIIHLFTLTNLGAPAAFKYFDTTIDRKRYTSTKEVLDATLIHQSITGLYETRIDLSQLGGDGGPAPAPAPGGVPWLMKKPLQLTVLVPLHEYQERLLQQTALPKEQKELLQKLFLKYDALWQHWENQVGHRRIKPHNIATGTLAPRPQKQYPINPKAKPSIQIVIDDLLKQGVLIQQNSTMNTPVYPVPKPDGKWRMVLDYREVNKTIPLIAAQNQHSAGILSSIYRGKYKTTLDLTNGFWAHPITPESYWLTAFTWQGKQYCWTRLPQGFLNSPALFNADVVDLLKEIPNVQAYVDDIYISHDDPQEHLEQLEKIFSILLNAGYVVSLKKSEIAQREVEFLGFNITKEGRGLTDTFKQKLLNITPPKDLKQLQSILGLLNFARNFIPNYSELVKPLYTIVAPANGKFISWTEDNSNQLQHIISVLNQADNLEERNPETRLIIKVNSSPSAGYIRYYNEGSKRPIMYVNYIFSKAEAKFTQTEKLLTTMHKGLIKAMDLAMGQEILVYSPIVSMTKIQRTPLPERKALPVRWITWMTYLEDPRIQFHYDKSLPELQQIPNVTEDVIAKTKHPSEFAMVFYTDGSAIKHPDVNKSHSAGMGIAQVQFIPEYKIVHQWSIPLGDHTAQLAEIAAVEFACKKALKISGPVLIVTDSFYVAESANKELPYWKSNGFLNNKKKPLRHVSKWKSIAECLQLKPDIIIMHEKGHQQPMTTLHTEGNNLADKLATQGSYVVHAGKRTADGSEFEKRTADGSEFESPKKKAKVE

SEQ ID NO: 6511 - protein, 2172 aa, synthetic construct
MPAAKRVKLDGGDKKYSIGLDIGTNSVGWAVITDEYKVPSKKFKVLGNTDRHSIKKNLIGALLFDSGETAEATRLKRTARRRYTRRKNRICYLQEIFSNEMAKVDDSFFHRLEESFLVEEDKKHERHPIFGNIVDEVAYHEKYPTIYHLRKKLVDSTDKADLRLIYLALAHMIKFRGHFLIEGDLNPDNSDVDKLFIQLVQTYNQLFEENPINASGVDAKAILSARLSKSRRLENLIAQLPGEKKNGLFGNLIALSLGLTPNFKSNFDLAEDAKLQLSKDTYDDDLDNLLAQIGDQYADLFLAAKNLSDAILLSDILRVNTEITKAPLSASMIKRYDEHHQDLTLLKALVRQQLPEKYKEIFFDQSKNGYAGYIDGGASQEEFYKFIKPILEKMDGTEELLVKLNREDLLRKQRTFDNGSIPHQIHLGELHAILRRQEDFYPFLKDNREKIEKILTFRIPYYVGPLARGNSRFAWMTRKSEETITPWNFEEVVDKGASAQSFIERMTNFDKNLPNEKVLPKHSLLYEYFTVYNELTKVKYVTEGMRKPAFLSGEQKKAIVDLLFKTNRKVTVKQLKEDYFKKIECFDSVEISGVEDRFNASLGTYHDLLKIIKDKDFLDNEENEDILEDIVLTLTLFEDREMIEERLKTYAHLFDDKVMKQLKRRRYTGWGRLSRKLINGIRDKQSGKTILDFLKSDGFANRNFMQLIHDDSLTFKEDIQKAQVSGQGDSLHEHIANLAGSPAIKKGILQTVKVVDELVKVMGRHKPENIVIEMARENQTTQKGQKNSRERMKRIEEGIKELGSQILKEHPVENTQLQNEKLYLYYLQNGRDMYVDQELDINRLSDYDVDHIVPQSFLKDDSIDNKVLTRSDKARGKSDNVPSEEVVKKMKNYWRQLLNAKLITQRKFDNLTKAERGGLSELDKAGFIKRQLVETRQITKHVAQILDSRMNTKYDENDKLIREVKVITLKSKLVSDFRKDFQFYKVREINNYHHAHDAYLNAVVGTALIKKYPKLESEFVYGDYKVYDVRKMIAKSEQEIGKATAKYFFYSNIMNFFKTEITLANGEIRKRPLIETNGETGEIVWDKGRDFATVRKVLSMPQVNIVKKTEVQTGGFSKESILPKRNSDKLIARKKDWDPKKYGGFDSPTVAYSVLVVAKVEKGKSKKLKSVKELLGITIMERSSFEKNPIDFLEAKGYKEVKKDLIIKLPKYSLFELENGRKRMLASAGELQKGNELALPSKYVNFLYLASHYEKLKGSPEDNEQKQLFVEQHKHYLDEIIEQISEFSKRVILADANLDKVLSAYNKHRDKPIREQAENIIHLFTLTNLGAPAAFKYFDTTIDRKRYTSTKEVLDATLIHQSITGLYETRIDLSQLGGDGGPAPAPAPGGMDPLQLLQPLEAEIKGTKLKAHWNSGATITCVPQAFLEEEVPIKNIWIKTIHGEKEQPVYYLTFKIQGRKVEAEVISSPYDYILVSPSDIPWLMKKPLQLTTLVPLQEYEERLLKQTMLTGSYKEKLQSLFLKYDALWQHWENQVGHRRIKPHHIATGTVNPRPQKQYPINPKAKASIQTVINDLLKQGVLIQQNSIMNTPVYPVPKPDGKWRMVLDYREVNKTIPLIAAQNQHSAGILSSIFRGKYKTTLDLSNGFWAHSITPESYWLTAFTWLGQQYCWTRLPQGFLNSPALFNADVVDLLKEVPNVQVYVDDIYISHDDPREHLEQLEKVFSLLLNAGYVVSLKKSEIAQHEVEFLGFNITKEGRGLTETFKQKLLNITPPRDLKQLQSILGKLNFARNFIPNFSELVKPLYNIIATAPGKYITWTTDNSQQLQNIISMLNSAENLEERNPEVRLIMKVNTSPSAGYIRFYNEFAKRPIMYLNYVYTKAEVKFTNTEKLLTTIHKGLIKALDLGMGQEILVYSPIVSMTKIQKTPLPERKALPIRWITWMSYLEDPRIQFHYDKTLPELQQVPTVTDDIIAKIKHPSEFSMVFYTDGSAIKHPNVNKSHNAGMGIAQVQFKPEFTVINTWSIPLGDHTAQLAEVAAVEFACKKALKIDGPVLIVTDSFYVAESVNKELPYWQSNGFFNNKKKPLKHVSKWKSIADCIQLKPDIIIIHEKGHQPTASTFHTEGNNLADKLATQGSYVVNAGKRTADGSEFEKRTADGSEFESPKKKAKVE

SEQ ID NO: 6512 - protein, 2092 aa, synthetic construct
MPAAKRVKLDGGDKKYSIGLDIGTNSVGWAVITDEYKVPSKKFKVLGNTDRHSIKKNLIGALLFDSGETAEATRLKRTARRRYTRRKNRICYLQEIFSNEMAKVDDSFFHRLEESFLVEEDKKHERHPIFGNIVDEVAYHEKYPTIYHLRKKLVDSTDKADLRLIYLALAHMIKFRGHFLIEGDLNPDNSDVDKLFIQLVQTYNQLFEENPINASGVDAKAILSARLSKSRRLENLIAQLPGEKKNGLFGNLIALSLGLTPNFKSNFDLAEDAKLQLSKDTYDDDLDNLLAQIGDQYADLFLAAKNLSDAILLSDILRVNTEITKAPLSASMIKRYDEHHQDLTLLKALVRQQLPEKYKEIFFDQSKNGYAGYIDGGASQEEFYKFIKPILEKMDGTEELLVKLNREDLLRKQRTFDNGSIPHQIHLGELHAILRRQEDFYPFLKDNREKIEKILTFRIPYYVGPLARGNSRFAWMTRKSEETITPWNFEEVVDKGASAQSFIERMTNFDKNLPNEKVLPKHSLLYEYFTVYNELTKVKYVTEGMRKPAFLSGEQKKAIVDLLFKTNRKVTVKQLKEDYFKKIECFDSVEISGVEDRFNASLGTYHDLLKIIKDKDFLDNEENEDILEDIVLTLTLFEDREMIEERLKTYAHLFDDKVMKQLKRRRYTGWGRLSRKLINGIRDKQSGKTILDFLKSDGFANRNFMQLIHDDSLTFKEDIQKAQVSGQGDSLHEHIANLAGSPAIKKGILQTVKVVDELVKVMGRHKPENIVIEMARENQTTQKGQKNSRERMKRIEEGIKELGSQILKEHPVENTQLQNEKLYLYYLQNGRDMYVDQELDINRLSDYDVDHIVPQSFLKDDSIDNKVLTRSDKARGKSDNVPSEEVVKKMKNYWRQLLNAKLITQRKFDNLTKAERGGLSELDKAGFIKRQLVETRQITKHVAQILDSRMNTKYDENDKLIREVKVITLKSKLVSDFRKDFQFYKVREINNYHHAHDAYLNAVVGTALIKKYPKLESEFVYGDYKVYDVRKMIAKSEQEIGKATAKYFFYSNIMNFFKTEITLANGEIRKRPLIETNGETGEIVWDKGRDFATVRKVLSMPQVNIVKKTEVQTGGFSKESILPKRNSDKLIARKKDWDPKKYGGFDSPTVAYSVLVVAKVEKGKSKKLKSVKELLGITIMERSSFEKNPIDFLEAKGYKEVKKDLIIKLPKYSLFELENGRKRMLASAGELQKGNELALPSKYVNFLYLASHYEKLKGSPEDNEQKQLFVEQHKHYLDEIIEQISEFSKRVILADANLDKVLSAYNKHRDKPIREQAENIIHLFTLTNLGAPAAFKYFDTTIDRKRYTSTKEVLDATLIHQSITGLYETRIDLSQLGGDGGPAPAPAPGGTLNIEDEYRLHETSKEPDVPLGSTWLSDFPQAWAETGGMGLAVRQAPLIIPLKATSTPVSIKQYPMSQEARLGIKPHIQRLLDQGILVPCQSPWNTPLLPVKKPGTNDYRPVQDLREVNKRVEDIHPTVPNPYNLLSGLPPSHQWYTVLDLKDAFFCLRLHPTSQPLFAFEWRDPEMGISGQLTWTRLPQGFKNSPTLFNEALHRDLADFRIQHPDLILLQYVDDLLLAATSEQDCQRGTRALLQTLGNLGYRASAKKAQICQKQVKYLGYLLKEGQRWLTEARKETVMGQPTPKTPRQLREFLGKAGFCRLFIPGFAEMAAPLYPLTKPGTLFNWGPDQQKAYQEIKQALLTAPALGLPDLTKPFELFVDEKQGYAKGVLTQKLGPWRRPVAYLSKKLDPVAAGWPPCLRMVAAIAVLTKDAGKLTMGQPLVILAPHAVEALVKQPPDRWLSNARMTHYQAMLLDTDRVQFGPVVALNPATLLPLPEKEAPHDCLEILAETHGTRPDLTDQPIPDADYTWYTDGSSFLQEGQRRAGAAVTTETEVIWARALPAGTSAQRAELIALTQALKMAEGKKLNVYTDSRYAFATAHVHGEIYRRRGWLTSEGREIKNKNEILALLKALFLPKRLSIIHCPGHQKGNSAEARGNRMADQAAREAAMKAVLETSTLLAGKRTADGSEFEKRTADGSEFESPKKKAKVE

SEQ ID NO: 6513 - protein, 2096 aa, synthetic construct
MPAAKRVKLDGGDKKYSIGLDIGTNSVGWAVITDEYKVPSKKFKVLGNTDRHSIKKNLIGALLFDSGETAEATRLKRTARRRYTRRKNRICYLQEIFSNEMAKVDDSFFHRLEESFLVEEDKKHERHPIFGNIVDEVAYHEKYPTIYHLRKKLVDSTDKADLRLIYLALAHMIKFRGHFLIEGDLNPDNSDVDKLFIQLVQTYNQLFEENPINASGVDAKAILSARLSKSRRLENLIAQLPGEKKNGLFGNLIALSLGLTPNFKSNFDLAEDAKLQLSKDTYDDDLDNLLAQIGDQYADLFLAAKNLSDAILLSDILRVNTEITKAPLSASMIKRYDEHHQDLTLLKALVRQQLPEKYKEIFFDQSKNGYAGYIDGGASQEEFYKFIKPILEKMDGTEELLVKLNREDLLRKQRTFDNGSIPHQIHLGELHAILRRQEDFYPFLKDNREKIEKILTFRIPYYVGPLARGNSRFAWMTRKSEETITPWNFEEVVDKGASAQSFIERMTNFDKNLPNEKVLPKHSLLYEYFTVYNELTKVKYVTEGMRKPAFLSGEQKKAIVDLLFKTNRKVTVKQLKEDYFKKIECFDSVEISGVEDRFNASLGTYHDLLKIIKDKDFLDNEENEDILEDIVLTLTLFEDREMIEERLKTYAHLFDDKVMKQLKRRRYTGWGRLSRKLINGIRDKQSGKTILDFLKSDGFANRNFMQLIHDDSLTFKEDIQKAQVSGQGDSLHEHIANLAGSPAIKKGILQTVKVVDELVKVMGRHKPENIVIEMARENQTTQKGQKNSRERMKRIEEGIKELGSQILKEHPVENTQLQNEKLYLYYLQNGRDMYVDQELDINRLSDYDVDHIVPQSFLKDDSIDNKVLTRSDKARGKSDNVPSEEVVKKMKNYWRQLLNAKLITQRKFDNLTKAERGGLSELDKAGFIKRQLVETRQITKHVAQILDSRMNTKYDENDKLIREVKVITLKSKLVSDFRKDFQFYKVREINNYHHAHDAYLNAVVGTALIKKYPKLESEFVYGDYKVYDVRKMIAKSEQEIGKATAKYFFYSNIMNFFKTEITLANGEIRKRPLIETNGETGEIVWDKGRDFATVRKVLSMPQVNIVKKTEVQTGGFSKESILPKRNSDKLIARKKDWDPKKYGGFDSPTVAYSVLVVAKVEKGKSKKLKSVKELLGITIMERSSFEKNPIDFLEAKGYKEVKKDLIIKLPKYSLFELENGRKRMLASAGELQKGNELALPSKYVNFLYLASHYEKLKGSPEDNEQKQLFVEQHKHYLDEIIEQISEFSKRVILADANLDKVLSAYNKHRDKPIREQAENIIHLFTLTNLGAPAAFKYFDTTIDRKRYTSTKEVLDATLIHQSITGLYETRIDLSQLGGDGGPAPAPAPAPGGTAPLEEEYRLFLEAPIQNVTLLEQWKREIPKVWAEINPPGLASTQAPIHVQLLSTALPVRVRQYPITLEAKRSLRETIRKFRAAGILRPVHSPWNTPLLPVRKSGTSEYRMVQDLREVNKRVETIHPTVPNPYTLLSLLPPDRIWYSVLDLKDAFFCIPLAPESQLIFAFEWADAEEGESGQLTWTRLPQGFKNSPTLFDEALNRDLQGFRLDHPSVSLLQYVDDLLIAADTQAACLSATRDLLMTLAELGYRVSGKKAQLCQEEVTYLGFKIHKGSRSLSNSRTQAILQIPVPKTKRQVREFLGTIGYCRLWIPGFAELAQPLYAATRGGNDPLVWGEKEEEAFQSLKLALTQPPALALPSLDKPFQLFVEETSGAAKGVLTQALGPWKRPVAYLSKRLDPVAAGWPRCLRAIAAAALLTREASKLTFGQDIEITSSHNLESLLRSPPDKWLTNARITQYQVLLLDPPRVRFKQTAALNPATLLPETDDTLPIHHCLDTLDSLTSTRPDLTDQPLAQAEATLFTDGSSYIRDGKRYAGAAVVTLDSVIWAEPLPIGTSAQKAELIALTKALEWSKDKSVNIYTDSRYAFATLHVHGMIYRERGLLTAGGKAIKNAPEILALLTAVWLPKRVAVMHCKGHQKDDAPTSTGNRRADEVAREVAIRPLSTQATISAGKRTADGSEFEKRTADGSEFESPKKKAKVE

SEQ ID NO: 6514 - protein, 2096 aa, synthetic construct
MPAAKRVKLDGGDKKYSIGLDIGTNSVGWAVITDEYKVPSKKFKVLGNTDRHSIKKNLIGALLFDSGETAEATRLKRTARRRYTRRKNRICYLQEIFSNEMAKVDDSFFHRLEESFLVEEDKKHERHPIFGNIVDEVAYHEKYPTIYHLRKKLVDSTDKADLRLIYLALAHMIKFRGHFLIEGDLNPDNSDVDKLFIQLVQTYNQLFEENPINASGVDAKAILSARLSKSRRLENLIAQLPGEKKNGLFGNLIALSLGLTPNFKSNFDLAEDAKLQLSKDTYDDDLDNLLAQIGDQYADLFLAAKNLSDAILLSDILRVNTEITKAPLSASMIKRYDEHHQDLTLLKALVRQQLPEKYKEIFFDQSKNGYAGYIDGGASQEEFYKFIKPILEKMDGTEELLVKLNREDLLRKQRTFDNGSIPHQIHLGELHAILRRQEDFYPFLKDNREKIEKILTFRIPYYVGPLARGNSRFAWMTRKSEETITPWNFEEVVDKGASAQSFIERMTNFDKNLPNEKVLPKHSLLYEYFTVYNELTKVKYVTEGMRKPAFLSGEQKKAIVDLLFKTNRKVTVKQLKEDYFKKIECFDSVEISGVEDRFNASLGTYHDLLKIIKDKDFLDNEENEDILEDIVLTLTLFEDREMIEERLKTYAHLFDDKVMKQLKRRRYTGWGRLSRKLINGIRDKQSGKTILDFLKSDGFANRNFMQLIHDDSLTFKEDIQKAQVSGQGDSLHEHIANLAGSPAIKKGILQTVKVVDELVKVMGRHKPENIVIEMARENQTTQKGQKNSRERMKRIEEGIKELGSQILKEHPVENTQLQNEKLYLYYLQNGRDMYVDQELDINRLSDYDVDHIVPQSFLKDDSIDNKVLTRSDKARGKSDNVPSEEVVKKMKNYWRQLLNAKLITQRKFDNLTKAERGGLSELDKAGFIKRQLVETRQITKHVAQILDSRMNTKYDENDKLIREVKVITLKSKLVSDFRKDFQFYKVREINNYHHAHDAYLNAVVGTALIKKYPKLESEFVYGDYKVYDVRKMIAKSEQEIGKATAKYFFYSNIMNFFKTEITLANGEIRKRPLIETNGETGEIVWDKGRDFATVRKVLSMPQVNIVKKTEVQTGGFSKESILPKRNSDKLIARKKDWDPKKYGGFDSPTVAYSVLVVAKVEKGKSKKLKSVKELLGITIMERSSFEKNPIDFLEAKGYKEVKKDLIIKLPKYSLFELENGRKRMLASAGELQKGNELALPSKYVNFLYLASHYEKLKGSPEDNEQKQLFVEQHKHYLDEIIEQISEFSKRVILADANLDKVLSAYNKHRDKPIREQAENIIHLFTLTNLGAPAAFKYFDTTIDRKRYTSTKEVLDATLIHQSITGLYETRIDLSQLGGDGGPAPAPAPAPGGTAPLEEEYRLFLEAPIQNVTLLEQWKREIPKVWAEINPPGLASTQAPIHVQLLSTALPVRVRQYPITLEAKRSLRETIRKFRAAGILRPVHSPWNTPLLPVRKSGTSEYRMVQDLREVNKRVETIHPTVPNPYTLLSLLPPDRIWYSVLDLKDAFFCIPLAPESQLIFAFEWADAEEGESGQLTWTRLPQGFKNSPTLFNEALNRDLQGFRLDHPSVSLLQYVDDLLIAADTQAACLSATRDLLMTLAELGYRVSGKKAQLCQEEVTYLGFKIHKGSRSLSNSRTQAILQIPVPKTKRQVREFLGTIGYCRLWIPGFAELAQPLYAATRPGNDPLVWGEKEEEAFQSLKLALTQPPALALPSLDKPFQLFVEETSGAAKGVLTQALGPWKRPVAYLSKRLDPVAAGWPRCLRAIAAAALLTREASKLTFGQDIEITSSHNLESLLRSPPDKWLTNARITQYQVLLLDPPRVRFKQTAALNPATLLPETDDTLPIHHCLDTLDSLTSTRPDLTDQPLAQAEATLFTDGSSYIRDGKRYAGAAVVTLDSVIWAEPLPIGTSAQKAELIALTKALEWSKDKSVNIYTDSRYAFATLHVHGMIYRERGWLTAGGKAIKNAPEILALLTAVWLPKRVAVMHCKGHQKDDAPTSTGNRRADEVAREVAIRPLSTQATISAGKRTADGSEFEKRTADGSEFESPKKKAKVE

SEQ ID NO: 6515 - protein, 2100 aa, synthetic construct
MPAAKRVKLDGGDKKYSIGLDIGTNSVGWAVITDEYKVPSKKFKVLGNTDRHSIKKNLIGALLFDSGETAEATRLKRTARRRYTRRKNRICYLQEIFSNEMAKVDDSFFHRLEESFLVEEDKKHERHPIFGNIVDEVAYHEKYPTIYHLRKKLVDSTDKADLRLIYLALAHMIKFRGHFLIEGDLNPDNSDVDKLFIQLVQTYNQLFEENPINASGVDAKAILSARLSKSRRLENLIAQLPGEKKNGLFGNLIALSLGLTPNFKSNFDLAEDAKLQLSKDTYDDDLDNLLAQIGDQYADLFLAAKNLSDAILLSDILRVNTEITKAPLSASMIKRYDEHHQDLTLLKALVRQQLPEKYKEIFFDQSKNGYAGYIDGGASQEEFYKFIKPILEKMDGTEELLVKLNREDLLRKQRTFDNGSIPHQIHLGELHAILRRQEDFYPFLKDNREKIEKILTFRIPYYVGPLARGNSRFAWMTRKSEETITPWNFEEVVDKGASAQSFIERMTNFDKNLPNEKVLPKHSLLYEYFTVYNELTKVKYVTEGMRKPAFLSGEQKKAIVDLLFKTNRKVTVKQLKEDYFKKIECFDSVEISGVEDRFNASLGTYHDLLKIIKDKDFLDNEENEDILEDIVLTLTLFEDREMIEERLKTYAHLFDDKVMKQLKRRRYTGWGRLSRKLINGIRDKQSGKTILDFLKSDGFANRNFMQLIHDDSLTFKEDIQKAQVSGQGDSLHEHIANLAGSPAIKKGILQTVKVVDELVKVMGRHKPENIVIEMARENQTTQKGQKNSRERMKRIEEGIKELGSQILKEHPVENTQLQNEKLYLYYLQNGRDMYVDQELDINRLSDYDVDHIVPQSFLKDDSIDNKVLTRSDKARGKSDNVPSEEVVKKMKNYWRQLLNAKLITQRKFDNLTKAERGGLSELDKAGFIKRQLVETRQITKHVAQILDSRMNTKYDENDKLIREVKVITLKSKLVSDFRKDFQFYKVREINNYHHAHDAYLNAVVGTALIKKYPKLESEFVYGDYKVYDVRKMIAKSEQEIGKATAKYFFYSNIMNFFKTEITLANGEIRKRPLIETNGETGEIVWDKGRDFATVRKVLSMPQVNIVKKTEVQTGGFSKESILPKRNSDKLIARKKDWDPKKYGGFDSPTVAYSVLVVAKVEKGKSKKLKSVKELLGITIMERSSFEKNPIDFLEAKGYKEVKKDLIIKLPKYSLFELENGRKRMLASAGELQKGNELALPSKYVNFLYLASHYEKLKGSPEDNEQKQLFVEQHKHYLDEIIEQISEFSKRVILADANLDKVLSAYNKHRDKPIREQAENIIHLFTLTNLGAPAAFKYFDTTIDRKRYTSTKEVLDATLIHQSITGLYETRIDLSQLGGDGGPAPAPAPAPGGTVSLQDEHRLFDIPVTTSLPDVWLQDFPQAWAETGGLGRAKCQAPIIIDLKPTAVPVSIKQYPMSLEAHMGIRQHIIKFLELGVLRPCRSPWNTPLLPVKKPGTQDYRPVQDLREINKRTVDIHPTVPNPYNLLSTLKPDYSWYTVLDLKDAFFCLPLAPQSQELFAFEWKDPERGISGQLTWTRLPQGFKNSPTLFNEALHRDLTDFRTQHPEVTLLQYVDDLLLAAPTKKACTQGTRHLLQELGEKGYRASAKKAQICQTKVTYLGYILSEGKRWLTPGRIETVARIPPPRNPREVREFLGTAGFCRLWIPGFAELAAPLYALTKPSTPFTWQTEHQLAFEALKKALLSAPALGLPDTSKPFTLFLDERQGIAKGVLTQKLGPWKRPVAYLSKKLDPVAAGWPPCLRIMAATAMLVKDSAKLTLGQPLTVITPHTLEAIVRQPPDRWITNARLTHYQALLLDTDRVQFGPPVTLNPATLLPVPENQPSPHDCRQVLAETHGTREDLKDQELPDADHTWYTDGSSYLDSGTRRAGAAVVDGHNTIWAQSLPPGTSAQKAELIALTKALELSKGKKANIYTDSRYAFATAHTHGSIYERRGWLTSEGKEIKNKAEIIALLKALFLPQEVAIIHCPGHQKGQDPVAVGNRQADRVARQAAMAEVLTLATEPDNTSHITAGKRTADGSEFEKRTADGSEFESPKKKAKVE

SEQ ID NO: 6516 - protein, 2085 aa, synthetic construct
MPAAKRVKLDGGDKKYSIGLDIGTNSVGWAVITDEYKVPSKKFKVLGNTDRHSIKKNLIGALLFDSGETAEATRLKRTARRRYTRRKNRICYLQEIFSNEMAKVDDSFFHRLEESFLVEEDKKHERHPIFGNIVDEVAYHEKYPTIYHLRKKLVDSTDKADLRLIYLALAHMIKFRGHFLIEGDLNPDNSDVDKLFIQLVQTYNQLFEENPINASGVDAKAILSARLSKSRRLENLIAQLPGEKKNGLFGNLIALSLGLTPNFKSNFDLAEDAKLQLSKDTYDDDLDNLLAQIGDQYADLFLAAKNLSDAILLSDILRVNTEITKAPLSASMIKRYDEHHQDLTLLKALVRQQLPEKYKEIFFDQSKNGYAGYIDGGASQEEFYKFIKPILEKMDGTEELLVKLNREDLLRKQRTFDNGSIPHQIHLGELHAILRRQEDFYPFLKDNREKIEKILTFRIPYYVGPLARGNSRFAWMTRKSEETITPWNFEEVVDKGASAQSFIERMTNFDKNLPNEKVLPKHSLLYEYFTVYNELTKVKYVTEGMRKPAFLSGEQKKAIVDLLFKTNRKVTVKQLKEDYFKKIECFDSVEISGVEDRFNASLGTYHDLLKIIKDKDFLDNEENEDILEDIVLTLTLFEDREMIEERLKTYAHLFDDKVMKQLKRRRYTGWGRLSRKLINGIRDKQSGKTILDFLKSDGFANRNFMQLIHDDSLTFKEDIQKAQVSGQGDSLHEHIANLAGSPAIKKGILQTVKVVDELVKVMGRHKPENIVIEMARENQTTQKGQKNSRERMKRIEEGIKELGSQILKEHPVENTQLQNEKLYLYYLQNGRDMYVDQELDINRLSDYDVDHIVPQSFLKDDSIDNKVLTRSDKARGKSDNVPSEEVVKKMKNYWRQLLNAKLITQRKFDNLTKAERGGLSELDKAGFIKRQLVETRQITKHVAQILDSRMNTKYDENDKLIREVKVITLKSKLVSDFRKDFQFYKVREINNYHHAHDAYLNAVVGTALIKKYPKLESEFVYGDYKVYDVRKMIAKSEQEIGKATAKYFFYSNIMNFFKTEITLANGEIRKRPLIETNGETGEIVWDKGRDFATVRKVLSMPQVNIVKKTEVQTGGFSKESILPKRNSDKLIARKKDWDPKKYGGFDSPTVAYSVLVVAKVEKGKSKKLKSVKELLGITIMERSSFEKNPIDFLEAKGYKEVKKDLIIKLPKYSLFELENGRKRMLASAGELQKGNELALPSKYVNFLYLASHYEKLKGSPEDNEQKQLFVEQHKHYLDEIIEQISEFSKRVILADANLDKVLSAYNKHRDKPIREQAENIIHLFTLTNLGAPAAFKYFDTTIDRKRYTSTKEVLDATLIHQSITGLYETRIDLSQLGGDGGPAPAPAPAPGGVPWILKKPLELTIKLDLEEQQGTLLNNSILSKKGKEELKQLFEKYSALWQSWENQVGHRRIRPHKIATGTVKPTPQKQYHINPKAKPDIQIVINDLLKQGVLIQKESTMNTPVYPVPKPNGRWRMVLDYRAVNKVTPLIAVQNQHSYGILGSLFKGRYKTTIDLSNGFWAHPIVPEDYWITAFTWQGKQYCWTVLPQGFLNSPGLFNGDVVDLLQGIPNVEVYVDDVYISHDSEKEHLEYLDILFNRLKEAGYIISLKKSNIANSIVDFLGFQITNEGRGLTDTFKEKLENITAPTTLKQLQSILGKLNFARNFIPDFTELIAPLYALIPKSPKNYVPWQIEHSTTLETLITKLNGAEYLQGRKGDKTLIMKVNASYTTGYIRYYNEGEKKPISYVSIVFSKTELKFTELEKLLTTVHKGLLKALDLSMGQNIHVYSPIVSMQNIQKTPQTAKKALASRWLSWLSYLEDPRIRFFYDPQMPALKDLPAVDTGKDNKKHPSNFQHIFYTDGSAITSPTKEGHLNAGMGIVYFINKDGNLQKQQEWSISLGNHTAQFAEIAAFEFALKKCLPLGGNILVVTDSNYVAKAYNEELDVWASNGFVNNRKKPLKHISKWKSVADLKRLRPDVVVTHEPGHQKLDSSPHAYGNNLADQLATQASFKVHAGKRTADGSEFEKRTADGSEFESPKKKAKVE

SEQ ID NO: 6517 - protein, 2093 aa, synthetic construct
MPAAKRVKLDGGDKKYSIGLDIGTNSVGWAVITDEYKVPSKKFKVLGNTDRHSIKKNLIGALLFDSGETAEATRLKRTARRRYTRRKNRICYLQEIFSNEMAKVDDSFFHRLEESFLVEEDKKHERHPIFGNIVDEVAYHEKYPTIYHLRKKLVDSTDKADLRLIYLALAHMIKFRGHFLIEGDLNPDNSDVDKLFIQLVQTYNQLFEENPINASGVDAKAILSARLSKSRRLENLIAQLPGEKKNGLFGNLIALSLGLTPNFKSNFDLAEDAKLQLSKDTYDDDLDNLLAQIGDQYADLFLAAKNLSDAILLSDILRVNTEITKAPLSASMIKRYDEHHQDLTLLKALVRQQLPEKYKEIFFDQSKNGYAGYIDGGASQEEFYKFIKPILEKMDGTEELLVKLNREDLLRKQRTFDNGSIPHQIHLGELHAILRRQEDFYPFLKDNREKIEKILTFRIPYYVGPLARGNSRFAWMTRKSEETITPWNFEEVVDKGASAQSFIERMTNFDKNLPNEKVLPKHSLLYEYFTVYNELTKVKYVTEGMRKPAFLSGEQKKAIVDLLFKTNRKVTVKQLKEDYFKKIECFDSVEISGVEDRFNASLGTYHDLLKIIKDKDFLDNEENEDILEDIVLTLTLFEDREMIEERLKTYAHLFDDKVMKQLKRRRYTGWGRLSRKLINGIRDKQSGKTILDFLKSDGFANRNFMQLIHDDSLTFKEDIQKAQVSGQGDSLHEHIANLAGSPAIKKGILQTVKVVDELVKVMGRHKPENIVIEMARENQTTQKGQKNSRERMKRIEEGIKELGSQILKEHPVENTQLQNEKLYLYYLQNGRDMYVDQELDINRLSDYDVDHIVPQSFLKDDSIDNKVLTRSDKARGKSDNVPSEEVVKKMKNYWRQLLNAKLITQRKFDNLTKAERGGLSELDKAGFIKRQLVETRQITKHVAQILDSRMNTKYDENDKLIREVKVITLKSKLVSDFRKDFQFYKVREINNYHHAHDAYLNAVVGTALIKKYPKLESEFVYGDYKVYDVRKMIAKSEQEIGKATAKYFFYSNIMNFFKTEITLANGEIRKRPLIETNGETGEIVWDKGRDFATVRKVLSMPQVNIVKKTEVQTGGFSKESILPKRNSDKLIARKKDWDPKKYGGFDSPTVAYSVLVVAKVEKGKSKKLKSVKELLGITIMERSSFEKNPIDFLEAKGYKEVKKDLIIKLPKYSLFELENGRKRMLASAGELQKGNELALPSKYVNFLYLASHYEKLKGSPEDNEQKQLFVEQHKHYLDEIIEQISEFSKRVILADANLDKVLSAYNKHRDKPIREQAENIIHLFTLTNLGAPAAFKYFDTTIDRKRYTSTKEVLDATLIHQSITGLYETRIDLSQLGGDGGPAPAPAPAPGGTLQLEEEYRLFEPESTQKQEMDIWLKNFPQAWAETGGMGTAHCQAPVLIQLKATATPISIRQYPMPHEAYQGIKPHIRRMLDQGILKPCQSPWNTPLLPVKKPGTEDYRPVQDLREVNKRVEDIHPTVPNPYNLLSTLPPSHPWYTVLDLKDAFFCLRLHSESQLLFAFEWRDPEIGLSGQLTWTRLPQGFKNSPTLFNEALHSDLADFRVRYPALVLLQYVDDLLLAAATRTECLEGTKALLETLGNKGYRASAKKAQICLQEVTYLGYSLKDGQRWLTKARKEAILSIPVPKNSRQVREFLGTAGYCRLWIPGFAELAAPLYPLTRPGTLFQWGTEQQLAFEDIKKALLSSPALGLPDITKPFELFIDENSGFAKGVLVQKLGPWKRPVAYLSKKLDTVASGWPPCLRMVAAIAILVKDAGKLTLGQPLTILTSHPVEALVRQPPNKWLSNARMTHYQAMLLDAERVHFGPTVSLNPATLLPLPSGGNHHDCLQILAETHGTRPDLTDQPLPDADLTWYTDGSSFIRNGEREAGAAVTTESEVIWAAPLPPGTSAQRAELIALTQALKMAEGKKLTVYTDSRYAFATTHVHGEIYRRRGWLTSEGKEIKNKNEILALLEALFLPKRLSIIHCPGHQKGDSPQAKGNRLADDTAKKAATETHSSLTVLPAGKRTADGSEFEKRTADGSEFESPKKKAKVE

SEQ ID NO: 6518 - protein, 2085 aa, synthetic construct
MPAAKRVKLDGGDKKYSIGLDIGTNSVGWAVITDEYKVPSKKFKVLGNTDRHSIKKNLIGALLFDSGETAEATRLKRTARRRYTRRKNRICYLQEIFSNEMAKVDDSFFHRLEESFLVEEDKKHERHPIFGNIVDEVAYHEKYPTIYHLRKKLVDSTDKADLRLIYLALAHMIKFRGHFLIEGDLNPDNSDVDKLFIQLVQTYNQLFEENPINASGVDAKAILSARLSKSRRLENLIAQLPGEKKNGLFGNLIALSLGLTPNFKSNFDLAEDAKLQLSKDTYDDDLDNLLAQIGDQYADLFLAAKNLSDAILLSDILRVNTEITKAPLSASMIKRYDEHHQDLTLLKALVRQQLPEKYKEIFFDQSKNGYAGYIDGGASQEEFYKFIKPILEKMDGTEELLVKLNREDLLRKQRTFDNGSIPHQIHLGELHAILRRQEDFYPFLKDNREKIEKILTFRIPYYVGPLARGNSRFAWMTRKSEETITPWNFEEVVDKGASAQSFIERMTNFDKNLPNEKVLPKHSLLYEYFTVYNELTKVKYVTEGMRKPAFLSGEQKKAIVDLLFKTNRKVTVKQLKEDYFKKIECFDSVEISGVEDRFNASLGTYHDLLKIIKDKDFLDNEENEDILEDIVLTLTLFEDREMIEERLKTYAHLFDDKVMKQLKRRRYTGWGRLSRKLINGIRDKQSGKTILDFLKSDGFANRNFMQLIHDDSLTFKEDIQKAQVSGQGDSLHEHIANLAGSPAIKKGILQTVKVVDELVKVMGRHKPENIVIEMARENQTTQKGQKNSRERMKRIEEGIKELGSQILKEHPVENTQLQNEKLYLYYLQNGRDMYVDQELDINRLSDYDVDHIVPQSFLKDDSIDNKVLTRSDKARGKSDNVPSEEVVKKMKNYWRQLLNAKLITQRKFDNLTKAERGGLSELDKAGFIKRQLVETRQITKHVAQILDSRMNTKYDENDKLIREVKVITLKSKLVSDFRKDFQFYKVREINNYHHAHDAYLNAVVGTALIKKYPKLESEFVYGDYKVYDVRKMIAKSEQEIGKATAKYFFYSNIMNFFKTEITLANGEIRKRPLIETNGETGEIVWDKGRDFATVRKVLSMPQVNIVKKTEVQTGGFSKESILPKRNSDKLIARKKDWDPKKYGGFDSPTVAYSVLVVAKVEKGKSKKLKSVKELLGITIMERSSFEKNPIDFLEAKGYKEVKKDLIIKLPKYSLFELENGRKRMLASAGELQKGNELALPSKYVNFLYLASHYEKLKGSPEDNEQKQLFVEQHKHYLDEIIEQISEFSKRVILADANLDKVLSAYNKHRDKPIREQAENIIHLFTLTNLGAPAAFKYFDTTIDRKRYTSTKEVLDATLIHQSITGLYETRIDLSQLGGDGGPAPAPAPAPGGVPWLTQQPLQLTILVPLQEYQEKILSKTALPEDQKQQLKTLFVKYDNLWQHWENQVGHRKIRPHNIATGDYPPRPQKQYPINPKAKPSIQIVIDDLLKQGVLTPQNSTMNTPVYPVPKPDGRWRMVLDYREVNKTIPLTAAQNQHSAGILATIVRQKYKTTLDLANGFWAHPITPESYWLTAFTWQGKQYCWTRLPQGFLNSPALFNADVVDLLKEIPNVQVYVDDIYLSHDDPKEHVQQLEKVFQILLQAGYVVSLKKSEIGQKTVEFLGFNITKEGRGLTDTFKTKLLNITPPKDLKQLQSILGKLNFARNFIPNFAELVQPLYNLIAPAKGKYIEWSEENTKQLNMVIEALNTASNLEERLPEQRLVIKVNTSPSAGYVRYYNETGKKPIMYLNYVFSKAELKFSMLEKLLTTMHKALIKAMDLAMGQEILVYSPIVSMTKIQKTPLPERKALPIRWITWMTYLEDPRIQFHYDKTLPELKHIPDVYTSSQSPVKHPSQYEGVFYTDGSAIKSPDPTKSNNAGMGIVHATYKPEYQVLNQWSIPLGNHTAQMAEIAAVEFACKKALKIPGPVLVITDSFYVAESANKELPYWKSNGFVNNKKKPLKHISKWKSIAECLSMKPDITIQHEKGISLQIPVFILKGNALADKLATQGSYVVNAGKRTADGSEFEKRTADGSEFESPKKKAKVE

SEQ ID NO: 6519 - protein, 2216 aa, synthetic construct
MPAAKRVKLDGGDKKYSIGLDIGTNSVGWAVITDEYKVPSKKFKVLGNTDRHSIKKNLIGALLFDSGETAEATRLKRTARRRYTRRKNRICYLQEIFSNEMAKVDDSFFHRLEESFLVEEDKKHERHPIFGNIVDEVAYHEKYPTIYHLRKKLVDSTDKADLRLIYLALAHMIKFRGHFLIEGDLNPDNSDVDKLFIQLVQTYNQLFEENPINASGVDAKAILSARLSKSRRLENLIAQLPGEKKNGLFGNLIALSLGLTPNFKSNFDLAEDAKLQLSKDTYDDDLDNLLAQIGDQYADLFLAAKNLSDAILLSDILRVNTEITKAPLSASMIKRYDEHHQDLTLLKALVRQQLPEKYKEIFFDQSKNGYAGYIDGGASQEEFYKFIKPILEKMDGTEELLVKLNREDLLRKQRTFDNGSIPHQIHLGELHAILRRQEDFYPFLKDNREKIEKILTFRIPYYVGPLARGNSRFAWMTRKSEETITPWNFEEVVDKGASAQSFIERMTNFDKNLPNEKVLPKHSLLYEYFTVYNELTKVKYVTEGMRKPAFLSGEQKKAIVDLLFKTNRKVTVKQLKEDYFKKIECFDSVEISGVEDRFNASLGTYHDLLKIIKDKDFLDNEENEDILEDIVLTLTLFEDREMIEERLKTYAHLFDDKVMKQLKRRRYTGWGRLSRKLINGIRDKQSGKTILDFLKSDGFANRNFMQLIHDDSLTFKEDIQKAQVSGQGDSLHEHIANLAGSPAIKKGILQTVKVVDELVKVMGRHKPENIVIEMARENQTTQKGQKNSRERMKRIEEGIKELGSQILKEHPVENTQLQNEKLYLYYLQNGRDMYVDQELDINRLSDYDVDHIVPQSFLKDDSIDNKVLTRSDKARGKSDNVPSEEVVKKMKNYWRQLLNAKLITQRKFDNLTKAERGGLSELDKAGFIKRQLVETRQITKHVAQILDSRMNTKYDENDKLIREVKVITLKSKLVSDFRKDFQFYKVREINNYHHAHDAYLNAVVGTALIKKYPKLESEFVYGDYKVYDVRKMIAKSEQEIGKATAKYFFYSNIMNFFKTEITLANGEIRKRPLIETNGETGEIVWDKGRDFATVRKVLSMPQVNIVKKTEVQTGGFSKESILPKRNSDKLIARKKDWDPKKYGGFDSPTVAYSVLVVAKVEKGKSKKLKSVKELLGITIMERSSFEKNPIDFLEAKGYKEVKKDLIIKLPKYSLFELENGRKRMLASAGELQKGNELALPSKYVNFLYLASHYEKLKGSPEDNEQKQLFVEQHKHYLDEIIEQISEFSKRVILADANLDKVLSAYNKHRDKPIREQAENIIHLFTLTNLGAPAAFKYFDTTIDRKRYTSTKEVLDATLIHQSITGLYETRIDLSQLGGDGGPAPAPAPAPGGTLGDQGSRGSDPLPEPRVTLTVEGIPTEFLVNTGAEHSVLTKPMGKMGSKRTVVAGATGSKVYPWTTKRLLKIGQKQVTHSFLVIPECPAPLLGRDLLTKLKAQIQFSTEGPQVTWEDRPAMCLVLNLEEEYRLHEKPVPPSIDPSWLQLFPMVWAEKAGMGLANQVPPVVVELKSDASPVAVRQYPMSKEAREGIRPHIQRFLDLGILVPCQSPWNTPLLPVKKPGTNDYRPVQDLREVNKRVQDIHPTVPNPYNLLSSLPPSHTWYSVLDLKDAFFCLKLHPNSQPLFAFEWRDPEKGNTGQLTWTRLPQGFKNSPTLFDEALHRDLASFRALNPQVVMLQYVDDLLVAAPTYRDCKEGTRRLLQELSKLGYRVSAKKAQLCREEVTYLGYLLKGGKRWLTPARKATVMKIPTPTTPRQVREFLGTAGFCRLWIPGFASLAAPLYPLTREKVPFTWTEAHQEAFGRIKEALLSAPALALPDLTKPFALYVDEKEGVARGVLTQTLGPWRRPVAYLSKKLDPVASGWPTCLKAIAAVALLLKDADKLTLGQNVLVIAPHNLESIVRQPPDRWMTNARMTHYQSLLLNERVSFAPPAILNPATLLPVESDDTPIHICSEILAEETGTRPDLRDQPLPGVPAWYTDGSSFIMDGRRQAGAAIVDNKRTVWASNLPEGTSAQKAELIALTQALRLAEGKSINIYTDSRYAFATAHVHGAIYKQRGLLTSAGKDIKNKEEILALLEAIHLPKRVAIIHCPGHQRGTDPVATGNRKADEAAKQAAQSTRILTETTKNAGKRTADGSEFEKRTADGSEFESPKKKAKVE

SEQ ID NO: 6520 - protein, 2125 aa, synthetic construct
MPAAKRVKLDGGDKKYSIGLDIGTNSVGWAVITDEYKVPSKKFKVLGNTDRHSIKKNLIGALLFDSGETAEATRLKRTARRRYTRRKNRICYLQEIFSNEMAKVDDSFFHRLEESFLVEEDKKHERHPIFGNIVDEVAYHEKYPTIYHLRKKLVDSTDKADLRLIYLALAHMIKFRGHFLIEGDLNPDNSDVDKLFIQLVQTYNQLFEENPINASGVDAKAILSARLSKSRRLENLIAQLPGEKKNGLFGNLIALSLGLTPNFKSNFDLAEDAKLQLSKDTYDDDLDNLLAQIGDQYADLFLAAKNLSDAILLSDILRVNTEITKAPLSASMIKRYDEHHQDLTLLKALVRQQLPEKYKEIFFDQSKNGYAGYIDGGASQEEFYKFIKPILEKMDGTEELLVKLNREDLLRKQRTFDNGSIPHQIHLGELHAILRRQEDFYPFLKDNREKIEKILTFRIPYYVGPLARGNSRFAWMTRKSEETITPWNFEEVVDKGASAQSFIERMTNFDKNLPNEKVLPKHSLLYEYFTVYNELTKVKYVTEGMRKPAFLSGEQKKAIVDLLFKTNRKVTVKQLKEDYFKKIECFDSVEISGVEDRFNASLGTYHDLLKIIKDKDFLDNEENEDILEDIVLTLTLFEDREMIEERLKTYAHLFDDKVMKQLKRRRYTGWGRLSRKLINGIRDKQSGKTILDFLKSDGFANRNFMQLIHDDSLTFKEDIQKAQVSGQGDSLHEHIANLAGSPAIKKGILQTVKVVDELVKVMGRHKPENIVIEMARENQTTQKGQKNSRERMKRIEEGIKELGSQILKEHPVENTQLQNEKLYLYYLQNGRDMYVDQELDINRLSDYDVDHIVPQSFLKDDSIDNKVLTRSDKARGKSDNVPSEEVVKKMKNYWRQLLNAKLITQRKFDNLTKAERGGLSELDKAGFIKRQLVETRQITKHVAQILDSRMNTKYDENDKLIREVKVITLKSKLVSDFRKDFQFYKVREINNYHHAHDAYLNAVVGTALIKKYPKLESEFVYGDYKVYDVRKMIAKSEQEIGKATAKYFFYSNIMNFFKTEITLANGEIRKRPLIETNGETGEIVWDKGRDFATVRKVLSMPQVNIVKKTEVQTGGFSKESILPKRNSDKLIARKKDWDPKKYGGFDSPTVAYSVLVVAKVEKGKSKKLKSVKELLGITIMERSSFEKNPIDFLEAKGYKEVKKDLIIKLPKYSLFELENGRKRMLASAGELQKGNELALPSKYVNFLYLASHYEKLKGSPEDNEQKQLFVEQHKHYLDEIIEQISEFSKRVILADANLDKVLSAYNKHRDKPIREQAENIIHLFTLTNLGAPAAFKYFDTTIDRKRYTSTKEVLDATLIHQSITGLYETRIDLSQLGGDGGPAPAPAPAPGGLLGRDLLTKLKAQIQFSTEGPQVTWEDRPAMCLVLNLEEEYRLHEKPVPPSIDPSWLQLFPMVWAEKAGMGLANQVPPVVVELKSDASPVAVRQYPMSKEAREGIRPHIQRFLDLGILVPCQSPWNTPLLPVKKPGTNDYRPVQDLREVNKRVQDIHPTVPNPYNLLSSLPPSHTWYSVLDLKDAFFCLKLHPNSQPLFAFEWRDPEKGNTGQLTWTRLPQGFKNSPTLFNEALHRDLASFRALNPQVVMLQYVDDLLVAAPTYRDCKEGTRRLLQELSKLGYRVSAKKAQLCREEVTYLGYLLKGGKRWLTPARKATVMKIPTPTTPRQVREFLGTAGFCRLWIPGFASLAAPLYPLTRPKVPFTWTEAHQEAFGRIKEALLSAPALALPDLTKPFALYVDEKEGVARGVLTQTLGPWRRPVAYLSKKLDPVASGWPTCLKAIAAVALLLKDADKLTLGQNVLVIAPHNLESIVRQPPDRWMTNARMTHYQSLLLNERVSFAPPAILNPATLLPVESDDTPIHICSEILAEETGTRPDLRDQPLPGVPAWYTDGSSFIMDGRRQAGAAIVDNKRTVWASNLPEGTSAQKAELIALTQALRLAEGKSINIYTDSRYAFATAHVHGAIYKQRGWLTSAGKDIKNKEEILALLEAIHLPKRVAIIHCPGHQRGTDPVATGNRKADEAAKQAAQSTRILTETTKNAGKRTADGSEFEKRTADGSEFESPKKKAKVE

SEQ ID NO: 6521 - protein, 2216 aa, synthetic construct
MPAAKRVKLDGGDKKYSIGLDIGTNSVGWAVITDEYKVPSKKFKVLGNTDRHSIKKNLIGALLFDSGETAEATRLKRTARRRYTRRKNRICYLQEIFSNEMAKVDDSFFHRLEESFLVEEDKKHERHPIFGNIVDEVAYHEKYPTIYHLRKKLVDSTDKADLRLIYLALAHMIKFRGHFLIEGDLNPDNSDVDKLFIQLVQTYNQLFEENPINASGVDAKAILSARLSKSRRLENLIAQLPGEKKNGLFGNLIALSLGLTPNFKSNFDLAEDAKLQLSKDTYDDDLDNLLAQIGDQYADLFLAAKNLSDAILLSDILRVNTEITKAPLSASMIKRYDEHHQDLTLLKALVRQQLPEKYKEIFFDQSKNGYAGYIDGGASQEEFYKFIKPILEKMDGTEELLVKLNREDLLRKQRTFDNGSIPHQIHLGELHAILRRQEDFYPFLKDNREKIEKILTFRIPYYVGPLARGNSRFAWMTRKSEETITPWNFEEVVDKGASAQSFIERMTNFDKNLPNEKVLPKHSLLYEYFTVYNELTKVKYVTEGMRKPAFLSGEQKKAIVDLLFKTNRKVTVKQLKEDYFKKIECFDSVEISGVEDRFNASLGTYHDLLKIIKDKDFLDNEENEDILEDIVLTLTLFEDREMIEERLKTYAHLFDDKVMKQLKRRRYTGWGRLSRKLINGIRDKQSGKTILDFLKSDGFANRNFMQLIHDDSLTFKEDIQKAQVSGQGDSLHEHIANLAGSPAIKKGILQTVKVVDELVKVMGRHKPENIVIEMARENQTTQKGQKNSRERMKRIEEGIKELGSQILKEHPVENTQLQNEKLYLYYLQNGRDMYVDQELDINRLSDYDVDHIVPQSFLKDDSIDNKVLTRSDKARGKSDNVPSEEVVKKMKNYWRQLLNAKLITQRKFDNLTKAERGGLSELDKAGFIKRQLVETRQITKHVAQILDSRMNTKYDENDKLIREVKVITLKSKLVSDFRKDFQFYKVREINNYHHAHDAYLNAVVGTALIKKYPKLESEFVYGDYKVYDVRKMIAKSEQEIGKATAKYFFYSNIMNFFKTEITLANGEIRKRPLIETNGETGEIVWDKGRDFATVRKVLSMPQVNIVKKTEVQTGGFSKESILPKRNSDKLIARKKDWDPKKYGGFDSPTVAYSVLVVAKVEKGKSKKLKSVKELLGITIMERSSFEKNPIDFLEAKGYKEVKKDLIIKLPKYSLFELENGRKRMLASAGELQKGNELALPSKYVNFLYLASHYEKLKGSPEDNEQKQLFVEQHKHYLDEIIEQISEFSKRVILADANLDKVLSAYNKHRDKPIREQAENIIHLFTLTNLGAPAAFKYFDTTIDRKRYTSTKEVLDATLIHQSITGLYETRIDLSQLGGDGGPAPAPAPAPGGTLGDQGSRGSDPLPEPRVTLTVEGIPTEFLVNTGAEHSVLTKPMGKMGSKRTVVAGATGSKVYPWTTKRLLKIGQKQVTHSFLVIPECPAPLLGRDLLTKLKAQIQFSTEGPQVTWEDRPAMCLVLNLEEEYRLHEKPVPPSIDPSWLQLFPMVWAEKAGMGLANQVPPVVVELKSDASPVAVRQYPMSKEAREGIRPHIQRFLDLGILVPCQSPWNTPLLPVKKPGTNDYRPVQDLREVNKRVQDIHPTVPNPYNLLSSLPPSHTWYSVLDLKDAFFCLKLHPNSQPLFAFEWRDPEKGNTGQLTWTRLPQGFKNSPTLFNEALHRDLASFRALNPQVVMLQYVDDLLVAAPTYRDCKEGTRRLLQELSKLGYRVSAKKAQLCREEVTYLGYLLKGGKRWLTPARKATVMKIPTPTTPRQVREFLGTAGFCRLWIPGFASLAAPLYPLTRPKVPFTWTEAHQEAFGRIKEALLSAPALALPDLTKPFALYVDEKEGVARGVLTQTLGPWRRPVAYLSKKLDPVASGWPTCLKAIAAVALLLKDADKLTLGQNVLVIAPHNLESIVRQPPDRWMTNARMTHYQSLLLNERVSFAPPAILNPATLLPVESDDTPIHICSEILAEETGTRPDLRDQPLPGVPAWYTDGSSFIMDGRRQAGAAIVDNKRTVWASNLPEGTSAQKAELIALTQALRLAEGKSINIYTDSRYAFATAHVHGAIYKQRGWLTSAGKDIKNKEEILALLEAIHLPKRVAIIHCPGHQRGTDPVATGNRKADEAAKQAAQSTRILTETTKNAGKRTADGSEFEKRTADGSEFESPKKKAKVE

SEQ ID NO: 6522 - protein, 2094 aa, synthetic construct
MPAAKRVKLDGGDKKYSIGLDIGTNSVGWAVITDEYKVPSKKFKVLGNTDRHSIKKNLIGALLFDSGETAEATRLKRTARRRYTRRKNRICYLQEIFSNEMAKVDDSFFHRLEESFLVEEDKKHERHPIFGNIVDEVAYHEKYPTIYHLRKKLVDSTDKADLRLIYLALAHMIKFRGHFLIEGDLNPDNSDVDKLFIQLVQTYNQLFEENPINASGVDAKAILSARLSKSRRLENLIAQLPGEKKNGLFGNLIALSLGLTPNFKSNFDLAEDAKLQLSKDTYDDDLDNLLAQIGDQYADLFLAAKNLSDAILLSDILRVNTEITKAPLSASMIKRYDEHHQDLTLLKALVRQQLPEKYKEIFFDQSKNGYAGYIDGGASQEEFYKFIKPILEKMDGTEELLVKLNREDLLRKQRTFDNGSIPHQIHLGELHAILRRQEDFYPFLKDNREKIEKILTFRIPYYVGPLARGNSRFAWMTRKSEETITPWNFEEVVDKGASAQSFIERMTNFDKNLPNEKVLPKHSLLYEYFTVYNELTKVKYVTEGMRKPAFLSGEQKKAIVDLLFKTNRKVTVKQLKEDYFKKIECFDSVEISGVEDRFNASLGTYHDLLKIIKDKDFLDNEENEDILEDIVLTLTLFEDREMIEERLKTYAHLFDDKVMKQLKRRRYTGWGRLSRKLINGIRDKQSGKTILDFLKSDGFANRNFMQLIHDDSLTFKEDIQKAQVSGQGDSLHEHIANLAGSPAIKKGILQTVKVVDELVKVMGRHKPENIVIEMARENQTTQKGQKNSRERMKRIEEGIKELGSQILKEHPVENTQLQNEKLYLYYLQNGRDMYVDQELDINRLSDYDVDHIVPQSFLKDDSIDNKVLTRSDKARGKSDNVPSEEVVKKMKNYWRQLLNAKLITQRKFDNLTKAERGGLSELDKAGFIKRQLVETRQITKHVAQILDSRMNTKYDENDKLIREVKVITLKSKLVSDFRKDFQFYKVREINNYHHAHDAYLNAVVGTALIKKYPKLESEFVYGDYKVYDVRKMIAKSEQEIGKATAKYFFYSNIMNFFKTEITLANGEIRKRPLIETNGETGEIVWDKGRDFATVRKVLSMPQVNIVKKTEVQTGGFSKESILPKRNSDKLIARKKDWDPKKYGGFDSPTVAYSVLVVAKVEKGKSKKLKSVKELLGITIMERSSFEKNPIDFLEAKGYKEVKKDLIIKLPKYSLFELENGRKRMLASAGELQKGNELALPSKYVNFLYLASHYEKLKGSPEDNEQKQLFVEQHKHYLDEIIEQISEFSKRVILADANLDKVLSAYNKHRDKPIREQAENIIHLFTLTNLGAPAAFKYFDTTIDRKRYTSTKEVLDATLIHQSITGLYETRIDLSQLGGDGGPAPAPAPAPGGLGIEDEYRLHETSTEPDVSLGSTWLSDFPQAWAETGGMGLAVRQAPLIIPLKATSTPVSIQQYPMSHEARLGIKPHIQRLLDQGILVPCQSPWNTPLLPVKKPGTNDYRPVQDLREVNKRVEDIHPTVPNPYNLLSGLPPSHQWYTVLDLKDAFFCLRLHPTSQPLFAFEWRDPGMGISGQLTWTRLPQGFKNSPTLFNEALHRDLADFRIQHPDLILLQYVDDILLAATSELDCQQGTRALLQTLGDLGYRASAKKAQICQKQVKYLGYLLREGQRWLTEARKETVMGQPVPKTPRQLREFLGKAGFCRLFIPGFAEMAAPLYPLTKPGTLFSWGPDQQKAYQEIKQALLTAPALGLPDLTKPFELFVDEKQGYAKGVLTQKLGPWRRPVAYLSKKLDPVAAGWPPCLRMVAAIAVLTKDAGKLTMGQPLVILAPHAVEALVKQPPDRWLSNARMTHYQAMLLDTDRVQFGPVVALNPATLLPLPEEGAPHDCLEILAETHGTRPDLTDQPIPDADHTWYTDGSSFLQEGQRKAGAAVTTETEVIWAGALPAGTSAQRAELIALTQALKMAEGKRLNVYTDSRYAFATAHIHGEIYRRRGWLTSEGREIKNKSEILALLKALFLPKRLSIIHCLGHQKGDSAEARGNRLADQAAREAAIKTPPDTSTLLIAGKRTADGSEFEKRTADGSEFESPKKKAKVE

SEQ ID NO: 6523 - protein, 2094 aa, synthetic construct; identical to SEQ ID NO: 6522

SEQ ID NO: 6524 - protein, 2094 aa, synthetic construct
MPAAKRVKLDGGDKKYSIGLDIGTNSVGWAVITDEYKVPSKKFKVLGNTDRHSIKKNLIGALLFDSGETAEATRLKRTARRRYTRRKNRICYLQEIFSNEMAKVDDSFFHRLEESFLVEEDKKHERHPIFGNIVDEVAYHEKYPTIYHLRKKLVDSTDKADLRLIYLALAHMIKFRGHFLIEGDLNPDNSDVDKLFIQLVQTYNQLFEENPINASGVDAKAILSARLSKSRRLENLIAQLPGEKKNGLFGNLIALSLGLTPNFKSNFDLAEDAKLQLSKDTYDDDLDNLLAQIGDQYADLFLAAKNLSDAILLSDILRVNTEITKAPLSASMIKRYDEHHQDLTLLKALVRQQLPEKYKEIFFDQSKNGYAGYIDGGASQEEFYKFIKPILEKMDGTEELLVKLNREDLLRKQRTFDNGSIPHQIHLGELHAILRRQEDFYPFLKDNREKIEKILTFRIPYYVGPLARGNSRFAWMTRKSEETITPWNFEEVVDKGASAQSFIERMTNFDKNLPNEKVLPKHSLLYEYFTVYNELTKVKYVTEGMRKPAFLSGEQKKAIVDLLFKTNRKVTVKQLKEDYFKKIECFDSVEISGVEDRFNASLGTYHDLLKIIKDKDFLDNEENEDILEDIVLTLTLFEDREMIEERLKTYAHLFDDKVMKQLKRRRYTGWGRLSRKLINGIRDKQSGKTILDFLKSDGFANRNFMQLIHDDSLTFKEDIQKAQVSGQGDSLHEHIANLAGSPAIKKGILQTVKVVDELVKVMGRHKPENIVIEMARENQTTQKGQKNSRERMKRIEEGIKELGSQILKEHPVENTQLQNEKLYLYYLQNGRDMYVDQELDINRLSDYDVDHIVPQSFLKDDSIDNKVLTRSDKARGKSDNVPSEEVVKKMKNYWRQLLNAKLITQRKFDNLTKAERGGLSELDKAGFIKRQLVETRQITKHVAQILDSRMNTKYDENDKLIREVKVITLKSKLVSDFRKDFQFYKVREINNYHHAHDAYLNAVVGTALIKKYPKLESEFVYGDYKVYDVRKMIAKSEQEIGKATAKYFFYSNIMNFFKTEITLANGEIRKRPLIETNGETGEIVWDKGRDFATVRKVLSMPQVNIVKKTEVQTGGFSKESILPKRNSDKLIARKKDWDPKKYGGFDSPTVAYSVLVVAKVEKGKSKKLKSVKELLGITIMERSSFEKNPIDFLEAKGYKEVKKDLIIKLPKYSLFELENGRKRMLASAGELQKGNELALPSKYVNFLYLASHYEKLKGSPEDNEQKQLFVEQHKHYLDEIIEQISEFSKRVILADANLDKVLSAYNKHRDKPIREQAENIIHLFTLTNLGAPAAFKYFDTTIDRKRYTSTKEVLDATLIHQSITGLYETRIDLSQLGGDGGPAPAPAPAPGGTLNIEDEHRLHETSKEPDVSLGSTWLSDFPQAWAETGGMGLAVRQAPLIIPLKATSTPVSIKQYPMSQEARLGIKPHIQRLLDQGILVPCQSPWNTPLLPVKKPGTNDYRPVQDLREVNKRVEDIHPTVPNPYNLLSGLPPSHQWYTVLDLKDAFFCLRLHPTSQPLFAFEWRDPEMGISGQLTWTRLPQGFKNSPTLFDEALHRDLADFRIQHPDLILLQYVDDLLLAATSELDCQQGTRALLQTLGNLGYRASAKKAQICQKQVKYLGYLLKEGQRWLTEARKETVMGQPTPKTPRQLREFLGTAGFCRLWIPGFAEMAAPLYPLTKTGTLFNWGPDQQKAYQEIKQALLTAPALGLPDLTKPFELFVDEKQGYAKGVLTQKLGPWRRPVAYLSKKLDPVAAGWPPCLRMVAAIAVLTKDAGKLTMGQPLVILAPHAVEALVKQPPDRWLSNARMTHYQALLLDTDRVQFGPVVALNPATLLPLPEEGLQHNCLDILAEAHGTRPDLTDQPLPDADHTWYTDGSSLLQEGQRKAGAAVTTETEVIWAKALPAGTSAQRAELIALTQALKMAEGKKLNVYTDSRYAFATAHIHGEIYRRRGLLTSEGKEIKNKDEILALLKALFLPKRLSIIHCPGHQKGHSAEARGNRMADQAARKAAITETPDTSTLLAGKRTADGSEFEKRTADGSEFESPKKKAKVE

SEQ ID NO: 6525 - protein, 2086 aa, synthetic construct
MPAAKRVKLDGGDKKYSIGLDIGTNSVGWAVITDEYKVPSKKFKVLGNTDRHSIKKNLIGALLFDSGETAEATRLKRTARRRYTRRKNRICYLQEIFSNEMAKVDDSFFHRLEESFLVEEDKKHERHPIFGNIVDEVAYHEKYPTIYHLRKKLVDSTDKADLRLIYLALAHMIKFRGHFLIEGDLNPDNSDVDKLFIQLVQTYNQLFEENPINASGVDAKAILSARLSKSRRLENLIAQLPGEKKNGLFGNLIALSLGLTPNFKSNFDLAEDAKLQLSKDTYDDDLDNLLAQIGDQYADLFLAAKNLSDAILLSDILRVNTEITKAPLSASMIKRYDEHHQDLTLLKALVRQQLPEKYKEIFFDQSKNGYAGYIDGGASQEEFYKFIKPILEKMDGTEELLVKLNREDLLRKQRTFDNGSIPHQIHLGELHAILRRQEDFYPFLKDNREKIEKILTFRIPYYVGPLARGNSRFAWMTRKSEETITPWNFEEVVDKGASAQSFIERMTNFDKNLPNEKVLPKHSLLYEYFTVYNELTKVKYVTEGMRKPAFLSGEQKKAIVDLLFKTNRKVTVKQLKEDYFKKIECFDSVEISGVEDRFNASLGTYHDLLKIIKDKDFLDNEENEDILEDIVLTLTLFEDREMIEERLKTYAHLFDDKVMKQLKRRRYTGWGRLSRKLINGIRDKQSGKTILDFLKSDGFANRNFMQLIHDDSLTFKEDIQKAQVSGQGDSLHEHIANLAGSPAIKKGILQTVKVVDELVKVMGRHKPENIVIEMARENQTTQKGQKNSRERMKRIEEGIKELGSQILKEHPVENTQLQNEKLYLYYLQNGRDMYVDQELDINRLSDYDVDHIVPQSFLKDDSIDNKVLTRSDKARGKSDNVPSEEVVKKMKNYWRQLLNAKLITQRKFDNLTKAERGGLSELDKAGFIKRQLVETRQITKHVAQILDSRMNTKYDENDKLIREVKVITLKSKLVSDFRKDFQFYKVREINNYHHAHDAYLNAVVGTALIKKYPKLESEFVYGDYKVYDVRKMIAKSEQEIGKATAKYFFYSNIMNFFKTEITLANGEIRKRPLIETNGETGEIVWDKGRDFATVRKVLSMPQVNIVKKTEVQTGGFSKESILPKRNSDKLIARKKDWDPKKYGGFDSPTVAYSVLVVAKVEKGKSKKLKSVKELLGITIMERSSFEKNPIDFLEAKGYKEVKKDLIIKLPKYSLFELENGRKRMLASAGELQKGNELALPSKYVNFLYLASHYEKLKGSPEDNEQKQLFVEQHKHYLDEIIEQISEFSKRVILADANLDKVLSAYNKHRDKPIREQAENIIHLFTLTNLGAPAAFKYFDTTIDRKRYTSTKEVLDATLIHQSITGLYETRIDLSQLGGDGGPAPAPAPAPGGLDDEYRLYSPLVKPDQNIQFWLEQFPQAWAETAGMGLAKQVPPQVIQLKASATPVSVRQYPLSKEAQEGIRPHVQRLIQQGILVPVQSPWNTPLLPVRKPGTNDYRPVQDLREVNKRVQDIHPTVPNPYNLLCALPPQRSWYTVLDLKDAFFCLRLHPTSQPLFAFEWRDPGTGRTGQLTWTRLPQGFKNSPTIFNEALHRDLANFRIQHPQVTLLQYVDDLLLAGATKQDCLEGTKALLLELSDLGYRASAKKAQICRREVTYLGYSLRDGQRWLTEARKKTVVQIPAPTTAKQVREFLGKAGFCRLFIPGFATLAAPLYPLTKPKGEFSWAPEHQKAFDAIKKALLSAPALALPDVTKPFTLYVDERKGVARGVLTQTLGPWRRPVAYLSKKLDPVASGWPVCLKAIAAVAILVKDADKLTLGQNITVIAPHALENIVRQPPDRWMTNARMTHYQSLLLTERVTFAPPAALNPATLLPEETDEPVTHDCHQLLIEETGVRKDLTDIPLTGEVLTWFTDGSSYVVEGKRMAGAAVVDGTRTIWASSLPEGTSAQKAELMALTQALRLAEGKSINIYTDSRYAFATAHVHGAIYKQRGWLTSAGREIKNKEEILSLLEALHLPKRLAIIHCPGHQKAKDPISRGNQMADRVAKQAAQGVNLLPAGKRTADGSEFEKRTADGSEFESPKKKAKVE

SEQ ID NO: 6526 - protein, 2088 aa, synthetic construct
MPAAKRVKLDGGDKKYSIGLDIGTNSVGWAVITDEYKVPSKKFKVLGNTDRHSIKKNLIGALLFDSGETAEATRLKRTARRRYTRRKNRICYLQEIFSNEMAKVDDSFFHRLEESFLVEEDKKHERHPIFGNIVDEVAYHEKYPTIYHLRKKLVDSTDKADLRLIYLALAHMIKFRGHFLIEGDLNPDNSDVDKLFIQLVQTYNQLFEENPINASGVDAKAILSARLSKSRRLENLIAQLPGEKKNGLFGNLIALSLGLTPNFKSNFDLAEDAKLQLSKDTYDDDLDNLLAQIGDQYADLFLAAKNLSDAILLSDILRVNTEITKAPLSASMIKRYDEHHQDLTLLKALVRQQLPEKYKEIFFDQSKNGYAGYIDGGASQEEFYKFIKPILEKMDGTEELLVKLNREDLLRKQRTFDNGSIPHQIHLGELHAILRRQEDFYPFLKDNREKIEKILTFRIPYYVGPLARGNSRFAWMTRKSEETITPWNFEEVVDKGASAQSFIERMTNFDKNLPNEKVLPKHSLLYEYFTVYNELTKVKYVTEGMRKPAFLSGEQKKAIVDLLFKTNRKVTVKQLKEDYFKKIECFDSVEISGVEDRFNASLGTYHDLLKIIKDKDFLDNEENEDILEDIVLTLTLFEDREMIEERLKTYAHLFDDKVMKQLKRRRYTGWGRLSRKLINGIRDKQSGKTILDFLKSDGFANRNFMQLIHDDSLTFKEDIQKAQVSGQGDSLHEHIANLAGSPAIKKGILQTVKVVDELVKVMGRHKPENIVIEMARENQTTQKGQKNSRERMKRIEEGIKELGSQILKEHPVENTQLQNEKLYLYYLQNGRDMYVDQELDINRLSDYDVDHIVPQSFLKDDSIDNKVLTRSDKARGKSDNVPSEEVVKKMKNYWRQLLNAKLITQRKFDNLTKAERGGLSELDKAGFIKRQLVETRQITKHVAQILDSRMNTKYDENDKLIREVKVITLKSKLVSDFRKDFQFYKVREINNYHHAHDAYLNAVVGTALIKKYPKLESEFVYGDYKVYDVRKMIAKSEQEIGKATAKYFFYSNIMNFFKTEITLANGEIRKRPLIETNGETGEIVWDKGRDFATVRKVLSMPQVNIVKKTEVQTGGFSKESILPKRNSDKLIARKKDWDPKKYGGFDSPTVAYSVLVVAKVEKGKSKKLKSVKELLGITIMERSSFEKNPIDFLEAKGYKEVKKDLIIKLPKYSLFELENGRKRMLASAGELQKGNELALPSKYVNFLYLASHYEKLKGSPEDNEQKQLFVEQHKHYLDEIIEQISEFSKRVILADANLDKVLSAYNKHRDKPIREQAENIIHLFTLTNLGAPAAFKYFDTTIDRKRYTSTKEVLDATLIHQSITGLYETRIDLSQLGGDGGPAPAPAPAPGGTLQLDDEYRLYSPLVKPDQNIQFWLEQFPQAWAETAGMGLAKQVPPQVIQLKASATPVSVRQYPLSKEAQEGIRPHVQRLIQQGILVPVQSPWNTPLLPVRKPGTNDYRPVQDLREVNKRVQDIHPTVPNPYNLLCALPPQRSWYTVLDLKDAFFCLRLHPTSQPLFAFEWRDPGTGRTGQLTWTRLPQGFKNSPTIFDEALHRDLANFRIQHPQVTLLQYVDDLLLAGATKQDCLEGTKALLLELSDLGYRASAKKAQICRREVTYLGYSLRDGQRWLTEARKKTVVQIPAPTTAKQVREFLGTAGFCRLWIPGFATLAAPLYPLTKEKGEFSWAPEHQKAFDAIKKALLSAPALALPDVTKPFTLYVDERKGVARGVLTQTLGPWRRPVAYLSKKLDPVASGWPVCLKAIAAVAILVKDADKLTLGQNITVIAPHALENIVRQPPDRWMTNARMTHYQSLLLTERVTFAPPAALNPATLLPEETDEPVTHDCHQLLIEETGVRKDLTDIPLTGEVLTWFTDGSSYVVEGKRMAGAAVVDGTRTIWASSLPEGTSAQKAELMALTQALRLAEGKSINIYTDSRYAFATAHVHGAIYKQRGLLTSAGREIKNKEEILSLLEALHLPKRLAIIHCPGHQKAKDPISRGNQMADRVAKQAAQGVNLLAGKRTADGSEFEKRTADGSEFESPKKKAKVE

SEQ ID NO: 6527 - protein, 2086 aa, synthetic construct; identical to SEQ ID NO: 6525

SEQ ID NO: 6528 - protein, 2088 aa, synthetic construct; identical to SEQ ID NO: 6526

SEQ ID NO: 6529 - protein, 2085 aa, synthetic construct
MPAAKRVKLDGGDKKYSIGLDIGTNSVGWAVITDEYKVPSKKFKVLGNTDRHSIKKNLIGALLFDSGETAEATRLKRTARRRYTRRKNRICYLQEIFSNEMAKVDDSFFHRLEESFLVEEDKKHERHPIFGNIVDEVAYHEKYPTIYHLRKKLVDSTDKADLRLIYLALAHMIKFRGHFLIEGDLNPDNSDVDKLFIQLVQTYNQLFEENPINASGVDAKAILSARLSKSRRLENLIAQLPGEKKNGLFGNLIALSLGLTPNFKSNFDLAEDAKLQLSKDTYDDDLDNLLAQIGDQYADLFLAAKNLSDAILLSDILRVNTEITKAPLSASMIKRYDEHHQDLTLLKALVRQQLPEKYKEIFFDQSKNGYAGYIDGGASQEEFYKFIKPILEKMDGTEELLVKLNREDLLRKQRTFDNGSIPHQIHLGELHAILRRQEDFYPFLKDNREKIEKILTFRIPYYVGPLARGNSRFAWMTRKSEETITPWNFEEVVDKGASAQSFIERMTNFDKNLPNEKVLPKHSLLYEYFTVYNELTKVKYVTEGMRKPAFLSGEQKKAIVDLLFKTNRKVTVKQLKEDYFKKIECFDSVEISGVEDRFNASLGTYHDLLKIIKDKDFLDNEENEDILEDIVLTLTLFEDREMIEERLKTYAHLFDDKVMKQLKRRRYTGWGRLSRKLINGIRDKQSGKTILDFLKSDGFANRNFMQLIHDDSLTFKEDIQKAQVSGQGDSLHEHIANLAGSPAIKKGILQTVKVVDELVKVMGRHKPENIVIEMARENQTTQKGQKNSRERMKRIEEGIKELGSQILKEHPVENTQLQNEKLYLYYLQNGRDMYVDQELDINRLSDYDVDHIVPQSFLKDDSIDNKVLTRSDKARGKSDNVPSEEVVKKMKNYWRQLLNAKLITQRKFDNLTKAERGGLSELDKAGFIKRQLVETRQITKHVAQILDSRMNTKYDENDKLIREVKVITLKSKLVSDFRKDFQFYKVREINNYHHAHDAYLNAVVGTALIKKYPKLESEFVYGDYKVYDVRKMIAKSEQEIGKATAKYFFYSNIMNFFKTEITLANGEIRKRPLIETNGETGEIVWDKGRDFATVRKVLSMPQVNIVKKTEVQTGGFSKESILPKRNSDKLIARKKDWDPKKYGGFDSPTVAYSVLVVAKVEKGKSKKLKSVKELLGITIMERSSFEKNPIDFLEAKGYKEVKKDLIIKLPKYSLFELENGRKRMLASAGELQKGNELALPSKYVNFLYLASHYEKLKGSPEDNEQKQLFVEQHKHYLDEIIEQISEFSKRVILADANLDKVLSAYNKHRDKPIREQAENIIHLFTLTNLGAPAAFKYFDTTIDRKRYTSTKEVLDATLIHQSITGLYETRIDLSQLGGDGGPAPAPAPAPGGIPWLMKKPLQLTTLVPLQEYEERLLKQTMLTGSYKEKLQSLFLKYDALWQHWENQVGHRRIKPHHIATGTVNPRPQKQYPINPKAKASIQTVINDLLKQGVLIQQNSIMNTPVYPVPKPDGKWRMVLDYREVNKTIPLIAAQNQHSAGILSSIFRGKYKTTLDLSNGFWAHSITPESYWLTAFTWLGQQYCWTRLPQGFLNSPALFNADVVDLLKEVPNVQVYVDDIYISHDDPREHLEQLEKVFSLLLNAGYVVSLKKSEIAQHEVEFLGFNITKEGRGLTETFKQKLLNITPPRDLKQLQSILGKLNFARNFIPNFSELVKPLYNIIATAPGKYITWTTDNSQQLQNIISMLNSAENLEERNPEVRLIMKVNTSPSAGYIRFYNEFAKRPIMYLNYVYTKAEVKFTNTEKLLTTIHKGLIKALDLGMGQEILVYSPIVSMTKIQKTPLPERKALPIRWITWMSYLEDPRIQFHYDKTLPELQQVPTVTDDIIAKIKHPSEFSMVFYTDGSAIKHPNVNKSHNAGMGIAQVQFKPEFTVINTWSIPLGDHTAQLAEVAAVEFACKKALKIDGPVLIVTDSFYVAESVNKELPYWQSNGFFNNKKKPLKHVSKWKSIADCIQLKPDIIIIHEKGHQPTASTFHTEGNNLADKLATQGSYVVNAGKRTADGSEFEKRTADGSEFESPKKKAKVE

SEQ ID NO: 6530 - protein, 2098 aa, synthetic construct
MPAAKRVKLDGGDKKYSIGLDIGTNSVGWAVITDEYKVPSKKFKVLGNTDRHSIKKNLIGALLFDSGETAEATRLKRTARRRYTRRKNRICYLQEIFSNEMAKVDDSFFHRLEESFLVEEDKKHERHPIFGNIVDEVAYHEKYPTIYHLRKKLVDSTDKADLRLIYLALAHMIKFRGHFLIEGDLNPDNSDVDKLFIQLVQTYNQLFEENPINASGVDAKAILSARLSKSRRLENLIAQLPGEKKNGLFGNLIALSLGLTPNFKSNFDLAEDAKLQLSKDTYDDDLDNLLAQIGDQYADLFLAAKNLSDAILLSDILRVNTEITKAPLSASMIKRYDEHHQDLTLLKALVRQQLPEKYKEIFFDQSKNGYAGYIDGGASQEEFYKFIKPILEKMDGTEELLVKLNREDLLRKQRTFDNGSIPHQIHLGELHAILRRQEDFYPFLKDNREKIEKILTFRIPYYVGPLARGNSRFAWMTRKSEETITPWNFEEVVDKGASAQSFIERMTNFDKNLPNEKVLPKHSLLYEYFTVYNELTKVKYVTEGMRKPAFLSGEQKKAIVDLLFKTNRKVTVKQLKEDYFKKIECFDSVEISGVEDRFNASLGTYHDLLKIIKDKDFLDNEENEDILEDIVLTLTLFEDREMIEERLKTYAHLFDDKVMKQLKRRRYTGWGRLSRKLINGIRDKQSGKTILDFLKSDGFANRNFMQLIHDDSLTFKEDIQKAQVSGQGDSLHEHIANLAGSPAIKKGILQTVKVVDELVKVMGRHKPENIVIEMARENQTTQKGQKNSRERMKRIEEGIKELGSQILKEHPVENTQLQNEKLYLYYLQNGRDMYVDQELDINRLSDYDVDHIVPQSFLKDDSIDNKVLTRSDKARGKSDNVPSEEVVKKMKNYWRQLLNAKLITQRKFDNLTKAERGGLSELDKAGFIKRQLVETRQITKHVAQILDSRMNTKYDENDKLIREVKVITLKSKLVSDFRKDFQFYKVREINNYHHAHDAYLNAVVGTALIKKYPKLESEFVYGDYKVYDVRKMIAKSEQEIGKATAKYFFYSNIMNFFKTEITLANGEIRKRPLIETNGETGEIVWDKGRDFATVRKVLSMPQVNIVKKTEVQTGGFSKESILPKRNSDKLIARKKDWDPKKYGGFDSPTVAYSVLVVAKVEKGKSKKLKSVKELLGITIMERSSFEKNPIDFLEAKGYKEVKKDLIIKLPKYSLFELENGRKRMLASAGELQKGNELALPSKYVNFLYLASHYEKLKGSPEDNEQKQLFVEQHKHYLDEIIEQISEFSKRVILADANLDKVLSAYNKHRDKPIREQAENIIHLFTLTNLGAPAAFKYFDTTIDRKRYTSTKEVLDATLIHQSITGLYETRIDLSQLGGDGGPAPAPAPAPAPGGTAPLEEEYRLFLEAPIQNVTLLEQWKREIPKVWAEINPPGLASTQAPIHVQLLSTALPVRVRQYPITLEAKRSLRETIRKFRAAGILRPVHSPWNTPLLPVRKSGTSEYRMVQDLREVNKRVETIHPTVPNPYTLLSLLPPDRIWYSVLDLKDAFFCIPLAPESQLIFAFEWADAEEGESGQLTWTRLPQGFKNSPTLFNEALNRDLQGFRLDHPSVSLLQYVDDLLIAADTQAACLSATRDLLMTLAELGYRVSGKKAQLCQEEVTYLGFKIHKGSRSLSNSRTQAILQIPVPKTKRQVREFLGTIGYCRLWIPGFAELAQPLYAATRPGNDPLVWGEKEEEAFQSLKLALTQPPALALPSLDKPFQLFVEETSGAAKGVLTQALGPWKRPVAYLSKRLDPVAAGWPRCLRAIAAAALLTREASKLTFGQDIEITSSHNLESLLRSPPDKWLTNARITQYQVLLLDPPRVRFKQTAALNPATLLPETDDTLPIHHCLDTLDSLTSTRPDLTDQPLAQAEATLFTDGSSYIRDGKRYAGAAVVTLDSVIWAEPLPIGTSAQKAELIALTKALEWSKDKSVNIYTDSRYAFATLHVHGMIYRERGWLTAGGKAIKNAPEILALLTAVWLPKRVAVMHCKGHQKDDAPTSTGNRRADEVAREVAIRPLSTQATISAGKRTADGSEFEKRTADGSEFESPKKKAKVE

SEQ ID NO: 6531 - protein, 2098 aa, synthetic construct
MPAAKRVKLDGGDKKYSIGLDIGTNSVGWAVITDEYKVPSKKFKVLGNTDRHSIKKNLIGALLFDSGETAEATRLKRTARRRYTRRKNRICYLQEIFSNEMAKVDDSFFHRLEESFLVEEDKKHERHPIFGNIVDEVAYHEKYPTIYHLRKKLVDSTDKADLRLIYLALAHMIKFRGHFLIEGDLNPDNSDVDKLFIQLVQTYNQLFEENPINASGVDAKAILSARLSKSRRLENLIAQLPGEKKNGLFGNLIALSLGLTPNFKSNFDLAEDAKLQLSKDTYDDDLDNLLAQIGDQYADLFLAAKNLSDAILLSDILRVNTEITKAPLSASMIKRYDEHHQDLTLLKALVRQQLPEKYKEIFFDQSKNGYAGYIDGGASQEEFYKFIKPILEKMDGTEELLVKLNREDLLRKQRTFDNGSIPHQIHLGELHAILRRQEDFYPFLKDNREKIEKILTFRIPYYVGPLARGNSRFAWMTRKSEETITPWNFEEVVDKGASAQSFIERMTNFDKNLPNEKVLPKHSLLYEYFTVYNELTKVKYVTEGMRKPAFLSGEQKKAIVDLLFKTNRKVTVKQLKEDYFKKIECFDSVEISGVEDRFNASLGTYHDLLKIIKDKDFLDNEENEDILEDIVLTLTLFEDREMIEERLKTYAHLFDDKVMKQLKRRRYTGWGRLSRKLINGIRDKQSGKTILDFLKSDGFANRNFMQLIHDDSLTFKEDIQKAQVSGQGDSLHEHIANLAGSPAIKKGILQTVKVVDELVKVMGRHKPENIVIEMARENQTTQKGQKNSRERMKRIEEGIKELGSQILKEHPVENTQLQNEKLYLYYLQNGRDMYVDQELDINRLSDYDVDHIVPQSFLKDDSIDNKVLTRSDKARGKSDNVPSEEVVKKMKNYWRQLLNAKLITQRKFDNLTKAERGGLSELDKAGFIKRQLVETRQITKHVAQILDSRMNTKYDENDKLIREVKVITLKSKLVSDFRKDFQFYKVREINNYHHAHDAYLNAVVGTALIKKYPKLESEFVYGDYKVYDVRKMIAKSEQEIGKATAKYFFYSNIMNFFKTEITLANGEIRKRPLIETNGETGEIVWDKGRDFATVRKVLSMPQVNIVKKTEVQTGGFSKESILPKRNSDKLIARKKDWDPKKYGGFDSPTVAYSVLVVAKVEKGKSKKLKSVKELLGITIMERSSFEKNPIDFLEAKGYKEVKKDLIIKLPKYSLFELENGRKRMLASAGELQKGNELALPSKYVNFLYLASHYEKLKGSPEDNEQKQLFVEQHKHYLDEIIEQISEFSKRVILADANLDKVLSAYNKHRDKPIREQAENIIHLFTLTNLGAPAAFKYFDTTIDRKRYTSTKEVLDATLIHQSITGLYETRIDLSQLGGDGGPAPAPAPAPAPGGTAPLEEEYRLFLEAPIQNVTLLEQWKREIPKVWAEINPPGLASTQAPIHVQLLSTALPVRVRQYPITLEAKRSLRETIRKFRAAGILRPVHSPWNTPLLPVRKSGTSEYRMVQDLREVNKRVETIHPTVPNPYTLLSLLPPDRIWYSVLDLKDAFFCIPLAPESQLIFAFEWADAEEGESGQLTWTRLPQGFKNSPTLFNEALNRDLQGFRLDHPSVSLLQYVDDLLIAADTQAACLSATRDLLMTLAELGYRVSGKKAQLCQEEVTYLGFKIHKGSRSLSNSRTQAILQIPVPKTKRQVREFLGKIGYCRLFIPGFAELAQPLYAATRPGNDPLVWGEKEEEAFQSLKLALTQPPALALPSLDKPFQLFVEETSGAAKGVLTQALGPWKRPVAYLSKRLDPVAAGWPRCLRAIAAAALLTREASKLTFGQDIEITSSHNLESLLRSPPDKWLTNARITQYQVLLLDPPRVRFKQTAALNPATLLPETDDTLPIHHCLDTLDSLTSTRPDLTDQPLAQAEATLFTDGSSYIRDGKRYAGAAVVTLDSVIWAEPLPIGTSAQKAELIALTKALEWSKDKSVNIYTDSRYAFATLHVHGMIYRERGWLTAGGKAIKNAPEILALLTAVWLPKRVAVMHCKGHQKDDAPTSTGNRRADEVAREVAIRPLSTQATISAGKRTADGSEFEKRTADGSEFESPKKKAKVE

SEQ ID NO: 6532 - protein, 2102 aa, synthetic construct
MPAAKRVKLDGGDKKYSIGLDIGTNSVGWAVITDEYKVPSKKFKVLGNTDRHSIKKNLIGALLFDSGETAEATRLKRTARRRYTRRKNRICYLQEIFSNEMAKVDDSFFHRLEESFLVEEDKKHERHPIFGNIVDEVAYHEKYPTIYHLRKKLVDSTDKADLRLIYLALAHMIKFRGHFLIEGDLNPDNSDVDKLFIQLVQTYNQLFEENPINASGVDAKAILSARLSKSRRLENLIAQLPGEKKNGLFGNLIALSLGLTPNFKSNFDLAEDAKLQLSKDTYDDDLDNLLAQIGDQYADLFLAAKNLSDAILLSDILRVNTEITKAPLSASMIKRYDEHHQDLTLLKALVRQQLPEKYKEIFFDQSKNGYAGYIDGGASQEEFYKFIKPILEKMDGTEELLVKLNREDLLRKQRTFDNGSIPHQIHLGELHAILRRQEDFYPFLKDNREKIEKILTFRIPYYVGPLARGNSRFAWMTRKSEETITPWNFEEVVDKGASAQSFIERMTNFDKNLPNEKVLPKHSLLYEYFTVYNELTKVKYVTEGMRKPAFLSGEQKKAIVDLLFKTNRKVTVKQLKEDYFKKIECFDSVEISGVEDRFNASLGTYHDLLKIIKDKDFLDNEENEDILEDIVLTLTLFEDREMIEERLKTYAHLFDDKVMKQLKRRRYTGWGRLSRKLINGIRDKQSGKTILDFLKSDGFANRNFMQLIHDDSLTFKEDIQKAQVSGQGDSLHEHIANLAGSPAIKKGILQTVKVVDELVKVMGRHKPENIVIEMARENQTTQKGQKNSRERMKRIEEGIKELGSQILKEHPVENTQLQNEKLYLYYLQNGRDMYVDQELDINRLSDYDVDHIVPQSFLKDDSIDNKVLTRSDKARGKSDNVPSEEVVKKMKNYWRQLLNAKLITQRKFDNLTKAERGGLSELDKAGFIKRQLVETRQITKHVAQILDSRMNTKYDENDKLIREVKVITLKSKLVSDFRKDFQFYKVREINNYHHAHDAYLNAVVGTALIKKYPKLESEFVYGDYKVYDVRKMIAKSEQEIGKATAKYFFYSNIMNFFKTEITLANGEIRKRPLIETNGETGEIVWDKGRDFATVRKVLSMPQVNIVKKTEVQTGGFSKESILPKRNSDKLIARKKDWDPKKYGGFDSPTVAYSVLVVAKVEKGKSKKLKSVKELLGITIMERSSFEKNPIDFLEAKGYKEVKKDLIIKLPKYSLFELENGRKRMLASAGELQKGNELALPSKYVNFLYLASHYEKLKGSPEDNEQKQLFVEQHKHYLDEIIEQISEFSKRVILADANLDKVLSAYNKHRDKPIREQAENIIHLFTLTNLGAPAAFKYFDTTIDRKRYTSTKEVLDATLIHQSITGLYETRIDLSQLGGDGGPAPAPAPAPAPGGTVSLQDEHRLFDIPVTTSLPDVWLQDFPQAWAETGGLGRAKCQAPIIIDLKPTAVPVSIKQYPMSLEAHMGIRQHIIKFLELGVLRPCRSPWNTPLLPVKKPGTQDYRPVQDLREINKRTVDIHPTVPNPYNLLSTLKPDYSWYTVLDLKDAFFCLPLAPQSQELFAFEWKDPERGISGQLTWTRLPQGFKNSPTLFNEALHRDLTDFRTQHPEVTLLQYVDDLLLAAPTKKACTQGTRHLLQELGEKGYRASAKKAQICQTKVTYLGYILSEGKRWLTPGRIETVARIPPPRNPREVREFLGTAGFCRLWIPGFAELAAPLYALTKPSTPFTWQTEHQLAFEALKKALLSAPALGLPDTSKPFTLFLDERQGIAKGVLTQKLGPWKRPVAYLSKKLDPVAAGWPPCLRIMAATAMLVKDSAKLTLGQPLTVITPHTLEAIVRQPPDRWITNARLTHYQALLLDTDRVQFGPPVTLNPATLLPVPENQPSPHDCRQVLAETHGTREDLKDQELPDADHTWYTDGSSYLDSGTRRAGAAVVDGHNTIWAQSLPPGTSAQKAELIALTKALELSKGKKANIYTDSRYAFATAHTHGSIYERRGWLTSEGKEIKNKAEIIALLKALFLPQEVAIIHCPGHQKGQDPVAVGNRQADRVARQAAMAEVLTLATEPDNTSHITAGKRTADGSEFEKRTADGSEFESPKKKAKVE

SEQ ID NO: 6533 - protein, 2173 aa, synthetic construct
MPAAKRVKLDGGDKKYSIGLDIGTNSVGWAVITDEYKVPSKKFKVLGNTDRHSIKKNLIGALLFDSGETAEATRLKRTARRRYTRRKNRICYLQEIFSNEMAKVDDSFFHRLEESFLVEEDKKHERHPIFGNIVDEVAYHEKYPTIYHLRKKLVDSTDKADLRLIYLALAHMIKFRGHFLIEGDLNPDNSDVDKLFIQLVQTYNQLFEENPINASGVDAKAILSARLSKSRRLENLIAQLPGEKKNGLFGNLIALSLGLTPNFKSNFDLAEDAKLQLSKDTYDDDLDNLLAQIGDQYADLFLAAKNLSDAILLSDILRVNTEITKAPLSASMIKRYDEHHQDLTLLKALVRQQLPEKYKEIFFDQSKNGYAGYIDGGASQEEFYKFIKPILEKMDGTEELLVKLNREDLLRKQRTFDNGSIPHQIHLGELHAILRRQEDFYPFLKDNREKIEKILTFRIPYYVGPLARGNSRFAWMTRKSEETITPWNFEEVVDKGASAQSFIERMTNFDKNLPNEKVLPKHSLLYEYFTVYNELTKVKYVTEGMRKPAFLSGEQKKAIVDLLFKTNRKVTVKQLKEDYFKKIECFDSVEISGVEDRFNASLGTYHDLLKIIKDKDFLDNEENEDILEDIVLTLTLFEDREMIEERLKTYAHLFDDKVMKQLKRRRYTGWGRLSRKLINGIRDKQSGKTILDFLKSDGFANRNFMQLIHDDSLTFKEDIQKAQVSGQGDSLHEHIANLAGSPAIKKGILQTVKVVDELVKVMGRHKPENIVIEMARENQTTQKGQKNSRERMKRIEEGIKELGSQILKEHPVENTQLQNEKLYLYYLQNGRDMYVDQELDINRLSDYDVDHIVPQSFLKDDSIDNKVLTRSDKARGKSDNVPSEEVVKKMKNYWRQLLNAKLITQRKFDNLTKAERGGLSELDKAGFIKRQLVETRQITKHVAQILDSRMNTKYDENDKLIREVKVITLKSKLVSDFRKDFQFYKVREINNYHHAHDAYLNAVVGTALIKKYPKLESEFVYGDYKVYDVRKMIAKSEQEIGKATAKYFFYSNIMNFFKTEITLANGEIRKRPLIETNGETGEIVWDKGRDFATVRKVLSMPQVNIVKKTEVQTGGFSKESILPKRNSDKLIARKKDWDPKKYGGFDSPTVAYSVLVVAKVEKGKSKKLKSVKELLGITIMERSSFEKNPIDFLEAKGYKEVKKDLIIKLPKYSLFELENGRKRMLASAGELQKGNELALPSKYVNFLYLASHYEKLKGSPEDNEQKQLFVEQHKHYLDEIIEQISEFSKRVILADANLDKVLSAYNKHRDKPIREQAENIIHLFTLTNLGAPAAFKYFDTTIDRKRYTSTKEVLDATLIHQSITGLYETRIDLSQLGGDGGPAPAPAPAPAPGGMDLLKPLTVERKGVKIKGYWNSQADITCVPKDLLQGEEPVRQQNVTTIHGTQEGDVYYVNLKIDGRRINTEVIGTTLDYAIITPGDVPWILKKPLELTIKLDLEEQQGTLLNNSILSKKGKEELKQLFEKYSALWQSWENQVGHRRIRPHKIATGTVKPTPQKQYHINPKAKPDIQIVINDLLKQGVLIQKESTMNTPVYPVPKPNGRWRMVLDYRAVNKVTPLIAVQNQHSYGILGSLFKGRYKTTIDLSNGFWAHPIVPEDYWITAFTWQGKQYCWTVLPQGFLNSPGLFTGDVVDLLQGIPNVEVYVDDVYISHDSEKEHLEYLDILFNRLKEAGYIISLKKSNIANSIVDFLGFQITNEGRGLTDTFKEKLENITAPTTLKQLQSILGLLNFARNFIPDFTELIAPLYALIPKSTKNYVPWQIEHSTTLETLITKLNGAEYLQGRKGDKTLIMKVNASYTTGYIRYYNEGEKKPISYVSIVFSKTELKFTELEKLLTTVHKGLLKALDLSMGQNIHVYSPIVSMQNIQKTPQTAKKALASRWLSWLSYLEDPRIRFFYDPQMPALKDLPAVDTGKDNKKHPSNFQHIFYTDGSAITSPTKEGHLNAGMGIVYFINKDGNLQKQQEWSISLGNHTAQFAEIAAFEFALKKCLPLGGNILVVTDSNYVAKAYNEELDVWASNGFVNNRKKPLKHISKWKSVADLKRLRPDVVVTHEPGHQKLDSSPHAYGNNLADQLATQASFKVHAGKRTADGSEFEKRTADGSEFESPKKKAKVE

SEQ ID NO: 6534 - protein, 2173 aa, synthetic construct
MPAAKRVKLDGGDKKYSIGLDIGTNSVGWAVITDEYKVPSKKFKVLGNTDRHSIKKNLIGALLFDSGETAEATRLKRTARRRYTRRKNRICYLQEIFSNEMAKVDDSFFHRLEESFLVEEDKKHERHPIFGNIVDEVAYHEKYPTIYHLRKKLVDSTDKADLRLIYLALAHMIKFRGHFLIEGDLNPDNSDVDKLFIQLVQTYNQLFEENPINASGVDAKAILSARLSKSRRLENLIAQLPGEKKNGLFGNLIALSLGLTPNFKSNFDLAEDAKLQLSKDTYDDDLDNLLAQIGDQYADLFLAAKNLSDAILLSDILRVNTEITKAPLSASMIKRYDEHHQDLTLLKALVRQQLPEKYKEIFFDQSKNGYAGYIDGGASQEEFYKFIKPILEKMDGTEELLVKLNREDLLRKQRTFDNGSIPHQIHLGELHAILRRQEDFYPFLKDNREKIEKILTFRIPYYVGPLARGNSRFAWMTRKSEETITPWNFEEVVDKGASAQSFIERMTNFDKNLPNEKVLPKHSLLYEYFTVYNELTKVKYVTEGMRKPAFLSGEQKKAIVDLLFKTNRKVTVKQLKEDYFKKIECFDSVEISGVEDRFNASLGTYHDLLKIIKDKDFLDNEENEDILEDIVLTLTLFEDREMIEERLKTYAHLFDDKVMKQLKRRRYTGWGRLSRKLINGIRDKQSGKTILDFLKSDGFANRNFMQLIHDDSLTFKEDIQKAQVSGQGDSLHEHIANLAGSPAIKKGILQTVKVVDELVKVMGRHKPENIVIEMARENQTTQKGQKNSRERMKRIEEGIKELGSQILKEHPVENTQLQNEKLYLYYLQNGRDMYVDQELDINRLSDYDVDHIVPQSFLKDDSIDNKVLTRSDKARGKSDNVPSEEVVKKMKNYWRQLLNAKLITQRKFDNLTKAERGGLSELDKAGFIKRQLVETRQITKHVAQILDSRMNTKYDENDKLIREVKVITLKSKLVSDFRKDFQFYKVREINNYHHAHDAYLNAVVGTALIKKYPKLESEFVYGDYKVYDVRKMIAKSEQEIGKATAKYFFYSNIMNFFKTEITLANGEIRKRPLIETNGETGEIVWDKGRDFATVRKVLSMPQVNIVKKTEVQTGGFSKESILPKRNSDKLIARKKDWDPKKYGGFDSPTVAYSVLVVAKVEKGKSKKLKSVKELLGITIMERSSFEKNPIDFLEAKGYKEVKKDLIIKLPKYSLFELENGRKRMLASAGELQKGNELALPSKYVNFLYLASHYEKLKGSPEDNEQKQLFVEQHKHYLDEIIEQISEFSKRVILADANLDKVLSAYNKHRDKPIREQAENIIHLFTLTNLGAPAAFKYFDTTIDRKRYTSTKEVLDATLIHQSITGLYETRIDLSQLGGDGGPAPAPAPAPAPGGMDLLKPLTVERKGVKIKGYWNSQADITCVPKDLLQGEEPVRQQNVTTIHGTQEGDVYYVNLKIDGRRINTEVIGTTLDYAIITPGDVPWILKKPLELTIKLDLEEQQGTLLNNSILSKKGKEELKQLFEKYSALWQSWENQVGHRRIRPHKIATGTVKPTPQKQYHINPKAKPDIQIVINDLLKQGVLIQKESTMNTPVYPVPKPNGRWRMVLDYRAVNKVTPLIAVQNQHSYGILGSLFKGRYKTTIDLSNGFWAHPIVPEDYWITAFTWQGKQYCWTVLPQGFLNSPGLFNGDVVDLLQGIPNVEVYVDDVYISHDSEKEHLEYLDILFNRLKEAGYIISLKKSNIANSIVDFLGFQITNEGRGLTDTFKEKLENITAPTTLKQLQSILGLLNFARNFIPDFTELIAPLYALIPKSPKNYVPWQIEHSTTLETLITKLNGAEYLQGRKGDKTLIMKVNASYTTGYIRYYNEGEKKPISYVSIVFSKTELKFTELEKLLTTVHKGLLKALDLSMGQNIHVYSPIVSMQNIQKTPQTAKKALASRWLSWLSYLEDPRIRFFYDPQMPALKDLPAVDTGKDNKKHPSNFQHIFYTDGSAITSPTKEGHLNAGMGIVYFINKDGNLQKQQEWSISLGNHTAQFAEIAAFEFALKKCLPLGGNILVVTDSNYVAKAYNEELDVWASNGFVNNRKKPLKHISKWKSVADLKRLRPDVVVTHEPGHQKLDSSPHAYGNNLADQLATQASFKVHAGKRTADGSEFEKRTADGSEFESPKKKAKVE

SEQ ID NO: 6535 - protein, 2095 aa, synthetic construct
MPAAKRVKLDGGDKKYSIGLDIGTNSVGWAVITDEYKVPSKKFKVLGNTDRHSIKKNLIGALLFDSGETAEATRLKRTARRRYTRRKNRICYLQEIFSNEMAKVDDSFFHRLEESFLVEEDKKHERHPIFGNIVDEVAYHEKYPTIYHLRKKLVDSTDKADLRLIYLALAHMIKFRGHFLIEGDLNPDNSDVDKLFIQLVQTYNQLFEENPINASGVDAKAILSARLSKSRRLENLIAQLPGEKKNGLFGNLIALSLGLTPNFKSNFDLAEDAKLQLSKDTYDDDLDNLLAQIGDQYADLFLAAKNLSDAILLSDILRVNTEITKAPLSASMIKRYDEHHQDLTLLKALVRQQLPEKYKEIFFDQSKNGYAGYIDGGASQEEFYKFIKPILEKMDGTEELLVKLNREDLLRKQRTFDNGSIPHQIHLGELHAILRRQEDFYPFLKDNREKIEKILTFRIPYYVGPLARGNSRFAWMTRKSEETITPWNFEEVVDKGASAQSFIERMTNFDKNLPNEKVLPKHSLLYEYFTVYNELTKVKYVTEGMRKPAFLSGEQKKAIVDLLFKTNRKVTVKQLKEDYFKKIECFDSVEISGVEDRFNASLGTYHDLLKIIKDKDFLDNEENEDILEDIVLTLTLFEDREMIEERLKTYAHLFDDKVMKQLKRRRYTGWGRLSRKLINGIRDKQSGKTILDFLKSDGFANRNFMQLIHDDSLTFKEDIQKAQVSGQGDSLHEHIANLAGSPAIKKGILQTVKVVDELVKVMGRHKPENIVIEMARENQTTQKGQKNSRERMKRIEEGIKELGSQILKEHPVENTQLQNEKLYLYYLQNGRDMYVDQELDINRLSDYDVDHIVPQSFLKDDSIDNKVLTRSDKARGKSDNVPSEEVVKKMKNYWRQLLNAKLITQRKFDNLTKAERGGLSELDKAGFIKRQLVETRQITKHVAQILDSRMNTKYDENDKLIREVKVITLKSKLVSDFRKDFQFYKVREINNYHHAHDAYLNAVVGTALIKKYPKLESEFVYGDYKVYDVRKMIAKSEQEIGKATAKYFFYSNIMNFFKTEITLANGEIRKRPLIETNGETGEIVWDKGRDFATVRKVLSMPQVNIVKKTEVQTGGFSKESILPKRNSDKLIARKKDWDPKKYGGFDSPTVAYSVLVVAKVEKGKSKKLKSVKELLGITIMERSSFEKNPIDFLEAKGYKEVKKDLIIKLPKYSLFELENGRKRMLASAGELQKGNELALPSKYVNFLYLASHYEKLKGSPEDNEQKQLFVEQHKHYLDEIIEQISEFSKRVILADANLDKVLSAYNKHRDKPIREQAENIIHLFTLTNLGAPAAFKYFDTTIDRKRYTSTKEVLDATLIHQSITGLYETRIDLSQLGGDGGPAPAPAPAPAPGGTLQLEEEYRLFEPESTQKQEMDIWLKNFPQAWAETGGMGTAHCQAPVLIQLKATATPISIRQYPMPHEAYQGIKPHIRRMLDQGILKPCQSPWNTPLLPVKKPGTEDYRPVQDLREVNKRVEDIHPTVPNPYNLLSTLPPSHPWYTVLDLKDAFFCLRLHSESQLLFAFEWRDPEIGLSGQLTWTRLPQGFKNSPTLFDEALHSDLADFRVRYPALVLLQYVDDLLLAAATRTECLEGTKALLETLGNKGYRASAKKAQICLQEVTYLGYSLKDGQRWLTKARKEAILSIPVPKNSRQVREFLGTAGYCRLWIPGFAELAAPLYPLTRPGTLFQWGTEQQLAFEDIKKALLSSPALGLPDITKPFELFIDENSGFAKGVLVQKLGPWKRPVAYLSKKLDTVASGWPPCLRMVAAIAILVKDAGKLTLGQPLTILTSHPVEALVRQPPNKWLSNARMTHYQAMLLDAERVHFGPTVSLNPATLLPLPSGGNHHDCLQILAETHGTRPDLTDQPLPDADLTWYTDGSSFIRNGEREAGAAVTTESEVIWAAPLPPGTSAQRAELIALTQALKMAEGKKLTVYTDSRYAFATTHVHGEIYRRRGLLTSEGKEIKNKNEILALLEALFLPKRLSIIHCPGHQKGDSPQAKGNRLADDTAKKAATETHSSLTVLPAGKRTADGSEFEKRTADGSEFESPKKKAKVE

SEQ ID NO: 6536 - protein, 2176 aa, synthetic construct
MPAAKRVKLDGGDKKYSIGLDIGTNSVGWAVITDEYKVPSKKFKVLGNTDRHSIKKNLIGALLFDSGETAEATRLKRTARRRYTRRKNRICYLQEIFSNEMAKVDDSFFHRLEESFLVEEDKKHERHPIFGNIVDEVAYHEKYPTIYHLRKKLVDSTDKADLRLIYLALAHMIKFRGHFLIEGDLNPDNSDVDKLFIQLVQTYNQLFEENPINASGVDAKAILSARLSKSRRLENLIAQLPGEKKNGLFGNLIALSLGLTPNFKSNFDLAEDAKLQLSKDTYDDDLDNLLAQIGDQYADLFLAAKNLSDAILLSDILRVNTEITKAPLSASMIKRYDEHHQDLTLLKALVRQQLPEKYKEIFFDQSKNGYAGYIDGGASQEEFYKFIKPILEKMDGTEELLVKLNREDLLRKQRTFDNGSIPHQIHLGELHAILRRQEDFYPFLKDNREKIEKILTFRIPYYVGPLARGNSRFAWMTRKSEETITPWNFEEVVDKGASAQSFIERMTNFDKNLPNEKVLPKHSLLYEYFTVYNELTKVKYVTEGMRKPAFLSGEQKKAIVDLLFKTNRKVTVKQLKEDYFKKIECFDSVEISGVEDRFNASLGTYHDLLKIIKDKDFLDNEENEDILEDIVLTLTLFEDREMIEERLKTYAHLFDDKVMKQLKRRRYTGWGRLSRKLINGIRDKQSGKTILDFLKSDGFANRNFMQLIHDDSLTFKEDIQKAQVSGQGDSLHEHIANLAGSPAIKKGILQTVKVVDELVKVMGRHKPENIVIEMARENQTTQKGQKNSRERMKRIEEGIKELGSQILKEHPVENTQLQNEKLYLYYLQNGRDMYVDQELDINRLSDYDVDHIVPQSFLKDDSIDNKVLTRSDKARGKSDNVPSEEVVKKMKNYWRQLLNAKLITQRKFDNLTKAERGGLSELDKAGFIKRQLVETRQITKHVAQILDSRMNTKYDENDKLIREVKVITLKSKLVSDFRKDFQFYKVREINNYHHAHDAYLNAVVGTALIKKYPKLESEFVYGDYKVYDVRKMIAKSEQEIGKATAKYFFYSNIMNFFKTEITLANGEIRKRPLIETNGETGEIVWDKGRDFATVRKVLSMPQVNIVKKTEVQTGGFSKESILPKRNSDKLIARKKDWDPKKYGGFDSPTVAYSVLVVAKVEKGKSKKLKSVKELLGITIMERSSFEKNPIDFLEAKGYKEVKKDLIIKLPKYSLFELENGRKRMLASAGELQKGNELALPSKYVNFLYLASHYEKLKGSPEDNEQKQLFVEQHKHYLDEIIEQISEFSKRVILADANLDKVLSAYNKHRDKPIREQAENIIHLFTLTNLGAPAAFKYFDTTIDRKRYTSTKEVLDATLIHQSITGLYETRIDLSQLGGDGGPAPAPAPAPAPGGMNPLQLLQPLPAEIKGTKLLAHWNSGATITCIPESFLEDEQPIKKTLIKTIHGEKQQNVYYVTFKVKGRKVEAEVIASPYEYILLSPTDVPWLTQQPLQLTILVPLQEYQEKILSKTALPEDQKQQLKTLFVKYDNLWQHWENQVGHRKIRPHNIATGDYPPRPQKQYPINPKAKPSIQIVIDDLLKQGVLTPQNSTMNTPVYPVPKPDGRWRMVLDYREVNKTIPLTAAQNQHSAGILATIVRQKYKTTLDLANGFWAHPITPESYWLTAFTWQGKQYCWTRLPQGFLNSPALFNADVVDLLKEIPNVQVYVDDIYLSHDDPKEHVQQLEKVFQILLQAGYVVSLKKSEIGQKTVEFLGFNITKEGRGLTDTFKTKLLNITPPKDLKQLQSILGLLNFARNFIPNFAELVQPLYNLIAPAKGKYIEWSEENTKQLNMVIEALNTASNLEERLPEQRLVIKVNTSPSAGYVRYYNETGKKPIMYLNYVFSKAELKFSMLEKLLTTMHKALIKAMDLAMGQEILVYSPIVSMTKIQKTPLPERKALPIRWITWMTYLEDPRIQFHYDKTLPELKHIPDVYTSSQSPVKHPSQYEGVFYTDGSAIKSPDPTKSNNAGMGIVHATYKPEYQVLNQWSIPLGNHTAQMAEIAAVEFACKKALKIPGPVLVITDSFYVAESANKELPYWKSNGFVNNKKKPLKHISKWKSIAECLSMKPDITIQHEKGISLQIPVFILKGNALADKLATQGSYVVNAGKRTADGSEFEKRTADGSEFESPKKKAKVE

SEQ ID NO: 6537 - protein, 2009 aa, synthetic construct
MPAAKRVKLDGGDKKYSIGLDIGTNSVGWAVITDEYKVPSKKFKVLGNTDRHSIKKNLIGALLFDSGETAEATRLKRTARRRYTRRKNRICYLQEIFSNEMAKVDDSFFHRLEESFLVEEDKKHERHPIFGNIVDEVAYHEKYPTIYHLRKKLVDSTDKADLRLIYLALAHMIKFRGHFLIEGDLNPDNSDVDKLFIQLVQTYNQLFEENPINASGVDAKAILSARLSKSRRLENLIAQLPGEKKNGLFGNLIALSLGLTPNFKSNFDLAEDAKLQLSKDTYDDDLDNLLAQIGDQYADLFLAAKNLSDAILLSDILRVNTEITKAPLSASMIKRYDEHHQDLTLLKALVRQQLPEKYKEIFFDQSKNGYAGYIDGGASQEEFYKFIKPILEKMDGTEELLVKLNREDLLRKQRTFDNGSIPHQIHLGELHAILRRQEDFYPFLKDNREKIEKILTFRIPYYVGPLARGNSRFAWMTRKSEETITPWNFEEVVDKGASAQSFIERMTNFDKNLPNEKVLPKHSLLYEYFTVYNELTKVKYVTEGMRKPAFLSGEQKKAIVDLLFKTNRKVTVKQLKEDYFKKIECFDSVEISGVEDRFNASLGTYHDLLKIIKDKDFLDNEENEDILEDIVLTLTLFEDREMIEERLKTYAHLFDDKVMKQLKRRRYTGWGRLSRKLINGIRDKQSGKTILDFLKSDGFANRNFMQLIHDDSLTFKEDIQKAQVSGQGDSLHEHIANLAGSPAIKKGILQTVKVVDELVKVMGRHKPENIVIEMARENQTTQKGQKNSRERMKRIEEGIKELGSQILKEHPVENTQLQNEKLYLYYLQNGRDMYVDQELDINRLSDYDVDHIVPQSFLKDDSIDNKVLTRSDKARGKSDNVPSEEVVKKMKNYWRQLLNAKLITQRKFDNLTKAERGGLSELDKAGFIKRQLVETRQITKHVAQILDSRMNTKYDENDKLIREVKVITLKSKLVSDFRKDFQFYKVREINNYHHAHDAYLNAVVGTALIKKYPKLESEFVYGDYKVYDVRKMIAKSEQEIGKATAKYFFYSNIMNFFKTEITLANGEIRKRPLIETNGETGEIVWDKGRDFATVRKVLSMPQVNIVKKTEVQTGGFSKESILPKRNSDKLIARKKDWDPKKYGGFDSPTVAYSVLVVAKVEKGKSKKLKSVKELLGITIMERSSFEKNPIDFLEAKGYKEVKKDLIIKLPKYSLFELENGRKRMLASAGELQKGNELALPSKYVNFLYLASHYEKLKGSPEDNEQKQLFVEQHKHYLDEIIEQISEFSKRVILADANLDKVLSAYNKHRDKPIREQAENIIHLFTLTNLGAPAAFKYFDTTIDRKRYTSTKEVLDATLIHQSITGLYETRIDLSQLGGDGGPAPAPAPAPAPGGGLEHLPPPPEVSQFPLNPERLQALTDLVSRALEAKHIEPYQGPGNNPIFPVKKPNGKWRFIHDLRATNSVTRDLASPSPGPPDLTSLPQGLPHLRTIDLTDAFFQIPLPTIFQPYFAFTLPQPNNYGPGTRYSWRVLPQGFKNSPTLFQQQLSHILTPVRKTFPNSLIIQYMDDILLASPAPGELAALTDKVTNALTKEGLPLSPEKTQATPGPIHFLGQVISQDCITYETLPSINVKSTWSLAELQSMLGELQWVSKGTPVLRSSLHQLYLALRGHRDPRDTIKLTSIQVQALRTIQKALTLNCRSRLVNQLPILALIMLRPTGTTAVLFQTKQKWPLVWLHTPHPATSLRPWGQLLANAVIILDKYSLQHYGQVCKSFHHNISNQALTYYLHTSDQSSVAILLQHSHRFHNLGAQPSGPWRSLLQMPQIFQNIDVLRPPFTISPVVINHAPCLFSDGSASKAAFIIWDRQVIHQQVLSLPSTCSAQAGELFGLLAGLQKSQPWVALNIFLDSKFLIGHLRRMAWGAFPGPSTQCELHTQLLPLLQGKTVYVHHVRSHTLLQDPISRLNEATDALMLAPLLPLAGKRTADGSEFEKRTADGSEFESPKKKAKVE

SEQ ID NO: 6538 - protein, 2127 aa, synthetic construct
MPAAKRVKLDGGDKKYSIGLDIGTNSVGWAVITDEYKVPSKKFKVLGNTDRHSIKKNLIGALLFDSGETAEATRLKRTARRRYTRRKNRICYLQEIFSNEMAKVDDSFFHRLEESFLVEEDKKHERHPIFGNIVDEVAYHEKYPTIYHLRKKLVDSTDKADLRLIYLALAHMIKFRGHFLIEGDLNPDNSDVDKLFIQLVQTYNQLFEENPINASGVDAKAILSARLSKSRRLENLIAQLPGEKKNGLFGNLIALSLGLTPNFKSNFDLAEDAKLQLSKDTYDDDLDNLLAQIGDQYADLFLAAKNLSDAILLSDILRVNTEITKAPLSASMIKRYDEHHQDLTLLKALVRQQLPEKYKEIFFDQSKNGYAGYIDGGASQEEFYKFIKPILEKMDGTEELLVKLNREDLLRKQRTFDNGSIPHQIHLGELHAILRRQEDFYPFLKDNREKIEKILTFRIPYYVGPLARGNSRFAWMTRKSEETITPWNFEEVVDKGASAQSFIERMTNFDKNLPNEKVLPKHSLLYEYFTVYNELTKVKYVTEGMRKPAFLSGEQKKAIVDLLFKTNRKVTVKQLKEDYFKKIECFDSVEISGVEDRFNASLGTYHDLLKIIKDKDFLDNEENEDILEDIVLTLTLFEDREMIEERLKTYAHLFDDKVMKQLKRRRYTGWGRLSRKLINGIRDKQSGKTILDFLKSDGFANRNFMQLIHDDSLTFKEDIQKAQVSGQGDSLHEHIANLAGSPAIKKGILQTVKVVDELVKVMGRHKPENIVIEMARENQTTQKGQKNSRERMKRIEEGIKELGSQILKEHPVENTQLQNEKLYLYYLQNGRDMYVDQELDINRLSDYDVDHIVPQSFLKDDSIDNKVLTRSDKARGKSDNVPSEEVVKKMKNYWRQLLNAKLITQRKFDNLTKAERGGLSELDKAGFIKRQLVETRQITKHVAQILDSRMNTKYDENDKLIREVKVITLKSKLVSDFRKDFQFYKVREINNYHHAHDAYLNAVVGTALIKKYPKLESEFVYGDYKVYDVRKMIAKSEQEIGKATAKYFFYSNIMNFFKTEITLANGEIRKRPLIETNGETGEIVWDKGRDFATVRKVLSMPQVNIVKKTEVQTGGFSKESILPKRNSDKLIARKKDWDPKKYGGFDSPTVAYSVLVVAKVEKGKSKKLKSVKELLGITIMERSSFEKNPIDFLEAKGYKEVKKDLIIKLPKYSLFELENGRKRMLASAGELQKGNELALPSKYVNFLYLASHYEKLKGSPEDNEQKQLFVEQHKHYLDEIIEQISEFSKRVILADANLDKVLSAYNKHRDKPIREQAENIIHLFTLTNLGAPAAFKYFDTTIDRKRYTSTKEVLDATLIHQSITGLYETRIDLSQLGGDGGPAPAPAPAPAPGGLLGRDLLTKLKAQIQFSTEGPQVTWEDRPAMCLVLNLEEEYRLHEKPVPPSIDPSWLQLFPMVWAEKAGMGLANQVPPVVVELKSDASPVAVRQYPMSKEAREGIRPHIQRFLDLGILVPCQSPWNTPLLPVKKPGTNDYRPVQDLREVNKRVQDIHPTVPNPYNLLSSLPPSHTWYSVLDLKDAFFCLKLHPNSQPLFAFEWRDPEKGNTGQLTWTRLPQGFKNSPTLFDEALHRDLASFRALNPQVVMLQYVDDLLVAAPTYRDCKEGTRRLLQELSKLGYRVSAKKAQLCREEVTYLGYLLKGGKRWLTPARKATVMKIPTPTTPRQVREFLGTAGFCRLWIPGFASLAAPLYPLTREKVPFTWTEAHQEAFGRIKEALLSAPALALPDLTKPFALYVDEKEGVARGVLTQTLGPWRRPVAYLSKKLDPVASGWPTCLKAIAAVALLLKDADKLTLGQNVLVIAPHNLESIVRQPPDRWMTNARMTHYQSLLLNERVSFAPPAILNPATLLPVESDDTPIHICSEILAEETGTRPDLRDQPLPGVPAWYTDGSSFIMDGRRQAGAAIVDNKRTVWASNLPEGTSAQKAELIALTQALRLAEGKSINIYTDSRYAFATAHVHGAIYKQRGLLTSAGKDIKNKEEILALLEAIHLPKRVAIIHCPGHQRGTDPVATGNRKADEAAKQAAQSTRILTETTKNAGKRTADGSEFEKRTADGSEFESPKKKAKVE

SEQ ID NO: 6539 - protein, 2218 aa, synthetic construct
MPAAKRVKLDGGDKKYSIGLDIGTNSVGWAVITDEYKVPSKKFKVLGNTDRHSIKKNLIGALLFDSGETAEATRLKRTARRRYTRRKNRICYLQEIFSNEMAKVDDSFFHRLEESFLVEEDKKHERHPIFGNIVDEVAYHEKYPTIYHLRKKLVDSTDKADLRLIYLALAHMIKFRGHFLIEGDLNPDNSDVDKLFIQLVQTYNQLFEENPINASGVDAKAILSARLSKSRRLENLIAQLPGEKKNGLFGNLIALSLGLTPNFKSNFDLAEDAKLQLSKDTYDDDLDNLLAQIGDQYADLFLAAKNLSDAILLSDILRVNTEITKAPLSASMIKRYDEHHQDLTLLKALVRQQLPEKYKEIFFDQSKNGYAGYIDGGASQEEFYKFIKPILEKMDGTEELLVKLNREDLLRKQRTFDNGSIPHQIHLGELHAILRRQEDFYPFLKDNREKIEKILTFRIPYYVGPLARGNSRFAWMTRKSEETITPWNFEEVVDKGASAQSFIERMTNFDKNLPNEKVLPKHSLLYEYFTVYNELTKVKYVTEGMRKPAFLSGEQKKAIVDLLFKTNRKVTVKQLKEDYFKKIECFDSVEISGVEDRFNASLGTYHDLLKIIKDKDFLDNEENEDILEDIVLTLTLFEDREMIEERLKTYAHLFDDKVMKQLKRRRYTGWGRLSRKLINGIRDKQSGKTILDFLKSDGFANRNFMQLIHDDSLTFKEDIQKAQVSGQGDSLHEHIANLAGSPAIKKGILQTVKVVDELVKVMGRHKPENIVIEMARENQTTQKGQKNSRERMKRIEEGIKELGSQILKEHPVENTQLQNEKLYLYYLQNGRDMYVDQELDINRLSDYDVDHIVPQSFLKDDSIDNKVLTRSDKARGKSDNVPSEEVVKKMKNYWRQLLNAKLITQRKFDNLTKAERGGLSELDKAGFIKRQLVETRQITKHVAQILDSRMNTKYDENDKLIREVKVITLKSKLVSDFRKDFQFYKVREINNYHHAHDAYLNAVVGTALIKKYPKLESEFVYGDYKVYDVRKMIAKSEQEIGKATAKYFFYSNIMNFFKTEITLANGEIRKRPLIETNGETGEIVWDKGRDFATVRKVLSMPQVNIVKKTEVQTGGFSKESILPKRNSDKLIARKKDWDPKKYGGFDSPTVAYSVLVVAKVEKGKSKKLKSVKELLGITIMERSSFEKNPIDFLEAKGYKEVKKDLIIKLPKYSLFELENGRKRMLASAGELQKGNELALPSKYVNFLYLASHYEKLKGSPEDNEQKQLFVEQHKHYLDEIIEQISEFSKRVILADANLDKVLSAYNKHRDKPIREQAENIIHLFTLTNLGAPAAFKYFDTTIDRKRYTSTKEVLDATLIHQSITGLYETRIDLSQLGGDGGPAPAPAPAPAPGGTLGDQGSRGSDPLPEPRVTLTVEGIPTEFLVNTGAEHSVLTKPMGKMGSKRTVVAGATGSKVYPWTTKRLLKIGQKQVTHSFLVIPECPAPLLGRDLLTKLKAQIQFSTEGPQVTWEDRPAMCLVLNLEEEYRLHEKPVPPSIDPSWLQLFPMVWAEKAGMGLANQVPPVVVELKSDASPVAVRQYPMSKEAREGIRPHIQRFLDLGILVPCQSPWNTPLLPVKKPGTNDYRPVQDLREVNKRVQDIHPTVPNPYNLLSSLPPSHTWYSVLDLKDAFFCLKLHPNSQPLFAFEWRDPEKGNTGQLTWTRLPQGFKNSPTLFNEALHRDLASFRALNPQVVMLQYVDDLLVAAPTYRDCKEGTRRLLQELSKLGYRVSAKKAQLCREEVTYLGYLLKGGKRWLTPARKATVMKIPTPTTPRQVREFLGTAGFCRLWIPGFASLAAPLYPLTRPKVPFTWTEAHQEAFGRIKEALLSAPALALPDLTKPFALYVDEKEGVARGVLTQTLGPWRRPVAYLSKKLDPVASGWPTCLKAIAAVALLLKDADKLTLGQNVLVIAPHNLESIVRQPPDRWMTNARMTHYQSLLLNERVSFAPPAILNPATLLPVESDDTPIHICSEILAEETGTRPDLRDQPLPGVPAWYTDGSSFIMDGRRQAGAAIVDNKRTVWASNLPEGTSAQKAELIALTQALRLAEGKSINIYTDSRYAFATAHVHGAIYKQRGWLTSAGKDIKNKEEILALLEAIHLPKRVAIIHCPGHQRGTDPVATGNRKADEAAKQAAQSTRILTETTKNAGKRTADGSEFEKRTADGSEFESPKKKAKVE

SEQ ID NO: 6540 - protein, 2096 aa, synthetic construct
MPAAKRVKLDGGDKKYSIGLDIGTNSVGWAVITDEYKVPSKKFKVLGNTDRHSIKKNLIGALLFDSGETAEATRLKRTARRRYTRRKNRICYLQEIFSNEMAKVDDSFFHRLEESFLVEEDKKHERHPIFGNIVDEVAYHEKYPTIYHLRKKLVDSTDKADLRLIYLALAHMIKFRGHFLIEGDLNPDNSDVDKLFIQLVQTYNQLFEENPINASGVDAKAILSARLSKSRRLENLIAQLPGEKKNGLFGNLIALSLGLTPNFKSNFDLAEDAKLQLSKDTYDDDLDNLLAQIGDQYADLFLAAKNLSDAILLSDILRVNTEITKAPLSASMIKRYDEHHQDLTLLKALVRQQLPEKYKEIFFDQSKNGYAGYIDGGASQEEFYKFIKPILEKMDGTEELLVKLNREDLLRKQRTFDNGSIPHQIHLGELHAILRRQEDFYPFLKDNREKIEKILTFRIPYYVGPLARGNSRFAWMTRKSEETITPWNFEEVVDKGASAQSFIERMTNFDKNLPNEKVLPKHSLLYEYFTVYNELTKVKYVTEGMRKPAFLSGEQKKAIVDLLFKTNRKVTVKQLKEDYFKKIECFDSVEISGVEDRFNASLGTYHDLLKIIKDKDFLDNEENEDILEDIVLTLTLFEDREMIEERLKTYAHLFDDKVMKQLKRRRYTGWGRLSRKLINGIRDKQSGKTILDFLKSDGFANRNFMQLIHDDSLTFKEDIQKAQVSGQGDSLHEHIANLAGSPAIKKGILQTVKVVDELVKVMGRHKPENIVIEMARENQTTQKGQKNSRERMKRIEEGIKELGSQILKEHPVENTQLQNEKLYLYYLQNGRDMYVDQELDINRLSDYDVDHIVPQSFLKDDSIDNKVLTRSDKARGKSDNVPSEEVVKKMKNYWRQLLNAKLITQRKFDNLTKAERGGLSELDKAGFIKRQLVETRQITKHVAQILDSRMNTKYDENDKLIREVKVITLKSKLVSDFRKDFQFYKVREINNYHHAHDAYLNAVVGTALIKKYPKLESEFVYGDYKVYDVRKMIAKSEQEIGKATAKYFFYSNIMNFFKTEITLANGEIRKRPLIETNGETGEIVWDKGRDFATVRKVLSMPQVNIVKKTEVQTGGFSKESILPKRNSDKLIARKKDWDPKKYGGFDSPTVAYSVLVVAKVEKGKSKKLKSVKELLGITIMERSSFEKNPIDFLEAKGYKEVKKDLIIKLPKYSLFELENGRKRMLASAGELQKGNELALPSKYVNFLYLASHYEKLKGSPEDNEQKQLFVEQHKHYLDEIIEQISEFSKRVILADANLDKVLSAYNKHRDKPIREQAENIIHLFTLTNLGAPAAFKYFDTTIDRKRYTSTKEVLDATLIHQSITGLYETRIDLSQLGGDGGPAPAPAPAPAPGGLGIEDEYRLHETSTEPDVSLGSTWLSDFPQAWAETGGMGLAVRQAPLIIPLKATSTPVSIQQYPMSHEARLGIKPHIQRLLDQGILVPCQSPWNTPLLPVKKPGTNDYRPVQDLREVNKRVEDIHPTVPNPYNLLSGLPPSHQWYTVLDLKDAFFCLRLHPTSQPLFAFEWRDPGMGISGQLTWTRLPQGFKNSPTLFNEALHRDLADFRIQHPDLILLQYVDDILLAATSELDCQQGTRALLQTLGDLGYRASAKKAQICQKQVKYLGYLLREGQRWLTEARKETVMGQPVPKTPRQLREFLGKAGFCRLFIPGFAEMAAPLYPLTKPGTLFSWGPDQQKAYQEIKQALLTAPALGLPDLTKPFELFVDEKQGYAKGVLTQKLGPWRRPVAYLSKKLDPVAAGWPPCLRMVAAIAVLTKDAGKLTMGQPLVILAPHAVEALVKQPPDRWLSNARMTHYQAMLLDTDRVQFGPVVALNPATLLPLPEEGAPHDCLEILAETHGTRPDLTDQPIPDADHTWYTDGSSFLQEGQRKAGAAVTTETEVIWAGALPAGTSAQRAELIALTQALKMAEGKRLNVYTDSRYAFATAHIHGEIYRRRGWLTSEGREIKNKSEILALLKALFLPKRLSIIHCLGHQKGDSAEARGNRLADQAAREAAIKTPPDTSTLLIAGKRTADGSEFEKRTADGSEFESPKKKAKVE

SEQ ID NO: 6541 - protein, 2096 aa, synthetic construct
MPAAKRVKLDGGDKKYSIGLDIGTNSVGWAVITDEYKVPSKKFKVLGNTDRHSIKKNLIGALLFDSGETAEATRLKRTARRRYTRRKNRICYLQEIFSNEMAKVDDSFFHRLEESFLVEEDKKHERHPIFGNIVDEVAYHEKYPTIYHLRKKLVDSTDKADLRLIYLALAHMIKFRGHFLIEGDLNPDNSDVDKLFIQLVQTYNQLFEENPINASGVDAKAILSARLSKSRRLENLIAQLPGEKKNGLFGNLIALSLGLTPNFKSNFDLAEDAKLQLSKDTYDDDLDNLLAQIGDQYADLFLAAKNLSDAILLSDILRVNTEITKAPLSASMIKRYDEHHQDLTLLKALVRQQLPEKYKEIFFDQSKNGYAGYIDGGASQEEFYKFIKPILEKMDGTEELLVKLNREDLLRKQRTFDNGSIPHQIHLGELHAILRRQEDFYPFLKDNREKIEKILTFRIPYYVGPLARGNSRFAWMTRKSEETITPWNFEEVVDKGASAQSFIERMTNFDKNLPNEKVLPKHSLLYEYFTVYNELTKVKYVTEGMRKPAFLSGEQKKAIVDLLFKTNRKVTVKQLKEDYFKKIECFDSVEISGVEDRFNASLGTYHDLLKIIKDKDFLDNEENEDILEDIVLTLTLFEDREMIEERLKTYAHLFDDKVMKQLKRRRYTGWGRLSRKLINGIRDKQSGKTILDFLKSDGFANRNFMQLIHDDSLTFKEDIQKAQVSGQGDSLHEHIANLAGSPAIKKGILQTVKVVDELVKVMGRHKPENIVIEMARENQTTQKGQKNSRERMKRIEEGIKELGSQILKEHPVENTQLQNEKLYLYYLQNGRDMYVDQELDINRLSDYDVDHIVPQSFLKDDSIDNKVLTRSDKARGKSDNVPSEEVVKKMKNYWRQLLNAKLITQRKFDNLTKAERGGLSELDKAGFIKRQLVETRQITKHVAQILDSRMNTKYDENDKLIREVKVITLKSKLVSDFRKDFQFYKVREINNYHHAHDAYLNAVVGTALIKKYPKLESEFVYGDYKVYDVRKMIAKSEQEIGKATAKYFFYSNIMNFFKTEITLANGEIRKRPLIETNGETGEIVWDKGRDFATVRKVLSMPQVNIVKKTEVQTGGFSKESILPKRNSDKLIARKKDWDPKKYGGFDSPTVAYSVLVVAKVEKGKSKKLKSVKELLGITIMERSSFEKNPIDFLEAKGYKEVKKDLIIKLPKYSLFELENGRKRMLASAGELQKGNELALPSKYVNFLYLASHYEKLKGSPEDNEQKQLFVEQHKHYLDEIIEQISEFSKRVILADANLDKVLSAYNKHRDKPIREQAENIIHLFTLTNLGAPAAFKYFDTTIDRKRYTSTKEVLDATLIHQSITGLYETRIDLSQLGGDGGPAPAPAPAPAPGGTLGIEDEYRLHETSTEPDVSLGSTWLSDFPQAWAETGGMGLAVRQAPLIIPLKATSTPVSIQQYPMSHEARLGIKPHIQRLLDQGILVPCQSPWNTPLLPVKKPGTNDYRPVQDLREVNKRVEDIHPTVPNPYNLLSGLPPSHQWYTVLDLKDAFFCLRLHPTSQPLFAFEWRDPGMGISGQLTWTRLPQGFKNSPTLFDEALHRDLADFRIQHPDLILLQYVDDILLAATSELDCQQGTRALLQTLGDLGYRASAKKAQICQKQVKYLGYLLREGQRWLTEARKETVMGQPVPKTPRQLREFLGTAGFCRLWIPGFAEMAAPLYPLTKTGTLFSWGPDQQKAYQEIKQALLTAPALGLPDLTKPFELFVDEKQGYAKGVLTQKLGPWRRPVAYLSKKLDPVAAGWPPCLRMVAAIAVLTKDAGKLTMGQPLVILAPHAVEALVKQPPDRWLSNARMTHYQAMLLDTDRVQFGPVVALNPATLLPLPEEGAPHDCLEILAETHGTRPDLTDQPIPDADHTWYTDGSSFLQEGQRKAGAAVTTETEVIWAGALPAGTSAQRAELIALTQALKMAEGKRLNVYTDSRYAFATAHIHGEIYRRRGLLTSEGREIKNKSEILALLKALFLPKRLSIIHCLGHQKGDSAEARGNRLADQAAREAAIKTPPDTSTLLAGKRTADGSEFEKRTADGSEFESPKKKAKVE

SEQ ID NO: 6542 - protein, 2096 aa, synthetic construct; identical to SEQ ID NO: 6540

SEQ ID NO: 6543 - protein, 2096 aa, synthetic construct
MPAAKRVKLDGGDKKYSIGLDIGTNSVGWAVITDEYKVPSKKFKVLGNTDRHSIKKNLIGALLFDSGETAEATRLKRTARRRYTRRKNRICYLQEIFSNEMAKVDDSFFHRLEESFLVEEDKKHERHPIFGNIVDEVAYHEKYPTIYHLRKKLVDSTDKADLRLIYLALAHMIKFRGHFLIEGDLNPDNSDVDKLFIQLVQTYNQLFEENPINASGVDAKAILSARLSKSRRLENLIAQLPGEKKNGLFGNLIALSLGLTPNFKSNFDLAEDAKLQLSKDTYDDDLDNLLAQIGDQYADLFLAAKNLSDAILLSDILRVNTEITKAPLSASMIKRYDEHHQDLTLLKALVRQQLPEKYKEIFFDQSKNGYAGYIDGGASQEEFYKFIKPILEKMDGTEELLVKLNREDLLRKQRTFDNGSIPHQIHLGELHAILRRQEDFYPFLKDNREKIEKILTFRIPYYVGPLARGNSRFAWMTRKSEETITPWNFEEVVDKGASAQSFIERMTNFDKNLPNEKVLPKHSLLYEYFTVYNELTKVKYVTEGMRKPAFLSGEQKKAIVDLLFKTNRKVTVKQLKEDYFKKIECFDSVEISGVEDRFNASLGTYHDLLKIIKDKDFLDNEENEDILEDIVLTLTLFEDREMIEERLKTYAHLFDDKVMKQLKRRRYTGWGRLSRKLINGIRDKQSGKTILDFLKSDGFANRNFMQLIHDDSLTFKEDIQKAQVSGQGDSLHEHIANLAGSPAIKKGILQTVKVVDELVKVMGRHKPENIVIEMARENQTTQKGQKNSRERMKRIEEGIKELGSQILKEHPVENTQLQNEKLYLYYLQNGRDMYVDQELDINRLSDYDVDHIVPQSFLKDDSIDNKVLTRSDKARGKSDNVPSEEVVKKMKNYWRQLLNAKLITQRKFDNLTKAERGGLSELDKAGFIKRQLVETRQITKHVAQILDSRMNTKYDENDKLIREVKVITLKSKLVSDFRKDFQFYKVREINNYHHAHDAYLNAVVGTALIKKYPKLESEFVYGDYKVYDVRKMIAKSEQEIGKATAKYFFYSNIMNFFKTEITLANGEIRKRPLIETNGETGEIVWDKGRDFATVRKVLSMPQVNIVKKTEVQTGGFSKESILPKRNSDKLIARKKDWDPKKYGGFDSPTVAYSVLVVAKVEKGKSKKLKSVKELLGITIMERSSFEKNPIDFLEAKGYKEVKKDLIIKLPKYSLFELENGRKRMLASAGELQKGNELALPSKYVNFLYLASHYEKLKGSPEDNEQKQLFVEQHKHYLDEIIEQISEFSKRVILADANLDKVLSAYNKHRDKPIREQAENIIHLFTLTNLGAPAAFKYFDTTIDRKRYTSTKEVLDATLIHQSITGLYETRIDLSQLGGDGGPAPAPAPAPAPGGTLNIEDEYRLHETSKGPDVPLGSTWLSDFPQAWAETGGMGLAVRQAPLIIPLKATSTPVSIKQYPMSQEARLGIKPHIQRLLDQGILVPCQSPWNTPLLPVKKPGTNDYRPVQDLREVNKRVEDIHPTVPNPYNLLSGLPPSHQWYTVLDLKDAFFCLRLHPTSQSLFAFEWRDPEMGISGQLTWTRLPQGFKNSPTLFNEALHRDLADFRIQHPDLILLQYVDDLLLAATSELDCQQGTRALLQTLGDLGYRASAKKAQICQKQVKYLGYLLKEGQRWLTEARKETVMGQPTPKTPRQLREFLGTAGFCRLWIPGFAEMAAPLYPLTKPGTLFEWGPDQQKAYQEIKQALLTAPALGLPDLTKPFELFVDEKQGYAKGVLTQKLGPWRRPVAYLSKKLDPVAAGWPPCLRMVAAIAVLTKDAGKLTMGQPLVILAPHAVEALVKQPPDRWLSNARMTHYQALLLDTDRVQFGPIVALNPATLLPLPEEGLQHDCLDILAEAHGTRPDLTDQPLPDADHTWYTDGSSFLQEGQRKAGAAVTTETEVVWAKALPAGTSAQRAELIALTQALKMAEGKKLNVYTDSRYAFATAHIHGEIYRRRGWLTSEGKEIKNKDEILALLKALFLPKRLSIIHCPGHQKGNRAEARGNRMADQAAREVATRETPETSTLLAGKRTADGSEFEKRTADGSEFESPKKKAKVE

SEQ ID NO: 6544 - protein, 2090 aa, synthetic construct
MPAAKRVKLDGGDKKYSIGLDIGTNSVGWAVITDEYKVPSKKFKVLGNTDRHSIKKNLIGALLFDSGETAEATRLKRTARRRYTRRKNRICYLQEIFSNEMAKVDDSFFHRLEESFLVEEDKKHERHPIFGNIVDEVAYHEKYPTIYHLRKKLVDSTDKADLRLIYLALAHMIKFRGHFLIEGDLNPDNSDVDKLFIQLVQTYNQLFEENPINASGVDAKAILSARLSKSRRLENLIAQLPGEKKNGLFGNLIALSLGLTPNFKSNFDLAEDAKLQLSKDTYDDDLDNLLAQIGDQYADLFLAAKNLSDAILLSDILRVNTEITKAPLSASMIKRYDEHHQDLTLLKALVRQQLPEKYKEIFFDQSKNGYAGYIDGGASQEEFYKFIKPILEKMDGTEELLVKLNREDLLRKQRTFDNGSIPHQIHLGELHAILRRQEDFYPFLKDNREKIEKILTFRIPYYVGPLARGNSRFAWMTRKSEETITPWNFEEVVDKGASAQSFIERMTNFDKNLPNEKVLPKHSLLYEYFTVYNELTKVKYVTEGMRKPAFLSGEQKKAIVDLLFKTNRKVTVKQLKEDYFKKIECFDSVEISGVEDRFNASLGTYHDLLKIIKDKDFLDNEENEDILEDIVLTLTLFEDREMIEERLKTYAHLFDDKVMKQLKRRRYTGWGRLSRKLINGIRDKQSGKTILDFLKSDGFANRNFMQLIHDDSLTFKEDIQKAQVSGQGDSLHEHIANLAGSPAIKKGILQTVKVVDELVKVMGRHKPENIVIEMARENQTTQKGQKNSRERMKRIEEGIKELGSQILKEHPVENTQLQNEKLYLYYLQNGRDMYVDQELDINRLSDYDVDHIVPQSFLKDDSIDNKVLTRSDKARGKSDNVPSEEVVKKMKNYWRQLLNAKLITQRKFDNLTKAERGGLSELDKAGFIKRQLVETRQITKHVAQILDSRMNTKYDENDKLIREVKVITLKSKLVSDFRKDFQFYKVREINNYHHAHDAYLNAVVGTALIKKYPKLESEFVYGDYKVYDVRKMIAKSEQEIGKATAKYFFYSNIMNFFKTEITLANGEIRKRPLIETNGETGEIVWDKGRDFATVRKVLSMPQVNIVKKTEVQTGGFSKESILPKRNSDKLIARKKDWDPKKYGGFDSPTVAYSVLVVAKVEKGKSKKLKSVKELLGITIMERSSFEKNPIDFLEAKGYKEVKKDLIIKLPKYSLFELENGRKRMLASAGELQKGNELALPSKYVNFLYLASHYEKLKGSPEDNEQKQLFVEQHKHYLDEIIEQISEFSKRVILADANLDKVLSAYNKHRDKPIREQAENIIHLFTLTNLGAPAAFKYFDTTIDRKRYTSTKEVLDATLIHQSITGLYETRIDLSQLGGDGGPAPAPAPAPAPGGTLQLDDEYRLYSPLVKPDQNIQFWLEQFPQAWAETAGMGLAKQVPPQVIQLKASATPVSVRQYPLSKEAQEGIRPHVQRLIQQGILVPVQSPWNTPLLPVRKPGTNDYRPVQDLREVNKRVQDIHPTVPNPYNLLCALPPQRSWYTVLDLKDAFFCLRLHPTSQPLFAFEWRDPGTGRTGQLTWTRLPQGFKNSPTIFDEALHRDLANFRIQHPQVTLLQYVDDLLLAGATKQDCLEGTKALLLELSDLGYRASAKKAQICRREVTYLGYSLRDGQRWLTEARKKTVVQIPAPTTAKQVREFLGTAGFCRLWIPGFATLAAPLYPLTKEKGEFSWAPEHQKAFDAIKKALLSAPALALPDVTKPFTLYVDERKGVARGVLTQTLGPWRRPVAYLSKKLDPVASGWPVCLKAIAAVAILVKDADKLTLGQNITVIAPHALENIVRQPPDRWMTNARMTHYQSLLLTERVTFAPPAALNPATLLPEETDEPVTHDCHQLLIEETGVRKDLTDIPLTGEVLTWFTDGSSYVVEGKRMAGAAVVDGTRTIWASSLPEGTSAQKAELMALTQALRLAEGKSINIYTDSRYAFATAHVHGAIYKQRGLLTSAGREIKNKEEILSLLEALHLPKRLAIIHCPGHQKAKDPISRGNQMADRVAKQAAQGVNLLAGKRTADGSEFEKRTADGSEFESPKKKAKVE

SEQ ID NO: 6545 - protein, 2090 aa, synthetic construct; identical to SEQ ID NO: 6544

SEQ ID NO: 6546 - protein, 2087 aa, synthetic construct
MPAAKRVKLDGGDKKYSIGLDIGTNSVGWAVITDEYKVPSKKFKVLGNTDRHSIKKNLIGALLFDSGETAEATRLKRTARRRYTRRKNRICYLQEIFSNEMAKVDDSFFHRLEESFLVEEDKKHERHPIFGNIVDEVAYHEKYPTIYHLRKKLVDSTDKADLRLIYLALAHMIKFRGHFLIEGDLNPDNSDVDKLFIQLVQTYNQLFEENPINASGVDAKAILSARLSKSRRLENLIAQLPGEKKNGLFGNLIALSLGLTPNFKSNFDLAEDAKLQLSKDTYDDDLDNLLAQIGDQYADLFLAAKNLSDAILLSDILRVNTEITKAPLSASMIKRYDEHHQDLTLLKALVRQQLPEKYKEIFFDQSKNGYAGYIDGGASQEEFYKFIKPILEKMDGTEELLVKLNREDLLRKQRTFDNGSIPHQIHLGELHAILRRQEDFYPFLKDNREKIEKILTFRIPYYVGPLARGNSRFAWMTRKSEETITPWNFEEVVDKGASAQSFIERMTNFDKNLPNEKVLPKHSLLYEYFTVYNELTKVKYVTEGMRKPAFLSGEQKKAIVDLLFKTNRKVTVKQLKEDYFKKIECFDSVEISGVEDRFNASLGTYHDLLKIIKDKDFLDNEENEDILEDIVLTLTLFEDREMIEERLKTYAHLFDDKVMKQLKRRRYTGWGRLSRKLINGIRDKQSGKTILDFLKSDGFANRNFMQLIHDDSLTFKEDIQKAQVSGQGDSLHEHIANLAGSPAIKKGILQTVKVVDELVKVMGRHKPENIVIEMARENQTTQKGQKNSRERMKRIEEGIKELGSQILKEHPVENTQLQNEKLYLYYLQNGRDMYVDQELDINRLSDYDVDHIVPQSFLKDDSIDNKVLTRSDKARGKSDNVPSEEVVKKMKNYWRQLLNAKLITQRKFDNLTKAERGGLSELDKAGFIKRQLVETRQITKHVAQILDSRMNTKYDENDKLIREVKVITLKSKLVSDFRKDFQFYKVREINNYHHAHDAYLNAVVGTALIKKYPKLESEFVYGDYKVYDVRKMIAKSEQEIGKATAKYFFYSNIMNFFKTEITLANGEIRKRPLIETNGETGEIVWDKGRDFATVRKVLSMPQVNIVKKTEVQTGGFSKESILPKRNSDKLIARKKDWDPKKYGGFDSPTVAYSVLVVAKVEKGKSKKLKSVKELLGITIMERSSFEKNPIDFLEAKGYKEVKKDLIIKLPKYSLFELENGRKRMLASAGELQKGNELALPSKYVNFLYLASHYEKLKGSPEDNEQKQLFVEQHKHYLDEIIEQISEFSKRVILADANLDKVLSAYNKHRDKPIREQAENIIHLFTLTNLGAPAAFKYFDTTIDRKRYTSTKEVLDATLIHQSITGLYETRIDLSQLGGDGGPAPAPAPAPAPGGVPWLMKKPLQLTVLVPLHEYQERLLQQTALPKEQKELLQKLFLKYDALWQHWENQVGHRRIKPHNIATGTLAPRPQKQYPINPKAKPSIQIVIDDLLKQGVLIQQNSTMNTPVYPVPKPDGKWRMVLDYREVNKTIPLIAAQNQHSAGILSSIYRGKYKTTLDLTNGFWAHPITPESYWLTAFTWQGKQYCWTRLPQGFLNSPALFNADVVDLLKEIPNVQAYVDDIYISHDDPQEHLEQLEKIFSILLNAGYVVSLKKSEIAQREVEFLGFNITKEGRGLTDTFKQKLLNITPPKDLKQLQSILGKLNFARNFIPNYSELVKPLYTIVAPANGKFISWTEDNSNQLQHIISVLNQADNLEERNPETRLIIKVNSSPSAGYIRYYNEGSKRPIMYVNYIFSKAEAKFTQTEKLLTTMHKGLIKAMDLAMGQEILVYSPIVSMTKIQRTPLPERKALPVRWITWMTYLEDPRIQFHYDKSLPELQQIPNVTEDVIAKTKHPSEFAMVFYTDGSAIKHPDVNKSHSAGMGIAQVQFIPEYKIVHQWSIPLGDHTAQLAEIAAVEFACKKALKISGPVLIVTDSFYVAESANKELPYWKSNGFLNNKKKPLRHVSKWKSIAECLQLKPDIIIMHEKGHQQPMTTLHTEGNNLADKLATQGSYVVHAGKRTADGSEFEKRTADGSEFESPKKKAKVE

SEQ ID NO: 6547 - protein, 2176 aa, synthetic construct
MPAAKRVKLDGGDKKYSIGLDIGTNSVGWAVITDEYKVPSKKFKVLGNTDRHSIKKNLIGALLFDSGETAEATRLKRTARRRYTRRKNRICYLQEIFSNEMAKVDDSFFHRLEESFLVEEDKKHERHPIFGNIVDEVAYHEKYPTIYHLRKKLVDSTDKADLRLIYLALAHMIKFRGHFLIEGDLNPDNSDVDKLFIQLVQTYNQLFEENPINASGVDAKAILSARLSKSRRLENLIAQLPGEKKNGLFGNLIALSLGLTPNFKSNFDLAEDAKLQLSKDTYDDDLDNLLAQIGDQYADLFLAAKNLSDAILLSDILRVNTEITKAPLSASMIKRYDEHHQDLTLLKALVRQQLPEKYKEIFFDQSKNGYAGYIDGGASQEEFYKFIKPILEKMDGTEELLVKLNREDLLRKQRTFDNGSIPHQIHLGELHAILRRQEDFYPFLKDNREKIEKILTFRIPYYVGPLARGNSRFAWMTRKSEETITPWNFEEVVDKGASAQSFIERMTNFDKNLPNEKVLPKHSLLYEYFTVYNELTKVKYVTEGMRKPAFLSGEQKKAIVDLLFKTNRKVTVKQLKEDYFKKIECFDSVEISGVEDRFNASLGTYHDLLKIIKDKDFLDNEENEDILEDIVLTLTLFEDREMIEERLKTYAHLFDDKVMKQLKRRRYTGWGRLSRKLINGIRDKQSGKTILDFLKSDGFANRNFMQLIHDDSLTFKEDIQKAQVSGQGDSLHEHIANLAGSPAIKKGILQTVKVVDELVKVMGRHKPENIVIEMARENQTTQKGQKNSRERMKRIEEGIKELGSQILKEHPVENTQLQNEKLYLYYLQNGRDMYVDQELDINRLSDYDVDHIVPQSFLKDDSIDNKVLTRSDKARGKSDNVPSEEVVKKMKNYWRQLLNAKLITQRKFDNLTKAERGGLSELDKAGFIKRQLVETRQITKHVAQILDSRMNTKYDENDKLIREVKVITLKSKLVSDFRKDFQFYKVREINNYHHAHDAYLNAVVGTALIKKYPKLESEFVYGDYKVYDVRKMIAKSEQEIGKATAKYFFYSNIMNFFKTEITLANGEIRKRPLIETNGETGEIVWDKGRDFATVRKVLSMPQVNIVKKTEVQTGGFSKESILPKRNSDKLIARKKDWDPKKYGGFDSPTVAYSVLVVAKVEKGKSKKLKSVKELLGITIMERSSFEKNPIDFLEAKGYKEVKKDLIIKLPKYSLFELENGRKRMLASAGELQKGNELALPSKYVNFLYLASHYEKLKGSPEDNEQKQLFVEQHKHYLDEIIEQISEFSKRVILADANLDKVLSAYNKHRDKPIREQAENIIHLFTLTNLGAPAAFKYFDTTIDRKRYTSTKEVLDATLIHQSITGLYETRIDLSQLGGDGGPAPAPAPAPAPGGMDPLQLLQPLEAEIKGTKLKAHWNSGATITCVPEAFLEDERPIQTMLIKTIHGEKQQDVYYLTFKVQGRKVEAEVLASPYDYILLNPSDVPWLMKKPLQLTVLVPLHEYQERLLQQTALPKEQKELLQKLFLKYDALWQHWENQVGHRRIKPHNIATGTLAPRPQKQYPINPKAKPSIQIVIDDLLKQGVLIQQNSTMNTPVYPVPKPDGKWRMVLDYREVNKTIPLIAAQNQHSAGILSSIYRGKYKTTLDLTNGFWAHPITPESYWLTAFTWQGKQYCWTRLPQGFLNSPALFNADVVDLLKEIPNVQAYVDDIYISHDDPQEHLEQLEKIFSILLNAGYVVSLKKSEIAQREVEFLGFNITKEGRGLTDTFKQKLLNITPPKDLKQLQSILGLLNFARNFIPNYSELVKPLYTIVAPANGKFISWTEDNSNQLQHIISVLNQADNLEERNPETRLIIKVNSSPSAGYIRYYNEGSKRPIMYVNYIFSKAEAKFTQTEKLLTTMHKGLIKAMDLAMGQEILVYSPIVSMTKIQRTPLPERKALPVRWITWMTYLEDPRIQFHYDKSLPELQQIPNVTEDVIAKTKHPSEFAMVFYTDGSAIKHPDVNKSHSAGMGIAQVQFIPEYKIVHQWSIPLGDHTAQLAEIAAVEFACKKALKISGPVLIVTDSFYVAESANKELPYWKSNGFLNNKKKPLRHVSKWKSIAECLQLKPDIIIMHEKGHQQPMTTLHTEGNNLADKLATQGSYVVHAGKRTADGSEFEKRTADGSEFESPKKKAKVE

SEQ ID NO: 6548 - protein, 2176 aa, synthetic construct
MPAAKRVKLDGGDKKYSIGLDIGTNSVGWAVITDEYKVPSKKFKVLGNTDRHSIKKNLIGALLFDSGETAEATRLKRTARRRYTRRKNRICYLQEIFSNEMAKVDDSFFHRLEESFLVEEDKKHERHPIFGNIVDEVAYHEKYPTIYHLRKKLVDSTDKADLRLIYLALAHMIKFRGHFLIEGDLNPDNSDVDKLFIQLVQTYNQLFEENPINASGVDAKAILSARLSKSRRLENLIAQLPGEKKNGLFGNLIALSLGLTPNFKSNFDLAEDAKLQLSKDTYDDDLDNLLAQIGDQYADLFLAAKNLSDAILLSDILRVNTEITKAPLSASMIKRYDEHHQDLTLLKALVRQQLPEKYKEIFFDQSKNGYAGYIDGGASQEEFYKFIKPILEKMDGTEELLVKLNREDLLRKQRTFDNGSIPHQIHLGELHAILRRQEDFYPFLKDNREKIEKILTFRIPYYVGPLARGNSRFAWMTRKSEETITPWNFEEVVDKGASAQSFIERMTNFDKNLPNEKVLPKHSLLYEYFTVYNELTKVKYVTEGMRKPAFLSGEQKKAIVDLLFKTNRKVTVKQLKEDYFKKIECFDSVEISGVEDRFNASLGTYHDLLKIIKDKDFLDNEENEDILEDIVLTLTLFEDREMIEERLKTYAHLFDDKVMKQLKRRRYTGWGRLSRKLINGIRDKQSGKTILDFLKSDGFANRNFMQLIHDDSLTFKEDIQKAQVSGQGDSLHEHIANLAGSPAIKKGILQTVKVVDELVKVMGRHKPENIVIEMARENQTTQKGQKNSRERMKRIEEGIKELGSQILKEHPVENTQLQNEKLYLYYLQNGRDMYVDQELDINRLSDYDVDHIVPQSFLKDDSIDNKVLTRSDKARGKSDNVPSEEVVKKMKNYWRQLLNAKLITQRKFDNLTKAERGGLSELDKAGFIKRQLVETRQITKHVAQILDSRMNTKYDENDKLIREVKVITLKSKLVSDFRKDFQFYKVREINNYHHAHDAYLNAVVGTALIKKYPKLESEFVYGDYKVYDVRKMIAKSEQEIGKATAKYFFYSNIMNFFKTEITLANGEIRKRPLIETNGETGEIVWDKGRDFATVRKVLSMPQVNIVKKTEVQTGGFSKESILPKRNSDKLIARKKDWDPKKYGGFDSPTVAYSVLVVAKVEKGKSKKLKSVKELLGITIMERSSFEKNPIDFLEAKGYKEVKKDLIIKLPKYSLFELENGRKRMLASAGELQKGNELALPSKYVNFLYLASHYEKLKGSPEDNEQKQLFVEQHKHYLDEIIEQISEFSKRVILADANLDKVLSAYNKHRDKPIREQAENIIHLFTLTNLGAPAAFKYFDTTIDRKRYTSTKEVLDATLIHQSITGLYETRIDLSQLGGDGGPAPAPAPAPAPGGMDPLQLLQPLEAEIKGTKLKAHWNSGATITCVPQAFLEEEVPIKNIWIKTIHGEKEQPVYYLTFKIQGRKVEAEVISSPYDYILVSPSDIPWLMKKPLQLTTLVPLQEYEERLLKQTMLTGSYKEKLQSLFLKYDALWQHWENQVGHRRIKPHHIATGTVNPRPQKQYPINPKAKASIQTVINDLLKQGVLIQQNSIMNTPVYPVPKPDGKWRMVLDYREVNKTIPLIAAQNQHSAGILSSIFRGKYKTTLDLSNGFWAHSITPESYWLTAFTWLGQQYCWTRLPQGFLNSPALFNADVVDLLKEVPNVQVYVDDIYISHDDPREHLEQLEKVFSLLLNAGYVVSLKKSEIAQHEVEFLGFNITKEGRGLTETFKQKLLNITPPRDLKQLQSILGLLNFARNFIPNFSELVKPLYNIIATAPGKYITWTTDNSQQLQNIISMLNSAENLEERNPEVRLIMKVNTSPSAGYIRFYNEFAKRPIMYLNYVYTKAEVKFTNTEKLLTTIHKGLIKALDLGMGQEILVYSPIVSMTKIQKTPLPERKALPIRWITWMSYLEDPRIQFHYDKTLPELQQVPTVTDDIIAKIKHPSEFSMVFYTDGSAIKHPNVNKSHNAGMGIAQVQFKPEFTVINTWSIPLGDHTAQLAEVAAVEFACKKALKIDGPVLIVTDSFYVAESVNKELPYWQSNGFFNNKKKPLKHVSKWKSIADCIQLKPDIIIIHEKGHQPTASTFHTEGNNLADKLATQGSYVVNAGKRTADGSEFEKRTADGSEFESPKKKAKVE

SEQ ID NO: 6549 - protein, 2094 aa, synthetic construct
MPAAKRVKLDGGDKKYSIGLDIGTNSVGWAVITDEYKVPSKKFKVLGNTDRHSIKKNLIGALLFDSGETAEATRLKRTARRRYTRRKNRICYLQEIFSNEMAKVDDSFFHRLEESFLVEEDKKHERHPIFGNIVDEVAYHEKYPTIYHLRKKLVDSTDKADLRLIYLALAHMIKFRGHFLIEGDLNPDNSDVDKLFIQLVQTYNQLFEENPINASGVDAKAILSARLSKSRRLENLIAQLPGEKKNGLFGNLIALSLGLTPNFKSNFDLAEDAKLQLSKDTYDDDLDNLLAQIGDQYADLFLAAKNLSDAILLSDILRVNTEITKAPLSASMIKRYDEHHQDLTLLKALVRQQLPEKYKEIFFDQSKNGYAGYIDGGASQEEFYKFIKPILEKMDGTEELLVKLNREDLLRKQRTFDNGSIPHQIHLGELHAILRRQEDFYPFLKDNREKIEKILTFRIPYYVGPLARGNSRFAWMTRKSEETITPWNFEEVVDKGASAQSFIERMTNFDKNLPNEKVLPKHSLLYEYFTVYNELTKVKYVTEGMRKPAFLSGEQKKAIVDLLFKTNRKVTVKQLKEDYFKKIECFDSVEISGVEDRFNASLGTYHDLLKIIKDKDFLDNEENEDILEDIVLTLTLFEDREMIEERLKTYAHLFDDKVMKQLKRRRYTGWGRLSRKLINGIRDKQSGKTILDFLKSDGFANRNFMQLIHDDSLTFKEDIQKAQVSGQGDSLHEHIANLAGSPAIKKGILQTVKVVDELVKVMGRHKPENIVIEMARENQTTQKGQKNSRERMKRIEEGIKELGSQILKEHPVENTQLQNEKLYLYYLQNGRDMYVDQELDINRLSDYDVDHIVPQSFLKDDSIDNKVLTRSDKARGKSDNVPSEEVVKKMKNYWRQLLNAKLITQRKFDNLTKAERGGLSELDKAGFIKRQLVETRQITKHVAQILDSRMNTKYDENDKLIREVKVITLKSKLVSDFRKDFQFYKVREINNYHHAHDAYLNAVVGTALIKKYPKLESEFVYGDYKVYDVRKMIAKSEQEIGKATAKYFFYSNIMNFFKTEITLANGEIRKRPLIETNGETGEIVWDKGRDFATVRKVLSMPQVNIVKKTEVQTGGFSKESILPKRNSDKLIARKKDWDPKKYGGFDSPTVAYSVLVVAKVEKGKSKKLKSVKELLGITIMERSSFEKNPIDFLEAKGYKEVKKDLIIKLPKYSLFELENGRKRMLASAGELQKGNELALPSKYVNFLYLASHYEKLKGSPEDNEQKQLFVEQHKHYLDEIIEQISEFSKRVILADANLDKVLSAYNKHRDKPIREQAENIIHLFTLTNLGAPAAFKYFDTTIDRKRYTSTKEVLDATLIHQSITGLYETRIDLSQLGGDGGPAPAPAPAPAPGGVLNLEEEYRLHEKPVPSSIDPSWLQLFPTVWAERAGMGLANQVPPVVVELRSGASPVAVRQYPMSKEAREGIRPHIQRFLDLGVLVPCQSPWNTPLLPVKKPGTNDYRPVQDLREINKRVQDIHPTVPNPYNLLSSLPPSHTWYSVLDLKDAFFCLKLHPNSQPLFAFEWRDPEKGNTGQLTWTRLPQGFKNSPTLFNEALHRDLAPFRALNPQVVLLQYVDDLLVAAPTYRDCKEGTQKLLQELSKLGYRVSAKKAQLCQKEVTYLGYLLKEGKRWLTPARKATVMKIPPPTTPRQVREFLGKAGFCRLFIPGFASLAAPLYPLTKPSIPFIWTEEHQKAFDRIKEALLSAPALALPDLTKPFTLYVDERAGVARGVLTQTLGPWRRPVAYLSKKLDPVASGWPTCLKAVAAVALLLKDADKLTLGQNVTVIASHSLESIVRQPPDRWMTNARMTHYQSLLLNERVSFAPPAVLNPATLLPVESEATPVHRCSEILAEETGTRRDLKDQPLPGVPAWYTDGSSFIAEGKRRAGAAIVDGKRTVWASSLPEGTSAQKAELVALTQALRLAEGKDINIYTDSRYAFATAHIHGAIYKQRGWLTSAGKDIKNKEEILALLEAIHLPKRVAIIHCPGHQKGNDPVATGNRRADEAAKQAALSTRVLAETTKPAGKRTADGSEFEKRTADGSEFESPKKKAKVE

SEQ ID NO: 6550 - protein, 2096 aa, synthetic construct
MPAAKRVKLDGGDKKYSIGLDIGTNSVGWAVITDEYKVPSKKFKVLGNTDRHSIKKNLIGALLFDSGETAEATRLKRTARRRYTRRKNRICYLQEIFSNEMAKVDDSFFHRLEESFLVEEDKKHERHPIFGNIVDEVAYHEKYPTIYHLRKKLVDSTDKADLRLIYLALAHMIKFRGHFLIEGDLNPDNSDVDKLFIQLVQTYNQLFEENPINASGVDAKAILSARLSKSRRLENLIAQLPGEKKNGLFGNLIALSLGLTPNFKSNFDLAEDAKLQLSKDTYDDDLDNLLAQIGDQYADLFLAAKNLSDAILLSDILRVNTEITKAPLSASMIKRYDEHHQDLTLLKALVRQQLPEKYKEIFFDQSKNGYAGYIDGGASQEEFYKFIKPILEKMDGTEELLVKLNREDLLRKQRTFDNGSIPHQIHLGELHAILRRQEDFYPFLKDNREKIEKILTFRIPYYVGPLARGNSRFAWMTRKSEETITPWNFEEVVDKGASAQSFIERMTNFDKNLPNEKVLPKHSLLYEYFTVYNELTKVKYVTEGMRKPAFLSGEQKKAIVDLLFKTNRKVTVKQLKEDYFKKIECFDSVEISGVEDRFNASLGTYHDLLKIIKDKDFLDNEENEDILEDIVLTLTLFEDREMIEERLKTYAHLFDDKVMKQLKRRRYTGWGRLSRKLINGIRDKQSGKTILDFLKSDGFANRNFMQLIHDDSLTFKEDIQKAQVSGQGDSLHEHIANLAGSPAIKKGILQTVKVVDELVKVMGRHKPENIVIEMARENQTTQKGQKNSRERMKRIEEGIKELGSQILKEHPVENTQLQNEKLYLYYLQNGRDMYVDQELDINRLSDYDVDHIVPQSFLKDDSIDNKVLTRSDKARGKSDNVPSEEVVKKMKNYWRQLLNAKLITQRKFDNLTKAERGGLSELDKAGFIKRQLVETRQITKHVAQILDSRMNTKYDENDKLIREVKVITLKSKLVSDFRKDFQFYKVREINNYHHAHDAYLNAVVGTALIKKYPKLESEFVYGDYKVYDVRKMIAKSEQEIGKATAKYFFYSNIMNFFKTEITLANGEIRKRPLIETNGETGEIVWDKGRDFATVRKVLSMPQVNIVKKTEVQTGGFSKESILPKRNSDKLIARKKDWDPKKYGGFDSPTVAYSVLVVAKVEKGKSKKLKSVKELLGITIMERSSFEKNPIDFLEAKGYKEVKKDLIIKLPKYSLFELENGRKRMLASAGELQKGNELALPSKYVNFLYLASHYEKLKGSPEDNEQKQLFVEQHKHYLDEIIEQISEFSKRVILADANLDKVLSAYNKHRDKPIREQAENIIHLFTLTNLGAPAAFKYFDTTIDRKRYTSTKEVLDATLIHQSITGLYETRIDLSQLGGDGGPAPAPAPAPAPGGTLNIEDEYRLHETSKEPDVPLGSTWLSDFPQAWAETGGMGLAVRQAPLIIPLKATSTPVSIKQYPMSQEARLGIKPHIQRLLDQGILVPCQSPWNTPLLPVKKPGTNDYRPVQDLREVNKRVEDIHPTVPNPYNLLSGLPPSHQWYTVLDLKDAFFCLRLHPTSQPLFAFEWRDPEMGISGQLTWTRLPQGFKNSPTLFDEALHRDLADFRIQHPDLILLQYVDDLLLAATSEQDCQRGTRALLQTLGNLGYRASAKKAQICQKQVKYLGYLLKEGQRWLTEARKETVMGQPTPKTPRQLREFLGTAGFCRLWIPGFAEMAAPLYPLTKTGTLFNWGPDQQKAYQEIKQALLTAPALGLPDLTKPFELFVDEKQGYAKGVLTQKLGPWRRPVAYLSKKLDPVAAGWPPCLRMVAAIAVLTKDAGKLTMGQPLVILAPHAVEALVKQPPDRWLSNARMTHYQAMLLDTDRVQFGPVVALNPATLLPLPEKEAPHDCLEILAETHGTRPDLTDQPIPDADYTWYTDGSSFLQEGQRRAGAAVTTETEVIWARALPAGTSAQRAELIALTQALKMAEGKKLNVYTDSRYAFATAHVHGEIYRRRGLLTSEGREIKNKNEILALLKALFLPKRLSIIHCPGHQKGNSAEARGNRMADQAAREAAMKAVLETSTLLAGKRTADGSEFEKRTADGSEFESPKKKAKVE

SEQ ID NO: 6551 - protein, 2096 aa, synthetic construct
MPAAKRVKLDGGDKKYSIGLDIGTNSVGWAVITDEYKVPSKKFKVLGNTDRHSIKKNLIGALLFDSGETAEATRLKRTARRRYTRRKNRICYLQEIFSNEMAKVDDSFFHRLEESFLVEEDKKHERHPIFGNIVDEVAYHEKYPTIYHLRKKLVDSTDKADLRLIYLALAHMIKFRGHFLIEGDLNPDNSDVDKLFIQLVQTYNQLFEENPINASGVDAKAILSARLSKSRRLENLIAQLPGEKKNGLFGNLIALSLGLTPNFKSNFDLAEDAKLQLSKDTYDDDLDNLLAQIGDQYADLFLAAKNLSDAILLSDILRVNTEITKAPLSASMIKRYDEHHQDLTLLKALVRQQLPEKYKEIFFDQSKNGYAGYIDGGASQEEFYKFIKPILEKMDGTEELLVKLNREDLLRKQRTFDNGSIPHQIHLGELHAILRRQEDFYPFLKDNREKIEKILTFRIPYYVGPLARGNSRFAWMTRKSEETITPWNFEEVVDKGASAQSFIERMTNFDKNLPNEKVLPKHSLLYEYFTVYNELTKVKYVTEGMRKPAFLSGEQKKAIVDLLFKTNRKVTVKQLKEDYFKKIECFDSVEISGVEDRFNASLGTYHDLLKIIKDKDFLDNEENEDILEDIVLTLTLFEDREMIEERLKTYAHLFDDKVMKQLKRRRYTGWGRLSRKLINGIRDKQSGKTILDFLKSDGFANRNFMQLIHDDSLTFKEDIQKAQVSGQGDSLHEHIANLAGSPAIKKGILQTVKVVDELVKVMGRHKPENIVIEMARENQTTQKGQKNSRERMKRIEEGIKELGSQILKEHPVENTQLQNEKLYLYYLQNGRDMYVDQELDINRLSDYDVDHIVPQSFLKDDSIDNKVLTRSDKARGKSDNVPSEEVVKKMKNYWRQLLNAKLITQRKFDNLTKAERGGLSELDKAGFIKRQLVETRQITKHVAQILDSRMNTKYDENDKLIREVKVITLKSKLVSDFRKDFQFYKVREINNYHHAHDAYLNAVVGTALIKKYPKLESEFVYGDYKVYDVRKMIAKSEQEIGKATAKYFFYSNIMNFFKTEITLANGEIRKRPLIETNGETGEIVWDKGRDFATVRKVLSMPQVNIVKKTEVQTGGFSKESILPKRNSDKLIARKKDWDPKKYGGFDSPTVAYSVLVVAKVEKGKSKKLKSVKELLGITIMERSSFEKNPIDFLEAKGYKEVKKDLIIKLPKYSLFELENGRKRMLASAGELQKGNELALPSKYVNFLYLASHYEKLKGSPEDNEQKQLFVEQHKHYLDEIIEQISEFSKRVILADANLDKVLSAYNKHRDKPIREQAENIIHLFTLTNLGAPAAFKYFDTTIDRKRYTSTKEVLDATLIHQSITGLYETRIDLSQLGGDGGPAPAPAPAPAPGGTLNIEDEYRLHETSKEPDVPLGSTWLSDFPQAWAETGGMGLAVRQAPLIIPLKATSTPVSIKQYPMSQEARLGIKPHIQRLLDQGILVPCQSPWNTPLLPVKKPGTNDYRPVQDLREVNKRVEDIHPTVPNPYNLLSGLPPSHQWYTVLDLKDAFFCLRLHPTSQPLFAFEWRDPEMGISGQLTWTRLPQGFKNSPTLFNEALHRDLADFRIQHPDLILLQYVDDLLLAATSEQDCQRGTRALLQTLGNLGYRASAKKAQICQKQVKYLGYLLKEGQRWLTEARKETVMGQPTPKTPRQLREFLGTAGFCRLWIPGFAEMAAPLYPLTKPGTLFNWGPDQQKAYQEIKQALLTAPALGLPDLTKPFELFVDEKQGYAKGVLTQKLGPWRRPVAYLSKKLDPVAAGWPPCLRMVAAIAVLTKDAGKLTMGQPLVILAPHAVEALVKQPPDRWLSNARMTHYQAMLLDTDRVQFGPVVALNPATLLPLPEKEAPHDCLEILAETHGTRPDLTDQPIPDADYTWYTDGSSFLQEGQRRAGAAVTTETEVIWARALPAGTSAQRAELIALTQALKMAEGKKLNVYTDSRYAFATAHVHGEIYRRRGWLTSEGREIKNKNEILALLKALFLPKRLSIIHCPGHQKGNSAEARGNRMADQAAREAAMKAVLETSTLLAGKRTADGSEFEKRTADGSEFESPKKKAKVE

SEQ ID NO: 6552 - protein, 2100 aa, synthetic construct
MPAAKRVKLDGGDKKYSIGLDIGTNSVGWAVITDEYKVPSKKFKVLGNTDRHSIKKNLIGALLFDSGETAEATRLKRTARRRYTRRKNRICYLQEIFSNEMAKVDDSFFHRLEESFLVEEDKKHERHPIFGNIVDEVAYHEKYPTIYHLRKKLVDSTDKADLRLIYLALAHMIKFRGHFLIEGDLNPDNSDVDKLFIQLVQTYNQLFEENPINASGVDAKAILSARLSKSRRLENLIAQLPGEKKNGLFGNLIALSLGLTPNFKSNFDLAEDAKLQLSKDTYDDDLDNLLAQIGDQYADLFLAAKNLSDAILLSDILRVNTEITKAPLSASMIKRYDEHHQDLTLLKALVRQQLPEKYKEIFFDQSKNGYAGYIDGGASQEEFYKFIKPILEKMDGTEELLVKLNREDLLRKQRTFDNGSIPHQIHLGELHAILRRQEDFYPFLKDNREKIEKILTFRIPYYVGPLARGNSRFAWMTRKSEETITPWNFEEVVDKGASAQSFIERMTNFDKNLPNEKVLPKHSLLYEYFTVYNELTKVKYVTEGMRKPAFLSGEQKKAIVDLLFKTNRKVTVKQLKEDYFKKIECFDSVEISGVEDRFNASLGTYHDLLKIIKDKDFLDNEENEDILEDIVLTLTLFEDREMIEERLKTYAHLFDDKVMKQLKRRRYTGWGRLSRKLINGIRDKQSGKTILDFLKSDGFANRNFMQLIHDDSLTFKEDIQKAQVSGQGDSLHEHIANLAGSPAIKKGILQTVKVVDELVKVMGRHKPENIVIEMARENQTTQKGQKNSRERMKRIEEGIKELGSQILKEHPVENTQLQNEKLYLYYLQNGRDMYVDQELDINRLSDYDVDHIVPQSFLKDDSIDNKVLTRSDKARGKSDNVPSEEVVKKMKNYWRQLLNAKLITQRKFDNLTKAERGGLSELDKAGFIKRQLVETRQITKHVAQILDSRMNTKYDENDKLIREVKVITLKSKLVSDFRKDFQFYKVREINNYHHAHDAYLNAVVGTALIKKYPKLESEFVYGDYKVYDVRKMIAKSEQEIGKATAKYFFYSNIMNFFKTEITLANGEIRKRPLIETNGETGEIVWDKGRDFATVRKVLSMPQVNIVKKTEVQTGGFSKESILPKRNSDKLIARKKDWDPKKYGGFDSPTVAYSVLVVAKVEKGKSKKLKSVKELLGITIMERSSFEKNPIDFLEAKGYKEVKKDLIIKLPKYSLFELENGRKRMLASAGELQKGNELALPSKYVNFLYLASHYEKLKGSPEDNEQKQLFVEQHKHYLDEIIEQISEFSKRVILADANLDKVLSAYNKHRDKPIREQAENIIHLFTLTNLGAPAAFKYFDTTIDRKRYTSTKEVLDATLIHQSITGLYETRIDLSQLGGDGGPAPAPAPAPAPAPGGTAPLEEEYRLFLEAPIQNVTLLEQWKREIPKVWAEINPPGLASTQAPIHVQLLSTALPVRVRQYPITLEAKRSLRETIRKFRAAGILRPVHSPWNTPLLPVRKSGTSEYRMVQDLREVNKRVETIHPTVPNPYTLLSLLPPDRIWYSVLDLKDAFFCIPLAPESQLIFAFEWADAEEGESGQLTWTRLPQGFKNSPTLFDEALNRDLQGFRLDHPSVSLLQYVDDLLIAADTQAACLSATRDLLMTLAELGYRVSGKKAQLCQEEVTYLGFKIHKGSRSLSNSRTQAILQIPVPKTKRQVREFLGTIGYCRLWIPGFAELAQPLYAATRGGNDPLVWGEKEEEAFQSLKLALTQPPALALPSLDKPFQLFVEETSGAAKGVLTQALGPWKRPVAYLSKRLDPVAAGWPRCLRAIAAAALLTREASKLTFGQDIEITSSHNLESLLRSPPDKWLTNARITQYQVLLLDPPRVRFKQTAALNPATLLPETDDTLPIHHCLDTLDSLTSTRPDLTDQPLAQAEATLFTDGSSYIRDGKRYAGAAVVTLDSVIWAEPLPIGTSAQKAELIALTKALEWSKDKSVNIYTDSRYAFATLHVHGMIYRERGLLTAGGKAIKNAPEILALLTAVWLPKRVAVMHCKGHQKDDAPTSTGNRRADEVAREVAIRPLSTQATISAGKRTADGSEFEKRTADGSEFESPKKKAKVE

SEQ ID NO: 6553 - protein, 2175 aa, synthetic construct
MPAAKRVKLDGGDKKYSIGLDIGTNSVGWAVITDEYKVPSKKFKVLGNTDRHSIKKNLIGALLFDSGETAEATRLKRTARRRYTRRKNRICYLQEIFSNEMAKVDDSFFHRLEESFLVEEDKKHERHPIFGNIVDEVAYHEKYPTIYHLRKKLVDSTDKADLRLIYLALAHMIKFRGHFLIEGDLNPDNSDVDKLFIQLVQTYNQLFEENPINASGVDAKAILSARLSKSRRLENLIAQLPGEKKNGLFGNLIALSLGLTPNFKSNFDLAEDAKLQLSKDTYDDDLDNLLAQIGDQYADLFLAAKNLSDAILLSDILRVNTEITKAPLSASMIKRYDEHHQDLTLLKALVRQQLPEKYKEIFFDQSKNGYAGYIDGGASQEEFYKFIKPILEKMDGTEELLVKLNREDLLRKQRTFDNGSIPHQIHLGELHAILRRQEDFYPFLKDNREKIEKILTFRIPYYVGPLARGNSRFAWMTRKSEETITPWNFEEVVDKGASAQSFIERMTNFDKNLPNEKVLPKHSLLYEYFTVYNELTKVKYVTEGMRKPAFLSGEQKKAIVDLLFKTNRKVTVKQLKEDYFKKIECFDSVEISGVEDRFNASLGTYHDLLKIIKDKDFLDNEENEDILEDIVLTLTLFEDREMIEERLKTYAHLFDDKVMKQLKRRRYTGWGRLSRKLINGIRDKQSGKTILDFLKSDGFANRNFMQLIHDDSLTFKEDIQKAQVSGQGDSLHEHIANLAGSPAIKKGILQTVKVVDELVKVMGRHKPENIVIEMARENQTTQKGQKNSRERMKRIEEGIKELGSQILKEHPVENTQLQNEKLYLYYLQNGRDMYVDQELDINRLSDYDVDHIVPQSFLKDDSIDNKVLTRSDKARGKSDNVPSEEVVKKMKNYWRQLLNAKLITQRKFDNLTKAERGGLSELDKAGFIKRQLVETRQITKHVAQILDSRMNTKYDENDKLIREVKVITLKSKLVSDFRKDFQFYKVREINNYHHAHDAYLNAVVGTALIKKYPKLESEFVYGDYKVYDVRKMIAKSEQEIGKATAKYFFYSNIMNFFKTEITLANGEIRKRPLIETNGETGEIVWDKGRDFATVRKVLSMPQVNIVKKTEVQTGGFSKESILPKRNSDKLIARKKDWDPKKYGGFDSPTVAYSVLVVAKVEKGKSKKLKSVKELLGITIMERSSFEKNPIDFLEAKGYKEVKKDLIIKLPKYSLFELENGRKRMLASAGELQKGNELALPSKYVNFLYLASHYEKLKGSPEDNEQKQLFVEQHKHYLDEIIEQISEFSKRVILADANLDKVLSAYNKHRDKPIREQAENIIHLFTLTNLGAPAAFKYFDTTIDRKRYTSTKEVLDATLIHQSITGLYETRIDLSQLGGDGGPAPAPAPAPAPAPGGMDLLKPLTVERKGVKIKGYWNSQADITCVPKDLLQGEEPVRQQNVTTIHGTQEGDVYYVNLKIDGRRINTEVIGTTLDYAIITPGDVPWILKKPLELTIKLDLEEQQGTLLNNSILSKKGKEELKQLFEKYSALWQSWENQVGHRRIRPHKIATGTVKPTPQKQYHINPKAKPDIQIVINDLLKQGVLIQKESTMNTPVYPVPKPNGRWRMVLDYRAVNKVTPLIAVQNQHSYGILGSLFKGRYKTTIDLSNGFWAHPIVPEDYWITAFTWQGKQYCWTVLPQGFLNSPGLFNGDVVDLLQGIPNVEVYVDDVYISHDSEKEHLEYLDILFNRLKEAGYIISLKKSNIANSIVDFLGFQITNEGRGLTDTFKEKLENITAPTTLKQLQSILGLLNFARNFIPDFTELIAPLYALIPKSPKNYVPWQIEHSTTLETLITKLNGAEYLQGRKGDKTLIMKVNASYTTGYIRYYNEGEKKPISYVSIVFSKTELKFTELEKLLTTVHKGLLKALDLSMGQNIHVYSPIVSMQNIQKTPQTAKKALASRWLSWLSYLEDPRIRFFYDPQMPALKDLPAVDTGKDNKKHPSNFQHIFYTDGSAITSPTKEGHLNAGMGIVYFINKDGNLQKQQEWSISLGNHTAQFAEIAAFEFALKKCLPLGGNILVVTDSNYVAKAYNEELDVWASNGFVNNRKKPLKHISKWKSVADLKRLRPDVVVTHEPGHQKLDSSPHAYGNNLADQLATQASFKVHAGKRTADGSEFEKRTADGSEFESPKKKAKVE

SEQ ID NO: 6554 - protein, 2175 aa, synthetic construct
MPAAKRVKLDGGDKKYSIGLDIGTNSVGWAVITDEYKVPSKKFKVLGNTDRHSIKKNLIGALLFDSGETAEATRLKRTARRRYTRRKNRICYLQEIFSNEMAKVDDSFFHRLEESFLVEEDKKHERHPIFGNIVDEVAYHEKYPTIYHLRKKLVDSTDKADLRLIYLALAHMIKFRGHFLIEGDLNPDNSDVDKLFIQLVQTYNQLFEENPINASGVDAKAILSARLSKSRRLENLIAQLPGEKKNGLFGNLIALSLGLTPNFKSNFDLAEDAKLQLSKDTYDDDLDNLLAQIGDQYADLFLAAKNLSDAILLSDILRVNTEITKAPLSASMIKRYDEHHQDLTLLKALVRQQLPEKYKEIFFDQSKNGYAGYIDGGASQEEFYKFIKPILEKMDGTEELLVKLNREDLLRKQRTFDNGSIPHQIHLGELHAILRRQEDFYPFLKDNREKIEKILTFRIPYYVGPLARGNSRFAWMTRKSEETITPWNFEEVVDKGASAQSFIERMTNFDKNLPNEKVLPKHSLLYEYFTVYNELTKVKYVTEGMRKPAFLSGEQKKAIVDLLFKTNRKVTVKQLKEDYFKKIECFDSVEISGVEDRFNASLGTYHDLLKIIKDKDFLDNEENEDILEDIVLTLTLFEDREMIEERLKTYAHLFDDKVMKQLKRRRYTGWGRLSRKLINGIRDKQSGKTILDFLKSDGFANRNFMQLIHDDSLTFKEDIQKAQVSGQGDSLHEHIANLAGSPAIKKGILQTVKVVDELVKVMGRHKPENIVIEMARENQTTQKGQKNSRERMKRIEEGIKELGSQILKEHPVENTQLQNEKLYLYYLQNGRDMYVDQELDINRLSDYDVDHIVPQSFLKDDSIDNKVLTRSDKARGKSDNVPSEEVVKKMKNYWRQLLNAKLITQRKFDNLTKAERGGLSELDKAGFIKRQLVETRQITKHVAQILDSRMNTKYDENDKLIREVKVITLKSKLVSDFRKDFQFYKVREINNYHHAHDAYLNAVVGTALIKKYPKLESEFVYGDYKVYDVRKMIAKSEQEIGKATAKYFFYSNIMNFFKTEITLANGEIRKRPLIETNGETGEIVWDKGRDFATVRKVLSMPQVNIVKKTEVQTGGFSKESILPKRNSDKLIARKKDWDPKKYGGFDSPTVAYSVLVVAKVEKGKSKKLKSVKELLGITIMERSSFEKNPIDFLEAKGYKEVKKDLIIKLPKYSLFELENGRKRMLASAGELQKGNELALPSKYVNFLYLASHYEKLKGSPEDNEQKQLFVEQHKHYLDEIIEQISEFSKRVILADANLDKVLSAYNKHRDKPIREQAENIIHLFTLTNLGAPAAFKYFDTTIDRKRYTSTKEVLDATLIHQSITGLYETRIDLSQLGGDGGPAPAPAPAPAPAPGGMDLLKPLTVERKGVKIKGYWNSQADITCVPKDLLQGEEPVRQQNVTTIHGTQEGDVYYVNLKIDGRRINTEVIGTTLDYAIITPGDVPWILKKPLELTIKLDLEEQQGTLLNNSILSKKGKEELKQLFEKYSALWQSWENQVGHRRIRPHKIATGTVKPTPQKQYHINPKAKPDIQIVINDLLKQGVLIQKESTMNTPVYPVPKPNGRWRMVLDYRAVNKVTPLIAVQNQHSYGILGSLFKGRYKTTIDLSNGFWAHPIVPEDYWITAFTWQGKQYCWTVLPQGFLNSPGLFNGDVVDLLQGIPNVEVYVDDVYISHDSEKEHLEYLDILFNRLKEAGYIISLKKSNIANSIVDFLGFQITNEGRGLTDTFKEKLENITAPTTLKQLQSILGKLNFARNFIPDFTELIAPLYALIPKSPKNYVPWQIEHSTTLETLITKLNGAEYLQGRKGDKTLIMKVNASYTTGYIRYYNEGEKKPISYVSIVFSKTELKFTELEKLLTTVHKGLLKALDLSMGQNIHVYSPIVSMQNIQKTPQTAKKALASRWLSWLSYLEDPRIRFFYDPQMPALKDLPAVDTGKDNKKHPSNFQHIFYTDGSAITSPTKEGHLNAGMGIVYFINKDGNLQKQQEWSISLGNHTAQFAEIAAFEFALKKCLPLGGNILVVTDSNYVAKAYNEELDVWASNGFVNNRKKPLKHISKWKSVADLKRLRPDVVVTHEPGHQKLDSSPHAYGNNLADQLATQASFKVHAGKRTADGSEFEKRTADGSEFESPKKKAKVE

SEQ ID NO: 6555 - protein, 2097 aa, synthetic construct
MPAAKRVKLDGGDKKYSIGLDIGTNSVGWAVITDEYKVPSKKFKVLGNTDRHSIKKNLIGALLFDSGETAEATRLKRTARRRYTRRKNRICYLQEIFSNEMAKVDDSFFHRLEESFLVEEDKKHERHPIFGNIVDEVAYHEKYPTIYHLRKKLVDSTDKADLRLIYLALAHMIKFRGHFLIEGDLNPDNSDVDKLFIQLVQTYNQLFEENPINASGVDAKAILSARLSKSRRLENLIAQLPGEKKNGLFGNLIALSLGLTPNFKSNFDLAEDAKLQLSKDTYDDDLDNLLAQIGDQYADLFLAAKNLSDAILLSDILRVNTEITKAPLSASMIKRYDEHHQDLTLLKALVRQQLPEKYKEIFFDQSKNGYAGYIDGGASQEEFYKFIKPILEKMDGTEELLVKLNREDLLRKQRTFDNGSIPHQIHLGELHAILRRQEDFYPFLKDNREKIEKILTFRIPYYVGPLARGNSRFAWMTRKSEETITPWNFEEVVDKGASAQSFIERMTNFDKNLPNEKVLPKHSLLYEYFTVYNELTKVKYVTEGMRKPAFLSGEQKKAIVDLLFKTNRKVTVKQLKEDYFKKIECFDSVEISGVEDRFNASLGTYHDLLKIIKDKDFLDNEENEDILEDIVLTLTLFEDREMIEERLKTYAHLFDDKVMKQLKRRRYTGWGRLSRKLINGIRDKQSGKTILDFLKSDGFANRNFMQLIHDDSLTFKEDIQKAQVSGQGDSLHEHIANLAGSPAIKKGILQTVKVVDELVKVMGRHKPENIVIEMARENQTTQKGQKNSRERMKRIEEGIKELGSQILKEHPVENTQLQNEKLYLYYLQNGRDMYVDQELDINRLSDYDVDHIVPQSFLKDDSIDNKVLTRSDKARGKSDNVPSEEVVKKMKNYWRQLLNAKLITQRKFDNLTKAERGGLSELDKAGFIKRQLVETRQITKHVAQILDSRMNTKYDENDKLIREVKVITLKSKLVSDFRKDFQFYKVREINNYHHAHDAYLNAVVGTALIKKYPKLESEFVYGDYKVYDVRKMIAKSEQEIGKATAKYFFYSNIMNFFKTEITLANGEIRKRPLIETNGETGEIVWDKGRDFATVRKVLSMPQVNIVKKTEVQTGGFSKESILPKRNSDKLIARKKDWDPKKYGGFDSPTVAYSVLVVAKVEKGKSKKLKSVKELLGITIMERSSFEKNPIDFLEAKGYKEVKKDLIIKLPKYSLFELENGRKRMLASAGELQKGNELALPSKYVNFLYLASHYEKLKGSPEDNEQKQLFVEQHKHYLDEIIEQISEFSKRVILADANLDKVLSAYNKHRDKPIREQAENIIHLFTLTNLGAPAAFKYFDTTIDRKRYTSTKEVLDATLIHQSITGLYETRIDLSQLGGDGGPAPAPAPAPAPAPGGTLQLEEEYRLFEPESTQKQEMDIWLKNFPQAWAETGGMGTAHCQAPVLIQLKATATPISIRQYPMPHEAYQGIKPHIRRMLDQGILKPCQSPWNTPLLPVKKPGTEDYRPVQDLREVNKRVEDIHPTVPNPYNLLSTLPPSHPWYTVLDLKDAFFCLRLHSESQLLFAFEWRDPEIGLSGQLTWTRLPQGFKNSPTLFNEALHSDLADFRVRYPALVLLQYVDDLLLAAATRTECLEGTKALLETLGNKGYRASAKKAQICLQEVTYLGYSLKDGQRWLTKARKEAILSIPVPKNSRQVREFLGTAGYCRLWIPGFAELAAPLYPLTRPGTLFQWGTEQQLAFEDIKKALLSSPALGLPDITKPFELFIDENSGFAKGVLVQKLGPWKRPVAYLSKKLDTVASGWPPCLRMVAAIAILVKDAGKLTLGQPLTILTSHPVEALVRQPPNKWLSNARMTHYQAMLLDAERVHFGPTVSLNPATLLPLPSGGNHHDCLQILAETHGTRPDLTDQPLPDADLTWYTDGSSFIRNGEREAGAAVTTESEVIWAAPLPPGTSAQRAELIALTQALKMAEGKKLTVYTDSRYAFATTHVHGEIYRRRGWLTSEGKEIKNKNEILALLEALFLPKRLSIIHCPGHQKGDSPQAKGNRLADDTAKKAATETHSSLTVLPAGKRTADGSEFEKRTADGSEFESPKKKAKVE

SEQ ID NO: 6556 - protein, 2089 aa, synthetic construct
MPAAKRVKLDGGDKKYSIGLDIGTNSVGWAVITDEYKVPSKKFKVLGNTDRHSIKKNLIGALLFDSGETAEATRLKRTARRRYTRRKNRICYLQEIFSNEMAKVDDSFFHRLEESFLVEEDKKHERHPIFGNIVDEVAYHEKYPTIYHLRKKLVDSTDKADLRLIYLALAHMIKFRGHFLIEGDLNPDNSDVDKLFIQLVQTYNQLFEENPINASGVDAKAILSARLSKSRRLENLIAQLPGEKKNGLFGNLIALSLGLTPNFKSNFDLAEDAKLQLSKDTYDDDLDNLLAQIGDQYADLFLAAKNLSDAILLSDILRVNTEITKAPLSASMIKRYDEHHQDLTLLKALVRQQLPEKYKEIFFDQSKNGYAGYIDGGASQEEFYKFIKPILEKMDGTEELLVKLNREDLLRKQRTFDNGSIPHQIHLGELHAILRRQEDFYPFLKDNREKIEKILTFRIPYYVGPLARGNSRFAWMTRKSEETITPWNFEEVVDKGASAQSFIERMTNFDKNLPNEKVLPKHSLLYEYFTVYNELTKVKYVTEGMRKPAFLSGEQKKAIVDLLFKTNRKVTVKQLKEDYFKKIECFDSVEISGVEDRFNASLGTYHDLLKIIKDKDFLDNEENEDILEDIVLTLTLFEDREMIEERLKTYAHLFDDKVMKQLKRRRYTGWGRLSRKLINGIRDKQSGKTILDFLKSDGFANRNFMQLIHDDSLTFKEDIQKAQVSGQGDSLHEHIANLAGSPAIKKGILQTVKVVDELVKVMGRHKPENIVIEMARENQTTQKGQKNSRERMKRIEEGIKELGSQILKEHPVENTQLQNEKLYLYYLQNGRDMYVDQELDINRLSDYDVDHIVPQSFLKDDSIDNKVLTRSDKARGKSDNVPSEEVVKKMKNYWRQLLNAKLITQRKFDNLTKAERGGLSELDKAGFIKRQLVETRQITKHVAQILDSRMNTKYDENDKLIREVKVITLKSKLVSDFRKDFQFYKVREINNYHHAHDAYLNAVVGTALIKKYPKLESEFVYGDYKVYDVRKMIAKSEQEIGKATAKYFFYSNIMNFFKTEITLANGEIRKRPLIETNGETGEIVWDKGRDFATVRKVLSMPQVNIVKKTEVQTGGFSKESILPKRNSDKLIARKKDWDPKKYGGFDSPTVAYSVLVVAKVEKGKSKKLKSVKELLGITIMERSSFEKNPIDFLEAKGYKEVKKDLIIKLPKYSLFELENGRKRMLASAGELQKGNELALPSKYVNFLYLASHYEKLKGSPEDNEQKQLFVEQHKHYLDEIIEQISEFSKRVILADANLDKVLSAYNKHRDKPIREQAENIIHLFTLTNLGAPAAFKYFDTTIDRKRYTSTKEVLDATLIHQSITGLYETRIDLSQLGGDGGPAPAPAPAPAPAPGGVPWLTQQPLQLTILVPLQEYQEKILSKTALPEDQKQQLKTLFVKYDNLWQHWENQVGHRKIRPHNIATGDYPPRPQKQYPINPKAKPSIQIVIDDLLKQGVLTPQNSTMNTPVYPVPKPDGRWRMVLDYREVNKTIPLTAAQNQHSAGILATIVRQKYKTTLDLANGFWAHPITPESYWLTAFTWQGKQYCWTRLPQGFLNSPALFNADVVDLLKEIPNVQVYVDDIYLSHDDPKEHVQQLEKVFQILLQAGYVVSLKKSEIGQKTVEFLGFNITKEGRGLTDTFKTKLLNITPPKDLKQLQSILGKLNFARNFIPNFAELVQPLYNLIAPAKGKYIEWSEENTKQLNMVIEALNTASNLEERLPEQRLVIKVNTSPSAGYVRYYNETGKKPIMYLNYVFSKAELKFSMLEKLLTTMHKALIKAMDLAMGQEILVYSPIVSMTKIQKTPLPERKALPIRWITWMTYLEDPRIQFHYDKTLPELKHIPDVYTSSQSPVKHPSQYEGVFYTDGSAIKSPDPTKSNNAGMGIVHATYKPEYQVLNQWSIPLGNHTAQMAEIAAVEFACKKALKIPGPVLVITDSFYVAESANKELPYWKSNGFVNNKKKPLKHISKWKSIAECLSMKPDITIQHEKGISLQIPVFILKGNALADKLATQGSYVVNAGKRTADGSEFEKRTADGSEFESPKKKAKVE

SEQ ID NO: 6557 - protein, 2096 aa, synthetic construct
MPAAKRVKLDGGDKKYSIGLDIGTNSVGWAVITDEYKVPSKKFKVLGNTDRHSIKKNLIGALLFDSGETAEATRLKRTARRRYTRRKNRICYLQEIFSNEMAKVDDSFFHRLEESFLVEEDKKHERHPIFGNIVDEVAYHEKYPTIYHLRKKLVDSTDKADLRLIYLALAHMIKFRGHFLIEGDLNPDNSDVDKLFIQLVQTYNQLFEENPINASGVDAKAILSARLSKSRRLENLIAQLPGEKKNGLFGNLIALSLGLTPNFKSNFDLAEDAKLQLSKDTYDDDLDNLLAQIGDQYADLFLAAKNLSDAILLSDILRVNTEITKAPLSASMIKRYDEHHQDLTLLKALVRQQLPEKYKEIFFDQSKNGYAGYIDGGASQEEFYKFIKPILEKMDGTEELLVKLNREDLLRKQRTFDNGSIPHQIHLGELHAILRRQEDFYPFLKDNREKIEKILTFRIPYYVGPLARGNSRFAWMTRKSEETITPWNFEEVVDKGASAQSFIERMTNFDKNLPNEKVLPKHSLLYEYFTVYNELTKVKYVTEGMRKPAFLSGEQKKAIVDLLFKTNRKVTVKQLKEDYFKKIECFDSVEISGVEDRFNASLGTYHDLLKIIKDKDFLDNEENEDILEDIVLTLTLFEDREMIEERLKTYAHLFDDKVMKQLKRRRYTGWGRLSRKLINGIRDKQSGKTILDFLKSDGFANRNFMQLIHDDSLTFKEDIQKAQVSGQGDSLHEHIANLAGSPAIKKGILQTVKVVDELVKVMGRHKPENIVIEMARENQTTQKGQKNSRERMKRIEEGIKELGSQILKEHPVENTQLQNEKLYLYYLQNGRDMYVDQELDINRLSDYDVDHIVPQSFLKDDSIDNKVLTRSDKARGKSDNVPSEEVVKKMKNYWRQLLNAKLITQRKFDNLTKAERGGLSELDKAGFIKRQLVETRQITKHVAQILDSRMNTKYDENDKLIREVKVITLKSKLVSDFRKDFQFYKVREINNYHHAHDAYLNAVVGTALIKKYPKLESEFVYGDYKVYDVRKMIAKSEQEIGKATAKYFFYSNIMNFFKTEITLANGEIRKRPLIETNGETGEIVWDKGRDFATVRKVLSMPQVNIVKKTEVQTGGFSKESILPKRNSDKLIARKKDWDPKKYGGFDSPTVAYSVLVVAKVEKGKSKKLKSVKELLGITIMERSSFEKNPIDFLEAKGYKEVKKDLIIKLPKYSLFELENGRKRMLASAGELQKGNELALPSKYVNFLYLASHYEKLKGSPEDNEQKQLFVEQHKHYLDEIIEQISEFSKRVILADANLDKVLSAYNKHRDKPIREQAENIIHLFTLTNLGAPAAFKYFDTTIDRKRYTSTKEVLDATLIHQSITGLYETRIDLSQLGGDGGPAPAPAPAPAPAPGGVLNLEEEYRLHEKPVPSSIDPSWLQLFPTVWAERAGMGLANQVPPVVVELRSGASPVAVRQYPMSKEAREGIRPHIQKFLDLGVLVPCRSPWNTPLLPVKKPGTNDYRPVQDLREINKRVQDIHPTVPNPYNLLSSLPPSYTWYSVLDLKDAFFCLRLHPNSQPLFAFEWKDPEKGNTGQLTWTRLPQGFKNSPTLFNEALHRDLAPFRALNPQVVLLQYVDDLLVAAPTYEDCKKGTQKLLQELSKLGYRVSAKKAQLCQREVTYLGYLLKEGKRWLTPARKATVMKIPVPTTPRQVREFLGTAGFCRLWIPGFASLAAPLYPLTKPSIPFIWTEEHQQAFDHIKKALLSAPALALPDLTKPFTLYIDERAGVARGVLTQTLGPWRRPVAYLSKKLDPVASGWPTCLKAVAAVALLLKDADKLTLGQNVTVIASHSLESIVRQPPDRWMTNARMTHYQSLLLNERVSFAPPAVLNPATLLPVESEATPVHRCSEILAEETGTRRDLEDQPLPGVPTWYTDGSSFITEGKRRAGAPIVDGKRTVWASSLPEGTSAQKAELVALTQALRLAEGKNINIYTDSRYAFATAHIHGAIYKQRGWLTSAGKDIKNKEEILALLEAIHLPRRVAIIHCPGHQRGSNPVATGNRRADEAAKQAALSTRVLAGTTKPAGKRTADGSEFEKRTADGSEFESPKKKAKVE

SEQ ID NO: 6558 - protein, 2096 aa, synthetic construct
MPAAKRVKLDGGDKKYSIGLDIGTNSVGWAVITDEYKVPSKKFKVLGNTDRHSIKKNLIGALLFDSGETAEATRLKRTARRRYTRRKNRICYLQEIFSNEMAKVDDSFFHRLEESFLVEEDKKHERHPIFGNIVDEVAYHEKYPTIYHLRKKLVDSTDKADLRLIYLALAHMIKFRGHFLIEGDLNPDNSDVDKLFIQLVQTYNQLFEENPINASGVDAKAILSARLSKSRRLENLIAQLPGEKKNGLFGNLIALSLGLTPNFKSNFDLAEDAKLQLSKDTYDDDLDNLLAQIGDQYADLFLAAKNLSDAILLSDILRVNTEITKAPLSASMIKRYDEHHQDLTLLKALVRQQLPEKYKEIFFDQSKNGYAGYIDGGASQEEFYKFIKPILEKMDGTEELLVKLNREDLLRKQRTFDNGSIPHQIHLGELHAILRRQEDFYPFLKDNREKIEKILTFRIPYYVGPLARGNSRFAWMTRKSEETITPWNFEEVVDKGASAQSFIERMTNFDKNLPNEKVLPKHSLLYEYFTVYNELTKVKYVTEGMRKPAFLSGEQKKAIVDLLFKTNRKVTVKQLKEDYFKKIECFDSVEISGVEDRFNASLGTYHDLLKIIKDKDFLDNEENEDILEDIVLTLTLFEDREMIEERLKTYAHLFDDKVMKQLKRRRYTGWGRLSRKLINGIRDKQSGKTILDFLKSDGFANRNFMQLIHDDSLTFKEDIQKAQVSGQGDSLHEHIANLAGSPAIKKGILQTVKVVDELVKVMGRHKPENIVIEMARENQTTQKGQKNSRERMKRIEEGIKELGSQILKEHPVENTQLQNEKLYLYYLQNGRDMYVDQELDINRLSDYDVDHIVPQSFLKDDSIDNKVLTRSDKARGKSDNVPSEEVVKKMKNYWRQLLNAKLITQRKFDNLTKAERGGLSELDKAGFIKRQLVETRQITKHVAQILDSRMNTKYDENDKLIREVKVITLKSKLVSDFRKDFQFYKVREINNYHHAHDAYLNAVVGTALIKKYPKLESEFVYGDYKVYDVRKMIAKSEQEIGKATAKYFFYSNIMNFFKTEITLANGEIRKRPLIETNGETGEIVWDKGRDFATVRKVLSMPQVNIVKKTEVQTGGFSKESILPKRNSDKLIARKKDWDPKKYGGFDSPTVAYSVLVVAKVEKGKSKKLKSVKELLGITIMERSSFEKNPIDFLEAKGYKEVKKDLIIKLPKYSLFELENGRKRMLASAGELQKGNELALPSKYVNFLYLASHYEKLKGSPEDNEQKQLFVEQHKHYLDEIIEQISEFSKRVILADANLDKVLSAYNKHRDKPIREQAENIIHLFTLTNLGAPAAFKYFDTTIDRKRYTSTKEVLDATLIHQSITGLYETRIDLSQLGGDGGPAPAPAPAPAPAPGGVLNLEEEYRLHEKPVPSSIDPSWLQLFPTVWAERAGMGLANQVPPVVVELRSGASPVAVRQYPMSKEAREGIRPHIQKFLDLGVLVPCRSPWNTPLLPVKKPGTNDYRPVQDLREINKRVQDIHPTVPNPYNLLSSLPPSYTWYSVLDLKDAFFCLRLHPNSQPLFAFEWKDPEKGNTGQLTWTRLPQGFKNSPTLFNEALHRDLAPFRALNPQVVLLQYVDDLLVAAPTYEDCKKGTQKLLQELSKLGYRVSAKKAQLCQREVTYLGYLLKEGKRWLTPARKATVMKIPVPTTPRQVREFLGKAGFCRLFIPGFASLAAPLYPLTKPSIPFIWTEEHQQAFDHIKKALLSAPALALPDLTKPFTLYIDERAGVARGVLTQTLGPWRRPVAYLSKKLDPVASGWPTCLKAVAAVALLLKDADKLTLGQNVTVIASHSLESIVRQPPDRWMTNARMTHYQSLLLNERVSFAPPAVLNPATLLPVESEATPVHRCSEILAEETGTRRDLEDQPLPGVPTWYTDGSSFITEGKRRAGAPIVDGKRTVWASSLPEGTSAQKAELVALTQALRLAEGKNINIYTDSRYAFATAHIHGAIYKQRGWLTSAGKDIKNKEEILALLEAIHLPRRVAIIHCPGHQRGSNPVATGNRRADEAAKQAALSTRVLAGTTKPAGKRTADGSEFEKRTADGSEFESPKKKAKVE

SEQ ID NO: 6559 - protein, 2129 aa, synthetic construct
MPAAKRVKLDGGDKKYSIGLDIGTNSVGWAVITDEYKVPSKKFKVLGNTDRHSIKKNLIGALLFDSGETAEATRLKRTARRRYTRRKNRICYLQEIFSNEMAKVDDSFFHRLEESFLVEEDKKHERHPIFGNIVDEVAYHEKYPTIYHLRKKLVDSTDKADLRLIYLALAHMIKFRGHFLIEGDLNPDNSDVDKLFIQLVQTYNQLFEENPINASGVDAKAILSARLSKSRRLENLIAQLPGEKKNGLFGNLIALSLGLTPNFKSNFDLAEDAKLQLSKDTYDDDLDNLLAQIGDQYADLFLAAKNLSDAILLSDILRVNTEITKAPLSASMIKRYDEHHQDLTLLKALVRQQLPEKYKEIFFDQSKNGYAGYIDGGASQEEFYKFIKPILEKMDGTEELLVKLNREDLLRKQRTFDNGSIPHQIHLGELHAILRRQEDFYPFLKDNREKIEKILTFRIPYYVGPLARGNSRFAWMTRKSEETITPWNFEEVVDKGASAQSFIERMTNFDKNLPNEKVLPKHSLLYEYFTVYNELTKVKYVTEGMRKPAFLSGEQKKAIVDLLFKTNRKVTVKQLKEDYFKKIECFDSVEISGVEDRFNASLGTYHDLLKIIKDKDFLDNEENEDILEDIVLTLTLFEDREMIEERLKTYAHLFDDKVMKQLKRRRYTGWGRLSRKLINGIRDKQSGKTILDFLKSDGFANRNFMQLIHDDSLTFKEDIQKAQVSGQGDSLHEHIANLAGSPAIKKGILQTVKVVDELVKVMGRHKPENIVIEMARENQTTQKGQKNSRERMKRIEEGIKELGSQILKEHPVENTQLQNEKLYLYYLQNGRDMYVDQELDINRLSDYDVDHIVPQSFLKDDSIDNKVLTRSDKARGKSDNVPSEEVVKKMKNYWRQLLNAKLITQRKFDNLTKAERGGLSELDKAGFIKRQLVETRQITKHVAQILDSRMNTKYDENDKLIREVKVITLKSKLVSDFRKDFQFYKVREINNYHHAHDAYLNAVVGTALIKKYPKLESEFVYGDYKVYDVRKMIAKSEQEIGKATAKYFFYSNIMNFFKTEITLANGEIRKRPLIETNGETGEIVWDKGRDFATVRKVLSMPQVNIVKKTEVQTGGFSKESILPKRNSDKLIARKKDWDPKKYGGFDSPTVAYSVLVVAKVEKGKSKKLKSVKELLGITIMERSSFEKNPIDFLEAKGYKEVKKDLIIKLPKYSLFELENGRKRMLASAGELQKGNELALPSKYVNFLYLASHYEKLKGSPEDNEQKQLFVEQHKHYLDEIIEQISEFSKRVILADANLDKVLSAYNKHRDKPIREQAENIIHLFTLTNLGAPAAFKYFDTTIDRKRYTSTKEVLDATLIHQSITGLYETRIDLSQLGGDGGPAPAPAPAPAPAPGGLLGRDLLTKLKAQIQFSTEGPQVTWEDRPAMCLVLNLEEEYRLHEKPVPPSIDPSWLQLFPMVWAEKAGMGLANQVPPVVVELKSDASPVAVRQYPMSKEAREGIRPHIQRFLDLGILVPCQSPWNTPLLPVKKPGTNDYRPVQDLREVNKRVQDIHPTVPNPYNLLSSLPPSHTWYSVLDLKDAFFCLKLHPNSQPLFAFEWRDPEKGNTGQLTWTRLPQGFKNSPTLFNEALHRDLASFRALNPQVVMLQYVDDLLVAAPTYRDCKEGTRRLLQELSKLGYRVSAKKAQLCREEVTYLGYLLKGGKRWLTPARKATVMKIPTPTTPRQVREFLGTAGFCRLWIPGFASLAAPLYPLTRPKVPFTWTEAHQEAFGRIKEALLSAPALALPDLTKPFALYVDEKEGVARGVLTQTLGPWRRPVAYLSKKLDPVASGWPTCLKAIAAVALLLKDADKLTLGQNVLVIAPHNLESIVRQPPDRWMTNARMTHYQSLLLNERVSFAPPAILNPATLLPVESDDTPIHICSEILAEETGTRPDLRDQPLPGVPAWYTDGSSFIMDGRRQAGAAIVDNKRTVWASNLPEGTSAQKAELIALTQALRLAEGKSINIYTDSRYAFATAHVHGAIYKQRGWLTSAGKDIKNKEEILALLEAIHLPKRVAIIHCPGHQRGTDPVATGNRKADEAAKQAAQSTRILTETTKNAGKRTADGSEFEKRTADGSEFESPKKKAKVE

SEQ ID NO: 6560 - protein, 2220 aa, synthetic construct
MPAAKRVKLDGGDKKYSIGLDIGTNSVGWAVITDEYKVPSKKFKVLGNTDRHSIKKNLIGALLFDSGETAEATRLKRTARRRYTRRKNRICYLQEIFSNEMAKVDDSFFHRLEESFLVEEDKKHERHPIFGNIVDEVAYHEKYPTIYHLRKKLVDSTDKADLRLIYLALAHMIKFRGHFLIEGDLNPDNSDVDKLFIQLVQTYNQLFEENPINASGVDAKAILSARLSKSRRLENLIAQLPGEKKNGLFGNLIALSLGLTPNFKSNFDLAEDAKLQLSKDTYDDDLDNLLAQIGDQYADLFLAAKNLSDAILLSDILRVNTEITKAPLSASMIKRYDEHHQDLTLLKALVRQQLPEKYKEIFFDQSKNGYAGYIDGGASQEEFYKFIKPILEKMDGTEELLVKLNREDLLRKQRTFDNGSIPHQIHLGELHAILRRQEDFYPFLKDNREKIEKILTFRIPYYVGPLARGNSRFAWMTRKSEETITPWNFEEVVDKGASAQSFIERMTNFDKNLPNEKVLPKHSLLYEYFTVYNELTKVKYVTEGMRKPAFLSGEQKKAIVDLLFKTNRKVTVKQLKEDYFKKIECFDSVEISGVEDRFNASLGTYHDLLKIIKDKDFLDNEENEDILEDIVLTLTLFEDREMIEERLKTYAHLFDDKVMKQLKRRRYTGWGRLSRKLINGIRDKQSGKTILDFLKSDGFANRNFMQLIHDDSLTFKEDIQKAQVSGQGDSLHEHIANLAGSPAIKKGILQTVKVVDELVKVMGRHKPENIVIEMARENQTTQKGQKNSRERMKRIEEGIKELGSQILKEHPVENTQLQNEKLYLYYLQNGRDMYVDQELDINRLSDYDVDHIVPQSFLKDDSIDNKVLTRSDKARGKSDNVPSEEVVKKMKNYWRQLLNAKLITQRKFDNLTKAERGGLSELDKAGFIKRQLVETRQITKHVAQILDSRMNTKYDENDKLIREVKVITLKSKLVSDFRKDFQFYKVREINNYHHAHDAYLNAVVGTALIKKYPKLESEFVYGDYKVYDVRKMIAKSEQEIGKATAKYFFYSNIMNFFKTEITLANGEIRKRPLIETNGETGEIVWDKGRDFATVRKVLSMPQVNIVKKTEVQTGGFSKESILPKRNSDKLIARKKDWDPKKYGGFDSPTVAYSVLVVAKVEKGKSKKLKSVKELLGITIMERSSFEKNPIDFLEAKGYKEVKKDLIIKLPKYSLFELENGRKRMLASAGELQKGNELALPSKYVNFLYLASHYEKLKGSPEDNEQKQLFVEQHKHYLDEIIEQISEFSKRVILADANLDKVLSAYNKHRDKPIREQAENIIHLFTLTNLGAPAAFKYFDTTIDRKRYTSTKEVLDATLIHQSITGLYETRIDLSQLGGDGGPAPAPAPAPAPAPGGTLGDQGSRGSDPLPEPRVTLTVEGIPTEFLVNTGAEHSVLTKPMGKMGSKRTVVAGATGSKVYPWTTKRLLKIGQKQVTHSFLVIPECPAPLLGRDLLTKLKAQIQFSTEGPQVTWEDRPAMCLVLNLEEEYRLHEKPVPPSIDPSWLQLFPMVWAEKAGMGLANQVPPVVVELKSDASPVAVRQYPMSKEAREGIRPHIQRFLDLGILVPCQSPWNTPLLPVKKPGTNDYRPVQDLREVNKRVQDIHPTVPNPYNLLSSLPPSHTWYSVLDLKDAFFCLKLHPNSQPLFAFEWRDPEKGNTGQLTWTRLPQGFKNSPTLFNEALHRDLASFRALNPQVVMLQYVDDLLVAAPTYRDCKEGTRRLLQELSKLGYRVSAKKAQLCREEVTYLGYLLKGGKRWLTPARKATVMKIPTPTTPRQVREFLGTAGFCRLWIPGFASLAAPLYPLTRPKVPFTWTEAHQEAFGRIKEALLSAPALALPDLTKPFALYVDEKEGVARGVLTQTLGPWRRPVAYLSKKLDPVASGWPTCLKAIAAVALLLKDADKLTLGQNVLVIAPHNLESIVRQPPDRWMTNARMTHYQSLLLNERVSFAPPAILNPATLLPVESDDTPIHICSEILAEETGTRPDLRDQPLPGVPAWYTDGSSFIMDGRRQAGAAIVDNKRTVWASNLPEGTSAQKAELIALTQALRLAEGKSINIYTDSRYAFATAHVHGAIYKQRGWLTSAGKDIKNKEEILALLEAIHLPKRVAIIHCPGHQRGTDPVATGNRKADEAAKQAAQSTRILTETTKNAGKRTADGSEFEKRTADGSEFESPKKKAKVE

SEQ ID NO: 6561 - protein, 2098 aa, synthetic construct
MPAAKRVKLDGGDKKYSIGLDIGTNSVGWAVITDEYKVPSKKFKVLGNTDRHSIKKNLIGALLFDSGETAEATRLKRTARRRYTRRKNRICYLQEIFSNEMAKVDDSFFHRLEESFLVEEDKKHERHPIFGNIVDEVAYHEKYPTIYHLRKKLVDSTDKADLRLIYLALAHMIKFRGHFLIEGDLNPDNSDVDKLFIQLVQTYNQLFEENPINASGVDAKAILSARLSKSRRLENLIAQLPGEKKNGLFGNLIALSLGLTPNFKSNFDLAEDAKLQLSKDTYDDDLDNLLAQIGDQYADLFLAAKNLSDAILLSDILRVNTEITKAPLSASMIKRYDEHHQDLTLLKALVRQQLPEKYKEIFFDQSKNGYAGYIDGGASQEEFYKFIKPILEKMDGTEELLVKLNREDLLRKQRTFDNGSIPHQIHLGELHAILRRQEDFYPFLKDNREKIEKILTFRIPYYVGPLARGNSRFAWMTRKSEETITPWNFEEVVDKGASAQSFIERMTNFDKNLPNEKVLPKHSLLYEYFTVYNELTKVKYVTEGMRKPAFLSGEQKKAIVDLLFKTNRKVTVKQLKEDYFKKIECFDSVEISGVEDRFNASLGTYHDLLKIIKDKDFLDNEENEDILEDIVLTLTLFEDREMIEERLKTYAHLFDDKVMKQLKRRRYTGWGRLSRKLINGIRDKQSGKTILDFLKSDGFANRNFMQLIHDDSLTFKEDIQKAQVSGQGDSLHEHIANLAGSPAIKKGILQTVKVVDELVKVMGRHKPENIVIEMARENQTTQKGQKNSRERMKRIEEGIKELGSQILKEHPVENTQLQNEKLYLYYLQNGRDMYVDQELDINRLSDYDVDHIVPQSFLKDDSIDNKVLTRSDKARGKSDNVPSEEVVKKMKNYWRQLLNAKLITQRKFDNLTKAERGGLSELDKAGFIKRQLVETRQITKHVAQILDSRMNTKYDENDKLIREVKVITLKSKLVSDFRKDFQFYKVREINNYHHAHDAYLNAVVGTALIKKYPKLESEFVYGDYKVYDVRKMIAKSEQEIGKATAKYFFYSNIMNFFKTEITLANGEIRKRPLIETNGETGEIVWDKGRDFATVRKVLSMPQVNIVKKTEVQTGGFSKESILPKRNSDKLIARKKDWDPKKYGGFDSPTVAYSVLVVAKVEKGKSKKLKSVKELLGITIMERSSFEKNPIDFLEAKGYKEVKKDLIIKLPKYSLFELENGRKRMLASAGELQKGNELALPSKYVNFLYLASHYEKLKGSPEDNEQKQLFVEQHKHYLDEIIEQISEFSKRVILADANLDKVLSAYNKHRDKPIREQAENIIHLFTLTNLGAPAAFKYFDTTIDRKRYTSTKEVLDATLIHQSITGLYETRIDLSQLGGDGGPAPAPAPAPAPAPGGTLNIEDEYRLHETSKEPDVSLGSTWLSDFPQAWAETGGMGLAVRQAPLIIPLKATSTPVSIKQYPMSQEARLGIKPHIQRLLDQGILVPCQSPWNTPLLPVKKPGTNDYRPVQDLREVNKRVEDIHPTVPNPYNLLSGLPPSHQWYTVLDLKDAFFCLRLHPTSQPLFAFEWRDPEMGISGQLTWTRLPQGFKNSPTLFNEALHRDLAGFRIQHPDLILLQYVDDLLLAATSELDCQQGTRALLQTLGDLGYRASAKKAQICQKQVKYLGYLLKEGQRWLTEARKETVMGQPIPKTPRQLREFLGTAGFCRLWIPGFAEMAAPLYPLTKPGTLFNWGPDQQKAFQEIKQALLTAPALGLPDLTKPFELFVDEKQGYAKGVLTQKLGPWRRPVAYLSKKLDPVAAGWPPCLRMVAAIAVLTKDAGKLTMGQPLVILAPHAVEALVKQPPDRWLSNARMTHYQALLLDTDRVQFGPVVALNPATLLPLPEEGLQHDCLDILAEAHGTRSDLMDQPLPDADHTWYTDGSSFLQEGQRKAGAAVTTETEVIWARALPAGTSAQRAELIALTQALKMAEGKKLNVYTDSRYAFATAHIHGEIYRRRGWLTSEGKEIKNKDEILALLKALFLPKRLSIIHCPGHQKGNSAEARGNRMADQAAREVATRETPETSTLLAGKRTADGSEFEKRTADGSEFESPKKKAKVE

SEQ ID NO: 6562 - protein, 2098 aa, synthetic construct
MPAAKRVKLDGGDKKYSIGLDIGTNSVGWAVITDEYKVPSKKFKVLGNTDRHSIKKNLIGALLFDSGETAEATRLKRTARRRYTRRKNRICYLQEIFSNEMAKVDDSFFHRLEESFLVEEDKKHERHPIFGNIVDEVAYHEKYPTIYHLRKKLVDSTDKADLRLIYLALAHMIKFRGHFLIEGDLNPDNSDVDKLFIQLVQTYNQLFEENPINASGVDAKAILSARLSKSRRLENLIAQLPGEKKNGLFGNLIALSLGLTPNFKSNFDLAEDAKLQLSKDTYDDDLDNLLAQIGDQYADLFLAAKNLSDAILLSDILRVNTEITKAPLSASMIKRYDEHHQDLTLLKALVRQQLPEKYKEIFFDQSKNGYAGYIDGGASQEEFYKFIKPILEKMDGTEELLVKLNREDLLRKQRTFDNGSIPHQIHLGELHAILRRQEDFYPFLKDNREKIEKILTFRIPYYVGPLARGNSRFAWMTRKSEETITPWNFEEVVDKGASAQSFIERMTNFDKNLPNEKVLPKHSLLYEYFTVYNELTKVKYVTEGMRKPAFLSGEQKKAIVDLLFKTNRKVTVKQLKEDYFKKIECFDSVEISGVEDRFNASLGTYHDLLKIIKDKDFLDNEENEDILEDIVLTLTLFEDREMIEERLKTYAHLFDDKVMKQLKRRRYTGWGRLSRKLINGIRDKQSGKTILDFLKSDGFANRNFMQLIHDDSLTFKEDIQKAQVSGQGDSLHEHIANLAGSPAIKKGILQTVKVVDELVKVMGRHKPENIVIEMARENQTTQKGQKNSRERMKRIEEGIKELGSQILKEHPVENTQLQNEKLYLYYLQNGRDMYVDQELDINRLSDYDVDHIVPQSFLKDDSIDNKVLTRSDKARGKSDNVPSEEVVKKMKNYWRQLLNAKLITQRKFDNLTKAERGGLSELDKAGFIKRQLVETRQITKHVAQILDSRMNTKYDENDKLIREVKVITLKSKLVSDFRKDFQFYKVREINNYHHAHDAYLNAVVGTALIKKYPKLESEFVYGDYKVYDVRKMIAKSEQEIGKATAKYFFYSNIMNFFKTEITLANGEIRKRPLIETNGETGEIVWDKGRDFATVRKVLSMPQVNIVKKTEVQTGGFSKESILPKRNSDKLIARKKDWDPKKYGGFDSPTVAYSVLVVAKVEKGKSKKLKSVKELLGITIMERSSFEKNPIDFLEAKGYKEVKKDLIIKLPKYSLFELENGRKRMLASAGELQKGNELALPSKYVNFLYLASHYEKLKGSPEDNEQKQLFVEQHKHYLDEIIEQISEFSKRVILADANLDKVLSAYNKHRDKPIREQAENIIHLFTLTNLGAPAAFKYFDTTIDRKRYTSTKEVLDATLIHQSITGLYETRIDLSQLGGDGGPAPAPAPAPAPAPGGTLNIEDEHRLHETSKEPDVSLGSTWLSDFPQAWAETGGMGLAVRQAPLIIPLKATSTPVSIKQYPMSQEARLGIKPHIQRLLDQGILVPCQSPWNTPLLPVKKPGTNDYRPVQDLREVNKRVEDIHPTVPNPYNLLSGLPPSHQWYTVLDLKDAFFCLRLHPTSQPLFAFEWRDPEMGISGQLTWTRLPQGFKNSPTLFDEALHRDLADFRIQHPDLILLQYVDDLLLAATSELDCQQGTRALLQTLGNLGYRASAKKAQICQKQVKYLGYLLKEGQRWLTEARKETVMGQPTPKTPRQLREFLGTAGFCRLWIPGFAEMAAPLYPLTKTGTLFNWGPDQQKAYQEIKQALLTAPALGLPDLTKPFELFVDEKQGYAKGVLTQKLGPWRRPVAYLSKKLDPVAAGWPPCLRMVAAIAVLTKDAGKLTMGQPLVILAPHAVEALVKQPPDRWLSNARMTHYQALLLDTDRVQFGPVVALNPATLLPLPEEGLQHNCLDILAEAHGTRPDLTDQPLPDADHTWYTDGSSLLQEGQRKAGAAVTTETEVIWAKALPAGTSAQRAELIALTQALKMAEGKKLNVYTDSRYAFATAHIHGEIYRRRGLLTSEGKEIKNKDEILALLKALFLPKRLSIIHCPGHQKGHSAEARGNRMADQAARKAAITETPDTSTLLAGKRTADGSEFEKRTADGSEFESPKKKAKVE

SEQ ID NO: 6563 - protein, 2098 aa, synthetic construct; identical to SEQ ID NO: 6562

SEQ ID NO: 6564 - protein, 2092 aa, synthetic construct
MPAAKRVKLDGGDKKYSIGLDIGTNSVGWAVITDEYKVPSKKFKVLGNTDRHSIKKNLIGALLFDSGETAEATRLKRTARRRYTRRKNRICYLQEIFSNEMAKVDDSFFHRLEESFLVEEDKKHERHPIFGNIVDEVAYHEKYPTIYHLRKKLVDSTDKADLRLIYLALAHMIKFRGHFLIEGDLNPDNSDVDKLFIQLVQTYNQLFEENPINASGVDAKAILSARLSKSRRLENLIAQLPGEKKNGLFGNLIALSLGLTPNFKSNFDLAEDAKLQLSKDTYDDDLDNLLAQIGDQYADLFLAAKNLSDAILLSDILRVNTEITKAPLSASMIKRYDEHHQDLTLLKALVRQQLPEKYKEIFFDQSKNGYAGYIDGGASQEEFYKFIKPILEKMDGTEELLVKLNREDLLRKQRTFDNGSIPHQIHLGELHAILRRQEDFYPFLKDNREKIEKILTFRIPYYVGPLARGNSRFAWMTRKSEETITPWNFEEVVDKGASAQSFIERMTNFDKNLPNEKVLPKHSLLYEYFTVYNELTKVKYVTEGMRKPAFLSGEQKKAIVDLLFKTNRKVTVKQLKEDYFKKIECFDSVEISGVEDRFNASLGTYHDLLKIIKDKDFLDNEENEDILEDIVLTLTLFEDREMIEERLKTYAHLFDDKVMKQLKRRRYTGWGRLSRKLINGIRDKQSGKTILDFLKSDGFANRNFMQLIHDDSLTFKEDIQKAQVSGQGDSLHEHIANLAGSPAIKKGILQTVKVVDELVKVMGRHKPENIVIEMARENQTTQKGQKNSRERMKRIEEGIKELGSQILKEHPVENTQLQNEKLYLYYLQNGRDMYVDQELDINRLSDYDVDHIVPQSFLKDDSIDNKVLTRSDKARGKSDNVPSEEVVKKMKNYWRQLLNAKLITQRKFDNLTKAERGGLSELDKAGFIKRQLVETRQITKHVAQILDSRMNTKYDENDKLIREVKVITLKSKLVSDFRKDFQFYKVREINNYHHAHDAYLNAVVGTALIKKYPKLESEFVYGDYKVYDVRKMIAKSEQEIGKATAKYFFYSNIMNFFKTEITLANGEIRKRPLIETNGETGEIVWDKGRDFATVRKVLSMPQVNIVKKTEVQTGGFSKESILPKRNSDKLIARKKDWDPKKYGGFDSPTVAYSVLVVAKVEKGKSKKLKSVKELLGITIMERSSFEKNPIDFLEAKGYKEVKKDLIIKLPKYSLFELENGRKRMLASAGELQKGNELALPSKYVNFLYLASHYEKLKGSPEDNEQKQLFVEQHKHYLDEIIEQISEFSKRVILADANLDKVLSAYNKHRDKPIREQAENIIHLFTLTNLGAPAAFKYFDTTIDRKRYTSTKEVLDATLIHQSITGLYETRIDLSQLGGDGGPAPAPAPAPAPAPGGTLQLDDEYRLYSPLVKPDQNIQFWLEQFPQAWAETAGMGLAKQVPPQVIQLKASATPVSVRQYPLSKEAQEGIRPHVQRLIQQGILVPVQSPWNTPLLPVRKPGTNDYRPVQDLREVNKRVQDIHPTVPNPYNLLCALPPQRSWYTVLDLKDAFFCLRLHPTSQPLFAFEWRDPGTGRTGQLTWTRLPQGFKNSPTIFDEALHRDLANFRIQHPQVTLLQYVDDLLLAGATKQDCLEGTKALLLELSDLGYRASAKKAQICRREVTYLGYSLRDGQRWLTEARKKTVVQIPAPTTAKQVREFLGTAGFCRLWIPGFATLAAPLYPLTKEKGEFSWAPEHQKAFDAIKKALLSAPALALPDVTKPFTLYVDERKGVARGVLTQTLGPWRRPVAYLSKKLDPVASGWPVCLKAIAAVAILVKDADKLTLGQNITVIAPHALENIVRQPPDRWMTNARMTHYQSLLLTERVTFAPPAALNPATLLPEETDEPVTHDCHQLLIEETGVRKDLTDIPLTGEVLTWFTDGSSYVVEGKRMAGAAVVDGTRTIWASSLPEGTSAQKAELMALTQALRLAEGKSINIYTDSRYAFATAHVHGAIYKQRGLLTSAGREIKNKEEILSLLEALHLPKRLAIIHCPGHQKAKDPISRGNQMADRVAKQAAQGVNLLAGKRTADGSEFEKRTADGSEFESPKKKAKVE

SEQ ID NO: 6565 - protein, 2092 aa, synthetic construct; identical to SEQ ID NO: 6564

SEQ ID NO: 6566 - protein, 2178 aa, synthetic construct
MPAAKRVKLDGGDKKYSIGLDIGTNSVGWAVITDEYKVPSKKFKVLGNTDRHSIKKNLIGALLFDSGETAEATRLKRTARRRYTRRKNRICYLQEIFSNEMAKVDDSFFHRLEESFLVEEDKKHERHPIFGNIVDEVAYHEKYPTIYHLRKKLVDSTDKADLRLIYLALAHMIKFRGHFLIEGDLNPDNSDVDKLFIQLVQTYNQLFEENPINASGVDAKAILSARLSKSRRLENLIAQLPGEKKNGLFGNLIALSLGLTPNFKSNFDLAEDAKLQLSKDTYDDDLDNLLAQIGDQYADLFLAAKNLSDAILLSDILRVNTEITKAPLSASMIKRYDEHHQDLTLLKALVRQQLPEKYKEIFFDQSKNGYAGYIDGGASQEEFYKFIKPILEKMDGTEELLVKLNREDLLRKQRTFDNGSIPHQIHLGELHAILRRQEDFYPFLKDNREKIEKILTFRIPYYVGPLARGNSRFAWMTRKSEETITPWNFEEVVDKGASAQSFIERMTNFDKNLPNEKVLPKHSLLYEYFTVYNELTKVKYVTEGMRKPAFLSGEQKKAIVDLLFKTNRKVTVKQLKEDYFKKIECFDSVEISGVEDRFNASLGTYHDLLKIIKDKDFLDNEENEDILEDIVLTLTLFEDREMIEERLKTYAHLFDDKVMKQLKRRRYTGWGRLSRKLINGIRDKQSGKTILDFLKSDGFANRNFMQLIHDDSLTFKEDIQKAQVSGQGDSLHEHIANLAGSPAIKKGILQTVKVVDELVKVMGRHKPENIVIEMARENQTTQKGQKNSRERMKRIEEGIKELGSQILKEHPVENTQLQNEKLYLYYLQNGRDMYVDQELDINRLSDYDVDHIVPQSFLKDDSIDNKVLTRSDKARGKSDNVPSEEVVKKMKNYWRQLLNAKLITQRKFDNLTKAERGGLSELDKAGFIKRQLVETRQITKHVAQILDSRMNTKYDENDKLIREVKVITLKSKLVSDFRKDFQFYKVREINNYHHAHDAYLNAVVGTALIKKYPKLESEFVYGDYKVYDVRKMIAKSEQEIGKATAKYFFYSNIMNFFKTEITLANGEIRKRPLIETNGETGEIVWDKGRDFATVRKVLSMPQVNIVKKTEVQTGGFSKESILPKRNSDKLIARKKDWDPKKYGGFDSPTVAYSVLVVAKVEKGKSKKLKSVKELLGITIMERSSFEKNPIDFLEAKGYKEVKKDLIIKLPKYSLFELENGRKRMLASAGELQKGNELALPSKYVNFLYLASHYEKLKGSPEDNEQKQLFVEQHKHYLDEIIEQISEFSKRVILADANLDKVLSAYNKHRDKPIREQAENIIHLFTLTNLGAPAAFKYFDTTIDRKRYTSTKEVLDATLIHQSITGLYETRIDLSQLGGDGGPAPAPAPAPAPAPGGMDPLQLLQPLEAEIKGTKLKAHWNSGATITCVPQAFLEEEVPIKNIWIKTIHGEKEQPVYYLTFKIQGRKVEAEVISSPYDYILVSPSDIPWLMKKPLQLTTLVPLQEYEERLLKQTMLTGSYKEKLQSLFLKYDALWQHWENQVGHRRIKPHHIATGTVNPRPQKQYPINPKAKASIQTVINDLLKQGVLIQQNSIMNTPVYPVPKPDGKWRMVLDYREVNKTIPLIAAQNQHSAGILSSIFRGKYKTTLDLSNGFWAHSITPESYWLTAFTWLGQQYCWTRLPQGFLNSPALFNADVVDLLKEVPNVQVYVDDIYISHDDPREHLEQLEKVFSLLLNAGYVVSLKKSEIAQHEVEFLGFNITKEGRGLTETFKQKLLNITPPRDLKQLQSILGLLNFARNFIPNFSELVKPLYNIIATAPGKYITWTTDNSQQLQNIISMLNSAENLEERNPEVRLIMKVNTSPSAGYIRFYNEFAKRPIMYLNYVYTKAEVKFTNTEKLLTTIHKGLIKALDLGMGQEILVYSPIVSMTKIQKTPLPERKALPIRWITWMSYLEDPRIQFHYDKTLPELQQVPTVTDDIIAKIKHPSEFSMVFYTDGSAIKHPNVNKSHNAGMGIAQVQFKPEFTVINTWSIPLGDHTAQLAEVAAVEFACKKALKIDGPVLIVTDSFYVAESVNKELPYWQSNGFFNNKKKPLKHVSKWKSIADCIQLKPDIIIIHEKGHQPTASTFHTEGNNLADKLATQGSYVVNAGKRTADGSEFEKRTADGSEFESPKKKAKVE

SEQ ID NO: 6567 - protein, 2096 aa, synthetic construct; identical to SEQ ID NO: 4509

SEQ ID NO: 6568 - protein, 2098 aa, synthetic construct; identical to SEQ ID NO: 4510

SEQ ID NO: 6569 - protein, 2093 aa, synthetic construct
MPAAKRVKLDGGDKKYSIGLDIGTNSVGWAVITDEYKVPSKKFKVLGNTDRHSIKKNLIGALLFDSGETAEATRLKRTARRRYTRRKNRICYLQEIFSNEMAKVDDSFFHRLEESFLVEEDKKHERHPIFGNIVDEVAYHEKYPTIYHLRKKLVDSTDKADLRLIYLALAHMIKFRGHFLIEGDLNPDNSDVDKLFIQLVQTYNQLFEENPINASGVDAKAILSARLSKSRRLENLIAQLPGEKKNGLFGNLIALSLGLTPNFKSNFDLAEDAKLQLSKDTYDDDLDNLLAQIGDQYADLFLAAKNLSDAILLSDILRVNTEITKAPLSASMIKRYDEHHQDLTLLKALVRQQLPEKYKEIFFDQSKNGYAGYIDGGASQEEFYKFIKPILEKMDGTEELLVKLNREDLLRKQRTFDNGSIPHQIHLGELHAILRRQEDFYPFLKDNREKIEKILTFRIPYYVGPLARGNSRFAWMTRKSEETITPWNFEEVVDKGASAQSFIERMTNFDKNLPNEKVLPKHSLLYEYFTVYNELTKVKYVTEGMRKPAFLSGEQKKAIVDLLFKTNRKVTVKQLKEDYFKKIECFDSVEISGVEDRFNASLGTYHDLLKIIKDKDFLDNEENEDILEDIVLTLTLFEDREMIEERLKTYAHLFDDKVMKQLKRRRYTGWGRLSRKLINGIRDKQSGKTILDFLKSDGFANRNFMQLIHDDSLTFKEDIQKAQVSGQGDSLHEHIANLAGSPAIKKGILQTVKVVDELVKVMGRHKPENIVIEMARENQTTQKGQKNSRERMKRIEEGIKELGSQILKEHPVENTQLQNEKLYLYYLQNGRDMYVDQELDINRLSDYDVDHIVPQSFLKDDSIDNKVLTRSDKARGKSDNVPSEEVVKKMKNYWRQLLNAKLITQRKFDNLTKAERGGLSELDKAGFIKRQLVETRQITKHVAQILDSRMNTKYDENDKLIREVKVITLKSKLVSDFRKDFQFYKVREINNYHHAHDAYLNAVVGTALIKKYPKLESEFVYGDYKVYDVRKMIAKSEQEIGKATAKYFFYSNIMNFFKTEITLANGEIRKRPLIETNGETGEIVWDKGRDFATVRKVLSMPQVNIVKKTEVQTGGFSKESILPKRNSDKLIARKKDWDPKKYGGFDSPTVAYSVLVVAKVEKGKSKKLKSVKELLGITIMERSSFEKNPIDFLEAKGYKEVKKDLIIKLPKYSLFELENGRKRMLASAGELQKGNELALPSKYVNFLYLASHYEKLKGSPEDNEQKQLFVEQHKHYLDEIIEQISEFSKRVILADANLDKVLSAYNKHRDKPIREQAENIIHLFTLTNLGAPAAFKYFDTTIDRKRYTSTKEVLDATLIHQSITGLYETRIDLSQLGGDGGGGSGGGGGTAPLEEEYRLFLEAPIQNVTLLEQWKREIPKVWAEINPPGLASTQAPIHVQLLSTALPVRVRQYPITLEAKRSLRETIRKFRAAGILRPVHSPWNTPLLPVRKSGTSEYRMVQDLREVNKRVETIHPTVPNPYTLLSLLPPDRIWYSVLDLKDAFFCIPLAPESQLIFAFEWADAEEGESGQLTWTRLPQGFKNSPTLFNEALNRDLQGFRLDHPSVSLLQYVDDLLIAADTQAACLSATRDLLMTLAELGYRVSGKKAQLCQEEVTYLGFKIHKGSRSLSNSRTQAILQIPVPKTKRQVREFLGTIGYCRLWIPGFAELAQPLYAATRPGNDPLVWGEKEEEAFQSLKLALTQPPALALPSLDKPFQLFVEETSGAAKGVLTQALGPWKRPVAYLSKRLDPVAAGWPRCLRAIAAAALLTREASKLTFGQDIEITSSHNLESLLRSPPDKWLTNARITQYQVLLLDPPRVRFKQTAALNPATLLPETDDTLPIHHCLDTLDSLTSTRPDLTDQPLAQAEATLFTDGSSYIRDGKRYAGAAVVTLDSVIWAEPLPIGTSAQKAELIALTKALEWSKDKSVNIYTDSRYAFATLHVHGMIYRERGWLTAGGKAIKNAPEILALLTAVWLPKRVAVMHCKGHQKDDAPTSTGNRRADEVAREVAIRPLSTQATISAGKRTADGSEFEKRTADGSEFESPKKKAKVE

SEQ ID NO: 6570 - protein, 2082 aa, synthetic construct
MPAAKRVKLDGGDKKYSIGLDIGTNSVGWAVITDEYKVPSKKFKVLGNTDRHSIKKNLIGALLFDSGETAEATRLKRTARRRYTRRKNRICYLQEIFSNEMAKVDDSFFHRLEESFLVEEDKKHERHPIFGNIVDEVAYHEKYPTIYHLRKKLVDSTDKADLRLIYLALAHMIKFRGHFLIEGDLNPDNSDVDKLFIQLVQTYNQLFEENPINASGVDAKAILSARLSKSRRLENLIAQLPGEKKNGLFGNLIALSLGLTPNFKSNFDLAEDAKLQLSKDTYDDDLDNLLAQIGDQYADLFLAAKNLSDAILLSDILRVNTEITKAPLSASMIKRYDEHHQDLTLLKALVRQQLPEKYKEIFFDQSKNGYAGYIDGGASQEEFYKFIKPILEKMDGTEELLVKLNREDLLRKQRTFDNGSIPHQIHLGELHAILRRQEDFYPFLKDNREKIEKILTFRIPYYVGPLARGNSRFAWMTRKSEETITPWNFEEVVDKGASAQSFIERMTNFDKNLPNEKVLPKHSLLYEYFTVYNELTKVKYVTEGMRKPAFLSGEQKKAIVDLLFKTNRKVTVKQLKEDYFKKIECFDSVEISGVEDRFNASLGTYHDLLKIIKDKDFLDNEENEDILEDIVLTLTLFEDREMIEERLKTYAHLFDDKVMKQLKRRRYTGWGRLSRKLINGIRDKQSGKTILDFLKSDGFANRNFMQLIHDDSLTFKEDIQKAQVSGQGDSLHEHIANLAGSPAIKKGILQTVKVVDELVKVMGRHKPENIVIEMARENQTTQKGQKNSRERMKRIEEGIKELGSQILKEHPVENTQLQNEKLYLYYLQNGRDMYVDQELDINRLSDYDVDHIVPQSFLKDDSIDNKVLTRSDKARGKSDNVPSEEVVKKMKNYWRQLLNAKLITQRKFDNLTKAERGGLSELDKAGFIKRQLVETRQITKHVAQILDSRMNTKYDENDKLIREVKVITLKSKLVSDFRKDFQFYKVREINNYHHAHDAYLNAVVGTALIKKYPKLESEFVYGDYKVYDVRKMIAKSEQEIGKATAKYFFYSNIMNFFKTEITLANGEIRKRPLIETNGETGEIVWDKGRDFATVRKVLSMPQVNIVKKTEVQTGGFSKESILPKRNSDKLIARKKDWDPKKYGGFDSPTVAYSVLVVAKVEKGKSKKLKSVKELLGITIMERSSFEKNPIDFLEAKGYKEVKKDLIIKLPKYSLFELENGRKRMLASAGELQKGNELALPSKYVNFLYLASHYEKLKGSPEDNEQKQLFVEQHKHYLDEIIEQISEFSKRVILADANLDKVLSAYNKHRDKPIREQAENIIHLFTLTNLGAPAAFKYFDTTIDRKRYTSTKEVLDATLIHQSITGLYETRIDLSQLGGDGGGGSGGGGGVPWILKKPLELTIKLDLEEQQGTLLNNSILSKKGKEELKQLFEKYSALWQSWENQVGHRRIRPHKIATGTVKPTPQKQYHINPKAKPDIQIVINDLLKQGVLIQKESTMNTPVYPVPKPNGRWRMVLDYRAVNKVTPLIAVQNQHSYGILGSLFKGRYKTTIDLSNGFWAHPIVPEDYWITAFTWQGKQYCWTVLPQGFLNSPGLFTGDVVDLLQGIPNVEVYVDDVYISHDSEKEHLEYLDILFNRLKEAGYIISLKKSNIANSIVDFLGFQITNEGRGLTDTFKEKLENITAPTTLKQLQSILGLLNFARNFIPDFTELIAPLYALIPKSTKNYVPWQIEHSTTLETLITKLNGAEYLQGRKGDKTLIMKVNASYTTGYIRYYNEGEKKPISYVSIVFSKTELKFTELEKLLTTVHKGLLKALDLSMGQNIHVYSPIVSMQNIQKTPQTAKKALASRWLSWLSYLEDPRIRFFYDPQMPALKDLPAVDTGKDNKKHPSNFQHIFYTDGSAITSPTKEGHLNAGMGIVYFINKDGNLQKQQEWSISLGNHTAQFAEIAAFEFALKKCLPLGGNILVVTDSNYVAKAYNEELDVWASNGFVNNRKKPLKHISKWKSVADLKRLRPDVVVTHEPGHQKLDSSPHAYGNNLADQLATQASFKVHAGKRTADGSEFEKRTADGSEFESPKKKAKVE

SEQ ID NO: 6571 - protein, 2082 aa, synthetic construct
MPAAKRVKLDGGDKKYSIGLDIGTNSVGWAVITDEYKVPSKKFKVLGNTDRHSIKKNLIGALLFDSGETAEATRLKRTARRRYTRRKNRICYLQEIFSNEMAKVDDSFFHRLEESFLVEEDKKHERHPIFGNIVDEVAYHEKYPTIYHLRKKLVDSTDKADLRLIYLALAHMIKFRGHFLIEGDLNPDNSDVDKLFIQLVQTYNQLFEENPINASGVDAKAILSARLSKSRRLENLIAQLPGEKKNGLFGNLIALSLGLTPNFKSNFDLAEDAKLQLSKDTYDDDLDNLLAQIGDQYADLFLAAKNLSDAILLSDILRVNTEITKAPLSASMIKRYDEHHQDLTLLKALVRQQLPEKYKEIFFDQSKNGYAGYIDGGASQEEFYKFIKPILEKMDGTEELLVKLNREDLLRKQRTFDNGSIPHQIHLGELHAILRRQEDFYPFLKDNREKIEKILTFRIPYYVGPLARGNSRFAWMTRKSEETITPWNFEEVVDKGASAQSFIERMTNFDKNLPNEKVLPKHSLLYEYFTVYNELTKVKYVTEGMRKPAFLSGEQKKAIVDLLFKTNRKVTVKQLKEDYFKKIECFDSVEISGVEDRFNASLGTYHDLLKIIKDKDFLDNEENEDILEDIVLTLTLFEDREMIEERLKTYAHLFDDKVMKQLKRRRYTGWGRLSRKLINGIRDKQSGKTILDFLKSDGFANRNFMQLIHDDSLTFKEDIQKAQVSGQGDSLHEHIANLAGSPAIKKGILQTVKVVDELVKVMGRHKPENIVIEMARENQTTQKGQKNSRERMKRIEEGIKELGSQILKEHPVENTQLQNEKLYLYYLQNGRDMYVDQELDINRLSDYDVDHIVPQSFLKDDSIDNKVLTRSDKARGKSDNVPSEEVVKKMKNYWRQLLNAKLITQRKFDNLTKAERGGLSELDKAGFIKRQLVETRQITKHVAQILDSRMNTKYDENDKLIREVKVITLKSKLVSDFRKDFQFYKVREINNYHHAHDAYLNAVVGTALIKKYPKLESEFVYGDYKVYDVRKMIAKSEQEIGKATAKYFFYSNIMNFFKTEITLANGEIRKRPLIETNGETGEIVWDKGRDFATVRKVLSMPQVNIVKKTEVQTGGFSKESILPKRNSDKLIARKKDWDPKKYGGFDSPTVAYSVLVVAKVEKGKSKKLKSVKELLGITIMERSSFEKNPIDFLEAKGYKEVKKDLIIKLPKYSLFELENGRKRMLASAGELQKGNELALPSKYVNFLYLASHYEKLKGSPEDNEQKQLFVEQHKHYLDEIIEQISEFSKRVILADANLDKVLSAYNKHRDKPIREQAENIIHLFTLTNLGAPAAFKYFDTTIDRKRYTSTKEVLDATLIHQSITGLYETRIDLSQLGGDGGGGSGGGGGVPWILKKPLELTIKLDLEEQQGTLLNNSILSKKGKEELKQLFEKYSALWQSWENQVGHRRIRPHKIATGTVKPTPQKQYHINPKAKPDIQIVINDLLKQGVLIQKESTMNTPVYPVPKPNGRWRMVLDYRAVNKVTPLIAVQNQHSYGILGSLFKGRYKTTIDLSNGFWAHPIVPEDYWITAFTWQGKQYCWTVLPQGFLNSPGLFNGDVVDLLQGIPNVEVYVDDVYISHDSEKEHLEYLDILFNRLKEAGYIISLKKSNIANSIVDFLGFQITNEGRGLTDTFKEKLENITAPTTLKQLQSILGLLNFARNFIPDFTELIAPLYALIPKSPKNYVPWQIEHSTTLETLITKLNGAEYLQGRKGDKTLIMKVNASYTTGYIRYYNEGEKKPISYVSIVFSKTELKFTELEKLLTTVHKGLLKALDLSMGQNIHVYSPIVSMQNIQKTPQTAKKALASRWLSWLSYLEDPRIRFFYDPQMPALKDLPAVDTGKDNKKHPSNFQHIFYTDGSAITSPTKEGHLNAGMGIVYFINKDGNLQKQQEWSISLGNHTAQFAEIAAFEFALKKCLPLGGNILVVTDSNYVAKAYNEELDVWASNGFVNNRKKPLKHISKWKSVADLKRLRPDVVVTHEPGHQKLDSSPHAYGNNLADQLATQASFKVHAGKRTADGSEFEKRTADGSEFESPKKKAKVE

SEQ ID NO: 6572 - protein, 2090 aa, synthetic construct
MPAAKRVKLDGGDKKYSIGLDIGTNSVGWAVITDEYKVPSKKFKVLGNTDRHSIKKNLIGALLFDSGETAEATRLKRTARRRYTRRKNRICYLQEIFSNEMAKVDDSFFHRLEESFLVEEDKKHERHPIFGNIVDEVAYHEKYPTIYHLRKKLVDSTDKADLRLIYLALAHMIKFRGHFLIEGDLNPDNSDVDKLFIQLVQTYNQLFEENPINASGVDAKAILSARLSKSRRLENLIAQLPGEKKNGLFGNLIALSLGLTPNFKSNFDLAEDAKLQLSKDTYDDDLDNLLAQIGDQYADLFLAAKNLSDAILLSDILRVNTEITKAPLSASMIKRYDEHHQDLTLLKALVRQQLPEKYKEIFFDQSKNGYAGYIDGGASQEEFYKFIKPILEKMDGTEELLVKLNREDLLRKQRTFDNGSIPHQIHLGELHAILRRQEDFYPFLKDNREKIEKILTFRIPYYVGPLARGNSRFAWMTRKSEETITPWNFEEVVDKGASAQSFIERMTNFDKNLPNEKVLPKHSLLYEYFTVYNELTKVKYVTEGMRKPAFLSGEQKKAIVDLLFKTNRKVTVKQLKEDYFKKIECFDSVEISGVEDRFNASLGTYHDLLKIIKDKDFLDNEENEDILEDIVLTLTLFEDREMIEERLKTYAHLFDDKVMKQLKRRRYTGWGRLSRKLINGIRDKQSGKTILDFLKSDGFANRNFMQLIHDDSLTFKEDIQKAQVSGQGDSLHEHIANLAGSPAIKKGILQTVKVVDELVKVMGRHKPENIVIEMARENQTTQKGQKNSRERMKRIEEGIKELGSQILKEHPVENTQLQNEKLYLYYLQNGRDMYVDQELDINRLSDYDVDHIVPQSFLKDDSIDNKVLTRSDKARGKSDNVPSEEVVKKMKNYWRQLLNAKLITQRKFDNLTKAERGGLSELDKAGFIKRQLVETRQITKHVAQILDSRMNTKYDENDKLIREVKVITLKSKLVSDFRKDFQFYKVREINNYHHAHDAYLNAVVGTALIKKYPKLESEFVYGDYKVYDVRKMIAKSEQEIGKATAKYFFYSNIMNFFKTEITLANGEIRKRPLIETNGETGEIVWDKGRDFATVRKVLSMPQVNIVKKTEVQTGGFSKESILPKRNSDKLIARKKDWDPKKYGGFDSPTVAYSVLVVAKVEKGKSKKLKSVKELLGITIMERSSFEKNPIDFLEAKGYKEVKKDLIIKLPKYSLFELENGRKRMLASAGELQKGNELALPSKYVNFLYLASHYEKLKGSPEDNEQKQLFVEQHKHYLDEIIEQISEFSKRVILADANLDKVLSAYNKHRDKPIREQAENIIHLFTLTNLGAPAAFKYFDTTIDRKRYTSTKEVLDATLIHQSITGLYETRIDLSQLGGDGGGGSGGGGGTLQLEEEYRLFEPESTQKQEMDIWLKNFPQAWAETGGMGTAHCQAPVLIQLKATATPISIRQYPMPHEAYQGIKPHIRRMLDQGILKPCQSPWNTPLLPVKKPGTEDYRPVQDLREVNKRVEDIHPTVPNPYNLLSTLPPSHPWYTVLDLKDAFFCLRLHSESQLLFAFEWRDPEIGLSGQLTWTRLPQGFKNSPTLFNEALHSDLADFRVRYPALVLLQYVDDLLLAAATRTECLEGTKALLETLGNKGYRASAKKAQICLQEVTYLGYSLKDGQRWLTKARKEAILSIPVPKNSRQVREFLGKAGYCRLFIPGFAELAAPLYPLTRPGTLFQWGTEQQLAFEDIKKALLSSPALGLPDITKPFELFIDENSGFAKGVLVQKLGPWKRPVAYLSKKLDTVASGWPPCLRMVAAIAILVKDAGKLTLGQPLTILTSHPVEALVRQPPNKWLSNARMTHYQAMLLDAERVHFGPTVSLNPATLLPLPSGGNHHDCLQILAETHGTRPDLTDQPLPDADLTWYTDGSSFIRNGEREAGAAVTTESEVIWAAPLPPGTSAQRAELIALTQALKMAEGKKLTVYTDSRYAFATTHVHGEIYRRRGWLTSEGKEIKNKNEILALLEALFLPKRLSIIHCPGHQKGDSPQAKGNRLADDTAKKAATETHSSLTVLPAGKRTADGSEFEKRTADGSEFESPKKKAKVE

SEQ ID NO: 6573 - protein, 2082 aa, synthetic construct
MPAAKRVKLDGGDKKYSIGLDIGTNSVGWAVITDEYKVPSKKFKVLGNTDRHSIKKNLIGALLFDSGETAEATRLKRTARRRYTRRKNRICYLQEIFSNEMAKVDDSFFHRLEESFLVEEDKKHERHPIFGNIVDEVAYHEKYPTIYHLRKKLVDSTDKADLRLIYLALAHMIKFRGHFLIEGDLNPDNSDVDKLFIQLVQTYNQLFEENPINASGVDAKAILSARLSKSRRLENLIAQLPGEKKNGLFGNLIALSLGLTPNFKSNFDLAEDAKLQLSKDTYDDDLDNLLAQIGDQYADLFLAAKNLSDAILLSDILRVNTEITKAPLSASMIKRYDEHHQDLTLLKALVRQQLPEKYKEIFFDQSKNGYAGYIDGGASQEEFYKFIKPILEKMDGTEELLVKLNREDLLRKQRTFDNGSIPHQIHLGELHAILRRQEDFYPFLKDNREKIEKILTFRIPYYVGPLARGNSRFAWMTRKSEETITPWNFEEVVDKGASAQSFIERMTNFDKNLPNEKVLPKHSLLYEYFTVYNELTKVKYVTEGMRKPAFLSGEQKKAIVDLLFKTNRKVTVKQLKEDYFKKIECFDSVEISGVEDRFNASLGTYHDLLKIIKDKDFLDNEENEDILEDIVLTLTLFEDREMIEERLKTYAHLFDDKVMKQLKRRRYTGWGRLSRKLINGIRDKQSGKTILDFLKSDGFANRNFMQLIHDDSLTFKEDIQKAQVSGQGDSLHEHIANLAGSPAIKKGILQTVKVVDELVKVMGRHKPENIVIEMARENQTTQKGQKNSRERMKRIEEGIKELGSQILKEHPVENTQLQNEKLYLYYLQNGRDMYVDQELDINRLSDYDVDHIVPQSFLKDDSIDNKVLTRSDKARGKSDNVPSEEVVKKMKNYWRQLLNAKLITQRKFDNLTKAERGGLSELDKAGFIKRQLVETRQITKHVAQILDSRMNTKYDENDKLIREVKVITLKSKLVSDFRKDFQFYKVREINNYHHAHDAYLNAVVGTALIKKYPKLESEFVYGDYKVYDVRKMIAKSEQEIGKATAKYFFYSNIMNFFKTEITLANGEIRKRPLIETNGETGEIVWDKGRDFATVRKVLSMPQVNIVKKTEVQTGGFSKESILPKRNSDKLIARKKDWDPKKYGGFDSPTVAYSVLVVAKVEKGKSKKLKSVKELLGITIMERSSFEKNPIDFLEAKGYKEVKKDLIIKLPKYSLFELENGRKRMLASAGELQKGNELALPSKYVNFLYLASHYEKLKGSPEDNEQKQLFVEQHKHYLDEIIEQISEFSKRVILADANLDKVLSAYNKHRDKPIREQAENIIHLFTLTNLGAPAAFKYFDTTIDRKRYTSTKEVLDATLIHQSITGLYETRIDLSQLGGDGGGGSGGGGGVPWLTQQPLQLTILVPLQEYQEKILSKTALPEDQKQQLKTLFVKYDNLWQHWENQVGHRKIRPHNIATGDYPPRPQKQYPINPKAKPSIQIVIDDLLKQGVLTPQNSTMNTPVYPVPKPDGRWRMVLDYREVNKTIPLTAAQNQHSAGILATIVRQKYKTTLDLANGFWAHPITPESYWLTAFTWQGKQYCWTRLPQGFLNSPALFNADVVDLLKEIPNVQVYVDDIYLSHDDPKEHVQQLEKVFQILLQAGYVVSLKKSEIGQKTVEFLGFNITKEGRGLTDTFKTKLLNITPPKDLKQLQSILGLLNFARNFIPNFAELVQPLYNLIAPAKGKYIEWSEENTKQLNMVIEALNTASNLEERLPEQRLVIKVNTSPSAGYVRYYNETGKKPIMYLNYVFSKAELKFSMLEKLLTTMHKALIKAMDLAMGQEILVYSPIVSMTKIQKTPLPERKALPIRWITWMTYLEDPRIQFHYDKTLPELKHIPDVYTSSQSPVKHPSQYEGVFYTDGSAIKSPDPTKSNNAGMGIVHATYKPEYQVLNQWSIPLGNHTAQMAEIAAVEFACKKALKIPGPVLVITDSFYVAESANKELPYWKSNGFVNNKKKPLKHISKWKSIAECLSMKPDITIQHEKGISLQIPVFILKGNALADKLATQGSYVVNAGKRTADGSEFEKRTADGSEFESPKKKAKVE

SEQ ID NO: 6574 - protein, 2171 aa, synthetic construct
MPAAKRVKLDGGDKKYSIGLDIGTNSVGWAVITDEYKVPSKKFKVLGNTDRHSIKKNLIGALLFDSGETAEATRLKRTARRRYTRRKNRICYLQEIFSNEMAKVDDSFFHRLEESFLVEEDKKHERHPIFGNIVDEVAYHEKYPTIYHLRKKLVDSTDKADLRLIYLALAHMIKFRGHFLIEGDLNPDNSDVDKLFIQLVQTYNQLFEENPINASGVDAKAILSARLSKSRRLENLIAQLPGEKKNGLFGNLIALSLGLTPNFKSNFDLAEDAKLQLSKDTYDDDLDNLLAQIGDQYADLFLAAKNLSDAILLSDILRVNTEITKAPLSASMIKRYDEHHQDLTLLKALVRQQLPEKYKEIFFDQSKNGYAGYIDGGASQEEFYKFIKPILEKMDGTEELLVKLNREDLLRKQRTFDNGSIPHQIHLGELHAILRRQEDFYPFLKDNREKIEKILTFRIPYYVGPLARGNSRFAWMTRKSEETITPWNFEEVVDKGASAQSFIERMTNFDKNLPNEKVLPKHSLLYEYFTVYNELTKVKYVTEGMRKPAFLSGEQKKAIVDLLFKTNRKVTVKQLKEDYFKKIECFDSVEISGVEDRFNASLGTYHDLLKIIKDKDFLDNEENEDILEDIVLTLTLFEDREMIEERLKTYAHLFDDKVMKQLKRRRYTGWGRLSRKLINGIRDKQSGKTILDFLKSDGFANRNFMQLIHDDSLTFKEDIQKAQVSGQGDSLHEHIANLAGSPAIKKGILQTVKVVDELVKVMGRHKPENIVIEMARENQTTQKGQKNSRERMKRIEEGIKELGSQILKEHPVENTQLQNEKLYLYYLQNGRDMYVDQELDINRLSDYDVDHIVPQSFLKDDSIDNKVLTRSDKARGKSDNVPSEEVVKKMKNYWRQLLNAKLITQRKFDNLTKAERGGLSELDKAGFIKRQLVETRQITKHVAQILDSRMNTKYDENDKLIREVKVITLKSKLVSDFRKDFQFYKVREINNYHHAHDAYLNAVVGTALIKKYPKLESEFVYGDYKVYDVRKMIAKSEQEIGKATAKYFFYSNIMNFFKTEITLANGEIRKRPLIETNGETGEIVWDKGRDFATVRKVLSMPQVNIVKKTEVQTGGFSKESILPKRNSDKLIARKKDWDPKKYGGFDSPTVAYSVLVVAKVEKGKSKKLKSVKELLGITIMERSSFEKNPIDFLEAKGYKEVKKDLIIKLPKYSLFELENGRKRMLASAGELQKGNELALPSKYVNFLYLASHYEKLKGSPEDNEQKQLFVEQHKHYLDEIIEQISEFSKRVILADANLDKVLSAYNKHRDKPIREQAENIIHLFTLTNLGAPAAFKYFDTTIDRKRYTSTKEVLDATLIHQSITGLYETRIDLSQLGGDGGGGSGGGGGMNPLQLLQPLPAEIKGTKLLAHWNSGATITCIPESFLEDEQPIKKTLIKTIHGEKQQNVYYVTFKVKGRKVEAEVIASPYEYILLSPTDVPWLTQQPLQLTILVPLQEYQEKILSKTALPEDQKQQLKTLFVKYDNLWQHWENQVGHRKIRPHNIATGDYPPRPQKQYPINPKAKPSIQIVIDDLLKQGVLTPQNSTMNTPVYPVPKPDGRWRMVLDYREVNKTIPLTAAQNQHSAGILATIVRQKYKTTLDLANGFWAHPITPESYWLTAFTWQGKQYCWTRLPQGFLNSPALFNADVVDLLKEIPNVQVYVDDIYLSHDDPKEHVQQLEKVFQILLQAGYVVSLKKSEIGQKTVEFLGFNITKEGRGLTDTFKTKLLNITPPKDLKQLQSILGKLNFARNFIPNFAELVQPLYNLIAPAKGKYIEWSEENTKQLNMVIEALNTASNLEERLPEQRLVIKVNTSPSAGYVRYYNETGKKPIMYLNYVFSKAELKFSMLEKLLTTMHKALIKAMDLAMGQEILVYSPIVSMTKIQKTPLPERKALPIRWITWMTYLEDPRIQFHYDKTLPELKHIPDVYTSSQSPVKHPSQYEGVFYTDGSAIKSPDPTKSNNAGMGIVHATYKPEYQVLNQWSIPLGNHTAQMAEIAAVEFACKKALKIPGPVLVITDSFYVAESANKELPYWKSNGFVNNKKKPLKHISKWKSIAECLSMKPDITIQHEKGISLQIPVFILKGNALADKLATQGSYVVNAGKRTADGSEFEKRTADGSEFESPKKKAKVE

SEQ ID NO: 6575 - protein, 2213 aa, synthetic construct
MPAAKRVKLDGGDKKYSIGLDIGTNSVGWAVITDEYKVPSKKFKVLGNTDRHSIKKNLIGALLFDSGETAEATRLKRTARRRYTRRKNRICYLQEIFSNEMAKVDDSFFHRLEESFLVEEDKKHERHPIFGNIVDEVAYHEKYPTIYHLRKKLVDSTDKADLRLIYLALAHMIKFRGHFLIEGDLNPDNSDVDKLFIQLVQTYNQLFEENPINASGVDAKAILSARLSKSRRLENLIAQLPGEKKNGLFGNLIALSLGLTPNFKSNFDLAEDAKLQLSKDTYDDDLDNLLAQIGDQYADLFLAAKNLSDAILLSDILRVNTEITKAPLSASMIKRYDEHHQDLTLLKALVRQQLPEKYKEIFFDQSKNGYAGYIDGGASQEEFYKFIKPILEKMDGTEELLVKLNREDLLRKQRTFDNGSIPHQIHLGELHAILRRQEDFYPFLKDNREKIEKILTFRIPYYVGPLARGNSRFAWMTRKSEETITPWNFEEVVDKGASAQSFIERMTNFDKNLPNEKVLPKHSLLYEYFTVYNELTKVKYVTEGMRKPAFLSGEQKKAIVDLLFKTNRKVTVKQLKEDYFKKIECFDSVEISGVEDRFNASLGTYHDLLKIIKDKDFLDNEENEDILEDIVLTLTLFEDREMIEERLKTYAHLFDDKVMKQLKRRRYTGWGRLSRKLINGIRDKQSGKTILDFLKSDGFANRNFMQLIHDDSLTFKEDIQKAQVSGQGDSLHEHIANLAGSPAIKKGILQTVKVVDELVKVMGRHKPENIVIEMARENQTTQKGQKNSRERMKRIEEGIKELGSQILKEHPVENTQLQNEKLYLYYLQNGRDMYVDQELDINRLSDYDVDHIVPQSFLKDDSIDNKVLTRSDKARGKSDNVPSEEVVKKMKNYWRQLLNAKLITQRKFDNLTKAERGGLSELDKAGFIKRQLVETRQITKHVAQILDSRMNTKYDENDKLIREVKVITLKSKLVSDFRKDFQFYKVREINNYHHAHDAYLNAVVGTALIKKYPKLESEFVYGDYKVYDVRKMIAKSEQEIGKATAKYFFYSNIMNFFKTEITLANGEIRKRPLIETNGETGEIVWDKGRDFATVRKVLSMPQVNIVKKTEVQTGGFSKESILPKRNSDKLIARKKDWDPKKYGGFDSPTVAYSVLVVAKVEKGKSKKLKSVKELLGITIMERSSFEKNPIDFLEAKGYKEVKKDLIIKLPKYSLFELENGRKRMLASAGELQKGNELALPSKYVNFLYLASHYEKLKGSPEDNEQKQLFVEQHKHYLDEIIEQISEFSKRVILADANLDKVLSAYNKHRDKPIREQAENIIHLFTLTNLGAPAAFKYFDTTIDRKRYTSTKEVLDATLIHQSITGLYETRIDLSQLGGDGGGGSGGGGGTLGDQGSRGSDPLPEPRVTLTVEGIPTEFLVNTGAEHSVLTKPMGKMGSKRTVVAGATGSKVYPWTTKRLLKIGQKQVTHSFLVIPECPAPLLGRDLLTKLKAQIQFSTEGPQVTWEDRPAMCLVLNLEEEYRLHEKPVPPSIDPSWLQLFPMVWAEKAGMGLANQVPPVVVELKSDASPVAVRQYPMSKEAREGIRPHIQRFLDLGILVPCQSPWNTPLLPVKKPGTNDYRPVQDLREVNKRVQDIHPTVPNPYNLLSSLPPSHTWYSVLDLKDAFFCLKLHPNSQPLFAFEWRDPEKGNTGQLTWTRLPQGFKNSPTLFNEALHRDLASFRALNPQVVMLQYVDDLLVAAPTYRDCKEGTRRLLQELSKLGYRVSAKKAQLCREEVTYLGYLLKGGKRWLTPARKATVMKIPTPTTPRQVREFLGKAGFCRLFIPGFASLAAPLYPLTRPKVPFTWTEAHQEAFGRIKEALLSAPALALPDLTKPFALYVDEKEGVARGVLTQTLGPWRRPVAYLSKKLDPVASGWPTCLKAIAAVALLLKDADKLTLGQNVLVIAPHNLESIVRQPPDRWMTNARMTHYQSLLLNERVSFAPPAILNPATLLPVESDDTPIHICSEILAEETGTRPDLRDQPLPGVPAWYTDGSSFIMDGRRQAGAAIVDNKRTVWASNLPEGTSAQKAELIALTQALRLAEGKSINIYTDSRYAFATAHVHGAIYKQRGWLTSAGKDIKNKEEILALLEAIHLPKRVAIIHCPGHQRGTDPVATGNRKADEAAKQAAQSTRILTETTKNAGKRTADGSEFEKRTADGSEFESPKKKAKVE

SEQ ID NO: 6576 - protein, 2091 aa, synthetic construct
MPAAKRVKLDGGDKKYSIGLDIGTNSVGWAVITDEYKVPSKKFKVLGNTDRHSIKKNLIGALLFDSGETAEATRLKRTARRRYTRRKNRICYLQEIFSNEMAKVDDSFFHRLEESFLVEEDKKHERHPIFGNIVDEVAYHEKYPTIYHLRKKLVDSTDKADLRLIYLALAHMIKFRGHFLIEGDLNPDNSDVDKLFIQLVQTYNQLFEENPINASGVDAKAILSARLSKSRRLENLIAQLPGEKKNGLFGNLIALSLGLTPNFKSNFDLAEDAKLQLSKDTYDDDLDNLLAQIGDQYADLFLAAKNLSDAILLSDILRVNTEITKAPLSASMIKRYDEHHQDLTLLKALVRQQLPEKYKEIFFDQSKNGYAGYIDGGASQEEFYKFIKPILEKMDGTEELLVKLNREDLLRKQRTFDNGSIPHQIHLGELHAILRRQEDFYPFLKDNREKIEKILTFRIPYYVGPLARGNSRFAWMTRKSEETITPWNFEEVVDKGASAQSFIERMTNFDKNLPNEKVLPKHSLLYEYFTVYNELTKVKYVTEGMRKPAFLSGEQKKAIVDLLFKTNRKVTVKQLKEDYFKKIECFDSVEISGVEDRFNASLGTYHDLLKIIKDKDFLDNEENEDILEDIVLTLTLFEDREMIEERLKTYAHLFDDKVMKQLKRRRYTGWGRLSRKLINGIRDKQSGKTILDFLKSDGFANRNFMQLIHDDSLTFKEDIQKAQVSGQGDSLHEHIANLAGSPAIKKGILQTVKVVDELVKVMGRHKPENIVIEMARENQTTQKGQKNSRERMKRIEEGIKELGSQILKEHPVENTQLQNEKLYLYYLQNGRDMYVDQELDINRLSDYDVDHIVPQSFLKDDSIDNKVLTRSDKARGKSDNVPSEEVVKKMKNYWRQLLNAKLITQRKFDNLTKAERGGLSELDKAGFIKRQLVETRQITKHVAQILDSRMNTKYDENDKLIREVKVITLKSKLVSDFRKDFQFYKVREINNYHHAHDAYLNAVVGTALIKKYPKLESEFVYGDYKVYDVRKMIAKSEQEIGKATAKYFFYSNIMNFFKTEITLANGEIRKRPLIETNGETGEIVWDKGRDFATVRKVLSMPQVNIVKKTEVQTGGFSKESILPKRNSDKLIARKKDWDPKKYGGFDSPTVAYSVLVVAKVEKGKSKKLKSVKELLGITIMERSSFEKNPIDFLEAKGYKEVKKDLIIKLPKYSLFELENGRKRMLASAGELQKGNELALPSKYVNFLYLASHYEKLKGSPEDNEQKQLFVEQHKHYLDEIIEQISEFSKRVILADANLDKVLSAYNKHRDKPIREQAENIIHLFTLTNLGAPAAFKYFDTTIDRKRYTSTKEVLDATLIHQSITGLYETRIDLSQLGGDGGGGSGGGGGTLNLEDEYRLYETSAEPEVSPGSTWLSDFPQAWAETGGMGLAVRQAPLIIPLKATSTPVSIKQYPMSQEAKLGIKPHIQRLLDQGILVPCQSPWNTPLLPVKKPGTNDYRPVQDLREVNKRVEDIHPTVPNPYNLLSGLPPSHRWYTVLDLKDAFFCLRLHPTSQPLFAFEWRDPGMGISGQLTWTRLPQGFKNSPTLFNEALHRDLADFRIQHPDLILLQYVDDILLAATSELDCQQGTRALLLTLGNLGYRASAKKAQLCQKQVKYLGYLLKEGQRWLTEARKETVMGQPTPKTPRQLREFLGTAGFCRLWIPGFAEMAAPLYPLTKPGTLFNWGPDQQKAYQEIKQALLTAPALGLPDLTKPFELFVDEKQGYAKGVLTQKLGPWRRPVAYLSKKLDPVAAGWPPCLRMVAAIAVLRKDAGKLTMGQPLVILAPHAVEALVKQPPDRWLSNARMTHYQAMLLDTDRVQFGPVVALNPATLLPLPEEGAPHDCLEILAETHGTRPDLTDQPIPDADHTWYTDGSSFLQEGQRKAGAAVTTETEVIWARALPAGTSAQRAELIALTQALKMAEGKRLNVYTDSRYAFATAHIHGEIYRRRGWLTSEGREIKNKSEILALLKALFLPKRLSIIHCLGHQKGDSAEARGNRLADQAAREAAIKTPPDTSTLLAGKRTADGSEFEKRTADGSEFESPKKKAKVE

SEQ ID NO: 6577 - protein, 2091 aa, synthetic construct
MPAAKRVKLDGGDKKYSIGLDIGTNSVGWAVITDEYKVPSKKFKVLGNTDRHSIKKNLIGALLFDSGETAEATRLKRTARRRYTRRKNRICYLQEIFSNEMAKVDDSFFHRLEESFLVEEDKKHERHPIFGNIVDEVAYHEKYPTIYHLRKKLVDSTDKADLRLIYLALAHMIKFRGHFLIEGDLNPDNSDVDKLFIQLVQTYNQLFEENPINASGVDAKAILSARLSKSRRLENLIAQLPGEKKNGLFGNLIALSLGLTPNFKSNFDLAEDAKLQLSKDTYDDDLDNLLAQIGDQYADLFLAAKNLSDAILLSDILRVNTEITKAPLSASMIKRYDEHHQDLTLLKALVRQQLPEKYKEIFFDQSKNGYAGYIDGGASQEEFYKFIKPILEKMDGTEELLVKLNREDLLRKQRTFDNGSIPHQIHLGELHAILRRQEDFYPFLKDNREKIEKILTFRIPYYVGPLARGNSRFAWMTRKSEETITPWNFEEVVDKGASAQSFIERMTNFDKNLPNEKVLPKHSLLYEYFTVYNELTKVKYVTEGMRKPAFLSGEQKKAIVDLLFKTNRKVTVKQLKEDYFKKIECFDSVEISGVEDRFNASLGTYHDLLKIIKDKDFLDNEENEDILEDIVLTLTLFEDREMIEERLKTYAHLFDDKVMKQLKRRRYTGWGRLSRKLINGIRDKQSGKTILDFLKSDGFANRNFMQLIHDDSLTFKEDIQKAQVSGQGDSLHEHIANLAGSPAIKKGILQTVKVVDELVKVMGRHKPENIVIEMARENQTTQKGQKNSRERMKRIEEGIKELGSQILKEHPVENTQLQNEKLYLYYLQNGRDMYVDQELDINRLSDYDVDHIVPQSFLKDDSIDNKVLTRSDKARGKSDNVPSEEVVKKMKNYWRQLLNAKLITQRKFDNLTKAERGGLSELDKAGFIKRQLVETRQITKHVAQILDSRMNTKYDENDKLIREVKVITLKSKLVSDFRKDFQFYKVREINNYHHAHDAYLNAVVGTALIKKYPKLESEFVYGDYKVYDVRKMIAKSEQEIGKATAKYFFYSNIMNFFKTEITLANGEIRKRPLIETNGETGEIVWDKGRDFATVRKVLSMPQVNIVKKTEVQTGGFSKESILPKRNSDKLIARKKDWDPKKYGGFDSPTVAYSVLVVAKVEKGKSKKLKSVKELLGITIMERSSFEKNPIDFLEAKGYKEVKKDLIIKLPKYSLFELENGRKRMLASAGELQKGNELALPSKYVNFLYLASHYEKLKGSPEDNEQKQLFVEQHKHYLDEIIEQISEFSKRVILADANLDKVLSAYNKHRDKPIREQAENIIHLFTLTNLGAPAAFKYFDTTIDRKRYTSTKEVLDATLIHQSITGLYETRIDLSQLGGDGGGGSGGGGGTLGIEDEYRLHETSTEPDVSLGSTWLSDFPQAWAETGGMGLAVRQAPLIIPLKATSTPVSIQQYPMSHEARLGIKPHIQRLLDQGILVPCQSPWNTPLLPVKKPGTNDYRPVQDLREVNKRVEDIHPTVPNPYNLLSGLPPSHQWYTVLDLKDAFFCLRLHPTSQPLFAFEWRDPGMGISGQLTWTRLPQGFKNSPTLFNEALHRDLADFRIQHPDLILLQYVDDILLAATSELDCQQGTRALLQTLGDLGYRASAKKAQICQKQVKYLGYLLREGQRWLTEARKETVMGQPVPKTPRQLREFLGTAGFCRLWIPGFAEMAAPLYPLTKPGTLFSWGPDQQKAYQEIKQALLTAPALGLPDLTKPFELFVDEKQGYAKGVLTQKLGPWRRPVAYLSKKLDPVAAGWPPCLRMVAAIAVLTKDAGKLTMGQPLVILAPHAVEALVKQPPDRWLSNARMTHYQAMLLDTDRVQFGPVVALNPATLLPLPEEGAPHDCLEILAETHGTRPDLTDQPIPDADHTWYTDGSSFLQEGQRKAGAAVTTETEVIWAGALPAGTSAQRAELIALTQALKMAEGKRLNVYTDSRYAFATAHIHGEIYRRRGWLTSEGREIKNKSEILALLKALFLPKRLSIIHCLGHQKGDSAEARGNRLADQAAREAAIKTPPDTSTLLAGKRTADGSEFEKRTADGSEFESPKKKAKVE

SEQ ID NO: 6578 - protein, 2091 aa, synthetic construct
MPAAKRVKLDGGDKKYSIGLDIGTNSVGWAVITDEYKVPSKKFKVLGNTDRHSIKKNLIGALLFDSGETAEATRLKRTARRRYTRRKNRICYLQEIFSNEMAKVDDSFFHRLEESFLVEEDKKHERHPIFGNIVDEVAYHEKYPTIYHLRKKLVDSTDKADLRLIYLALAHMIKFRGHFLIEGDLNPDNSDVDKLFIQLVQTYNQLFEENPINASGVDAKAILSARLSKSRRLENLIAQLPGEKKNGLFGNLIALSLGLTPNFKSNFDLAEDAKLQLSKDTYDDDLDNLLAQIGDQYADLFLAAKNLSDAILLSDILRVNTEITKAPLSASMIKRYDEHHQDLTLLKALVRQQLPEKYKEIFFDQSKNGYAGYIDGGASQEEFYKFIKPILEKMDGTEELLVKLNREDLLRKQRTFDNGSIPHQIHLGELHAILRRQEDFYPFLKDNREKIEKILTFRIPYYVGPLARGNSRFAWMTRKSEETITPWNFEEVVDKGASAQSFIERMTNFDKNLPNEKVLPKHSLLYEYFTVYNELTKVKYVTEGMRKPAFLSGEQKKAIVDLLFKTNRKVTVKQLKEDYFKKIECFDSVEISGVEDRFNASLGTYHDLLKIIKDKDFLDNEENEDILEDIVLTLTLFEDREMIEERLKTYAHLFDDKVMKQLKRRRYTGWGRLSRKLINGIRDKQSGKTILDFLKSDGFANRNFMQLIHDDSLTFKEDIQKAQVSGQGDSLHEHIANLAGSPAIKKGILQTVKVVDELVKVMGRHKPENIVIEMARENQTTQKGQKNSRERMKRIEEGIKELGSQILKEHPVENTQLQNEKLYLYYLQNGRDMYVDQELDINRLSDYDVDHIVPQSFLKDDSIDNKVLTRSDKARGKSDNVPSEEVVKKMKNYWRQLLNAKLITQRKFDNLTKAERGGLSELDKAGFIKRQLVETRQITKHVAQILDSRMNTKYDENDKLIREVKVITLKSKLVSDFRKDFQFYKVREINNYHHAHDAYLNAVVGTALIKKYPKLESEFVYGDYKVYDVRKMIAKSEQEIGKATAKYFFYSNIMNFFKTEITLANGEIRKRPLIETNGETGEIVWDKGRDFATVRKVLSMPQVNIVKKTEVQTGGFSKESILPKRNSDKLIARKKDWDPKKYGGFDSPTVAYSVLVVAKVEKGKSKKLKSVKELLGITIMERSSFEKNPIDFLEAKGYKEVKKDLIIKLPKYSLFELENGRKRMLASAGELQKGNELALPSKYVNFLYLASHYEKLKGSPEDNEQKQLFVEQHKHYLDEIIEQISEFSKRVILADANLDKVLSAYNKHRDKPIREQAENIIHLFTLTNLGAPAAFKYFDTTIDRKRYTSTKEVLDATLIHQSITGLYETRIDLSQLGGDGGGGSGGGGGTLNIEDEHRLHETSKEPDVSLGSTWLSDFPQAWAETGGMGLAVRQAPLIIPLKATSTPVSIKQYPMSQEARLGIKPHIQRLLDQGILVPCQSPWNTPLLPVKKPGTNDYRPVQDLREVNKRVEDIHPTVPNPYNLLSGLPPSHQWYTVLDLKDAFFCLRLHPTSQPLFAFEWRDPEMGISGQLTWTRLPQGFKNSPTLFNEALHRDLADFRIQHPDLILLQYVDDLLLAATSELDCQQGTRALLQTLGNLGYRASAKKAQICQKQVKYLGYLLKEGQRWLTEARKETVMGQPTPKTPRQLREFLGTAGFCRLWIPGFAEMAAPLYPLTKPGTLFNWGPDQQKAYQEIKQALLTAPALGLPDLTKPFELFVDEKQGYAKGVLTQKLGPWRRPVAYLSKKLDPVAAGWPPCLRMVAAIAVLTKDAGKLTMGQPLVILAPHAVEALVKQPPDRWLSNARMTHYQALLLDTDRVQFGPVVALNPATLLPLPEEGLQHNCLDILAEAHGTRPDLTDQPLPDADHTWYTDGSSLLQEGQRKAGAAVTTETEVIWAKALPAGTSAQRAELIALTQALKMAEGKKLNVYTDSRYAFATAHIHGEIYRRRGWLTSEGKEIKNKDEILALLKALFLPKRLSIIHCPGHQKGHSAEARGNRMADQAARKAAITETPDTSTLLAGKRTADGSEFEKRTADGSEFESPKKKAKVE

SEQ ID NO: 6579 - protein, 2091 aa, synthetic construct; identical to SEQ ID NO: 6578

SEQ ID NO: 6580 - protein, 2082 aa, synthetic construct
MPAAKRVKLDGGDKKYSIGLDIGTNSVGWAVITDEYKVPSKKFKVLGNTDRHSIKKNLIGALLFDSGETAEATRLKRTARRRYTRRKNRICYLQEIFSNEMAKVDDSFFHRLEESFLVEEDKKHERHPIFGNIVDEVAYHEKYPTIYHLRKKLVDSTDKADLRLIYLALAHMIKFRGHFLIEGDLNPDNSDVDKLFIQLVQTYNQLFEENPINASGVDAKAILSARLSKSRRLENLIAQLPGEKKNGLFGNLIALSLGLTPNFKSNFDLAEDAKLQLSKDTYDDDLDNLLAQIGDQYADLFLAAKNLSDAILLSDILRVNTEITKAPLSASMIKRYDEHHQDLTLLKALVRQQLPEKYKEIFFDQSKNGYAGYIDGGASQEEFYKFIKPILEKMDGTEELLVKLNREDLLRKQRTFDNGSIPHQIHLGELHAILRRQEDFYPFLKDNREKIEKILTFRIPYYVGPLARGNSRFAWMTRKSEETITPWNFEEVVDKGASAQSFIERMTNFDKNLPNEKVLPKHSLLYEYFTVYNELTKVKYVTEGMRKPAFLSGEQKKAIVDLLFKTNRKVTVKQLKEDYFKKIECFDSVEISGVEDRFNASLGTYHDLLKIIKDKDFLDNEENEDILEDIVLTLTLFEDREMIEERLKTYAHLFDDKVMKQLKRRRYTGWGRLSRKLINGIRDKQSGKTILDFLKSDGFANRNFMQLIHDDSLTFKEDIQKAQVSGQGDSLHEHIANLAGSPAIKKGILQTVKVVDELVKVMGRHKPENIVIEMARENQTTQKGQKNSRERMKRIEEGIKELGSQILKEHPVENTQLQNEKLYLYYLQNGRDMYVDQELDINRLSDYDVDHIVPQSFLKDDSIDNKVLTRSDKARGKSDNVPSEEVVKKMKNYWRQLLNAKLITQRKFDNLTKAERGGLSELDKAGFIKRQLVETRQITKHVAQILDSRMNTKYDENDKLIREVKVITLKSKLVSDFRKDFQFYKVREINNYHHAHDAYLNAVVGTALIKKYPKLESEFVYGDYKVYDVRKMIAKSEQEIGKATAKYFFYSNIMNFFKTEITLANGEIRKRPLIETNGETGEIVWDKGRDFATVRKVLSMPQVNIVKKTEVQTGGFSKESILPKRNSDKLIARKKDWDPKKYGGFDSPTVAYSVLVVAKVEKGKSKKLKSVKELLGITIMERSSFEKNPIDFLEAKGYKEVKKDLIIKLPKYSLFELENGRKRMLASAGELQKGNELALPSKYVNFLYLASHYEKLKGSPEDNEQKQLFVEQHKHYLDEIIEQISEFSKRVILADANLDKVLSAYNKHRDKPIREQAENIIHLFTLTNLGAPAAFKYFDTTIDRKRYTSTKEVLDATLIHQSITGLYETRIDLSQLGGDGGGGSGGGGGIPWLMKKPLQLTTLVPLQEYEERLLKQTMLTGSYKEKLQSLFLKYDALWQHWENQVGHRRIKPHHIATGTVNPRPQKQYPINPKAKASIQTVINDLLKQGVLIQQNSIMNTPVYPVPKPDGKWRMVLDYREVNKTIPLIAAQNQHSAGILSSIFRGKYKTTLDLSNGFWAHSITPESYWLTAFTWLGQQYCWTRLPQGFLNSPALFNADVVDLLKEVPNVQVYVDDIYISHDDPREHLEQLEKVFSLLLNAGYVVSLKKSEIAQHEVEFLGFNITKEGRGLTETFKQKLLNITPPRDLKQLQSILGLLNFARNFIPNFSELVKPLYNIIATAPGKYITWTTDNSQQLQNIISMLNSAENLEERNPEVRLIMKVNTSPSAGYIRFYNEFAKRPIMYLNYVYTKAEVKFTNTEKLLTTIHKGLIKALDLGMGQEILVYSPIVSMTKIQKTPLPERKALPIRWITWMSYLEDPRIQFHYDKTLPELQQVPTVTDDIIAKIKHPSEFSMVFYTDGSAIKHPNVNKSHNAGMGIAQVQFKPEFTVINTWSIPLGDHTAQLAEVAAVEFACKKALKIDGPVLIVTDSFYVAESVNKELPYWQSNGFFNNKKKPLKHVSKWKSIADCIQLKPDIIIIHEKGHQPTASTFHTEGNNLADKLATQGSYVVNAGKRTADGSEFEKRTADGSEFESPKKKAKVE

SEQ ID NO: 6581 - protein, 2089 aa, synthetic construct
MPAAKRVKLDGGDKKYSIGLDIGTNSVGWAVITDEYKVPSKKFKVLGNTDRHSIKKNLIGALLFDSGETAEATRLKRTARRRYTRRKNRICYLQEIFSNEMAKVDDSFFHRLEESFLVEEDKKHERHPIFGNIVDEVAYHEKYPTIYHLRKKLVDSTDKADLRLIYLALAHMIKFRGHFLIEGDLNPDNSDVDKLFIQLVQTYNQLFEENPINASGVDAKAILSARLSKSRRLENLIAQLPGEKKNGLFGNLIALSLGLTPNFKSNFDLAEDAKLQLSKDTYDDDLDNLLAQIGDQYADLFLAAKNLSDAILLSDILRVNTEITKAPLSASMIKRYDEHHQDLTLLKALVRQQLPEKYKEIFFDQSKNGYAGYIDGGASQEEFYKFIKPILEKMDGTEELLVKLNREDLLRKQRTFDNGSIPHQIHLGELHAILRRQEDFYPFLKDNREKIEKILTFRIPYYVGPLARGNSRFAWMTRKSEETITPWNFEEVVDKGASAQSFIERMTNFDKNLPNEKVLPKHSLLYEYFTVYNELTKVKYVTEGMRKPAFLSGEQKKAIVDLLFKTNRKVTVKQLKEDYFKKIECFDSVEISGVEDRFNASLGTYHDLLKIIKDKDFLDNEENEDILEDIVLTLTLFEDREMIEERLKTYAHLFDDKVMKQLKRRRYTGWGRLSRKLINGIRDKQSGKTILDFLKSDGFANRNFMQLIHDDSLTFKEDIQKAQVSGQGDSLHEHIANLAGSPAIKKGILQTVKVVDELVKVMGRHKPENIVIEMARENQTTQKGQKNSRERMKRIEEGIKELGSQILKEHPVENTQLQNEKLYLYYLQNGRDMYVDQELDINRLSDYDVDHIVPQSFLKDDSIDNKVLTRSDKARGKSDNVPSEEVVKKMKNYWRQLLNAKLITQRKFDNLTKAERGGLSELDKAGFIKRQLVETRQITKHVAQILDSRMNTKYDENDKLIREVKVITLKSKLVSDFRKDFQFYKVREINNYHHAHDAYLNAVVGTALIKKYPKLESEFVYGDYKVYDVRKMIAKSEQEIGKATAKYFFYSNIMNFFKTEITLANGEIRKRPLIETNGETGEIVWDKGRDFATVRKVLSMPQVNIVKKTEVQTGGFSKESILPKRNSDKLIARKKDWDPKKYGGFDSPTVAYSVLVVAKVEKGKSKKLKSVKELLGITIMERSSFEKNPIDFLEAKGYKEVKKDLIIKLPKYSLFELENGRKRMLASAGELQKGNELALPSKYVNFLYLASHYEKLKGSPEDNEQKQLFVEQHKHYLDEIIEQISEFSKRVILADANLDKVLSAYNKHRDKPIREQAENIIHLFTLTNLGAPAAFKYFDTTIDRKRYTSTKEVLDATLIHQSITGLYETRIDLSQLGGDGGGGSGGGGGVLNLEEEYRLHEKPVPSSIDPSWLQLFPTVWAERAGMGLANQVPPVVVELRSGASPVAVRQYPMSKEAREGIRPHIQRFLDLGVLVPCQSPWNTPLLPVKKPGTNDYRPVQDLREINKRVQDIHPTVPNPYNLLSSLPPSHTWYSVLDLKDAFFCLKLHPNSQPLFAFEWRDPEKGNTGQLTWTRLPQGFKNSPTLFNEALHRDLAPFRALNPQVVLLQYVDDLLVAAPTYRDCKEGTQKLLQELSKLGYRVSAKKAQLCQKEVTYLGYLLKEGKRWLTPARKATVMKIPPPTTPRQVREFLGKAGFCRLFIPGFASLAAPLYPLTKPSIPFIWTEEHQKAFDRIKEALLSAPALALPDLTKPFTLYVDERAGVARGVLTQTLGPWRRPVAYLSKKLDPVASGWPTCLKAVAAVALLLKDADKLTLGQNVTVIASHSLESIVRQPPDRWMTNARMTHYQSLLLNERVSFAPPAVLNPATLLPVESEATPVHRCSEILAEETGTRRDLKDQPLPGVPAWYTDGSSFIAEGKRRAGAAIVDGKRTVWASSLPEGTSAQKAELVALTQALRLAEGKDINIYTDSRYAFATAHIHGAIYKQRGWLTSAGKDIKNKEEILALLEAIHLPKRVAIIHCPGHQKGNDPVATGNRRADEAAKQAALSTRVLAETTKPAGKRTADGSEFEKRTADGSEFESPKKKAKVE

SEQ ID NO: 6582 - protein, 2091 aa, synthetic construct
MPAAKRVKLDGGDKKYSIGLDIGTNSVGWAVITDEYKVPSKKFKVLGNTDRHSIKKNLIGALLFDSGETAEATRLKRTARRRYTRRKNRICYLQEIFSNEMAKVDDSFFHRLEESFLVEEDKKHERHPIFGNIVDEVAYHEKYPTIYHLRKKLVDSTDKADLRLIYLALAHMIKFRGHFLIEGDLNPDNSDVDKLFIQLVQTYNQLFEENPINASGVDAKAILSARLSKSRRLENLIAQLPGEKKNGLFGNLIALSLGLTPNFKSNFDLAEDAKLQLSKDTYDDDLDNLLAQIGDQYADLFLAAKNLSDAILLSDILRVNTEITKAPLSASMIKRYDEHHQDLTLLKALVRQQLPEKYKEIFFDQSKNGYAGYIDGGASQEEFYKFIKPILEKMDGTEELLVKLNREDLLRKQRTFDNGSIPHQIHLGELHAILRRQEDFYPFLKDNREKIEKILTFRIPYYVGPLARGNSRFAWMTRKSEETITPWNFEEVVDKGASAQSFIERMTNFDKNLPNEKVLPKHSLLYEYFTVYNELTKVKYVTEGMRKPAFLSGEQKKAIVDLLFKTNRKVTVKQLKEDYFKKIECFDSVEISGVEDRFNASLGTYHDLLKIIKDKDFLDNEENEDILEDIVLTLTLFEDREMIEERLKTYAHLFDDKVMKQLKRRRYTGWGRLSRKLINGIRDKQSGKTILDFLKSDGFANRNFMQLIHDDSLTFKEDIQKAQVSGQGDSLHEHIANLAGSPAIKKGILQTVKVVDELVKVMGRHKPENIVIEMARENQTTQKGQKNSRERMKRIEEGIKELGSQILKEHPVENTQLQNEKLYLYYLQNGRDMYVDQELDINRLSDYDVDHIVPQSFLKDDSIDNKVLTRSDKARGKSDNVPSEEVVKKMKNYWRQLLNAKLITQRKFDNLTKAERGGLSELDKAGFIKRQLVETRQITKHVAQILDSRMNTKYDENDKLIREVKVITLKSKLVSDFRKDFQFYKVREINNYHHAHDAYLNAVVGTALIKKYPKLESEFVYGDYKVYDVRKMIAKSEQEIGKATAKYFFYSNIMNFFKTEITLANGEIRKRPLIETNGETGEIVWDKGRDFATVRKVLSMPQVNIVKKTEVQTGGFSKESILPKRNSDKLIARKKDWDPKKYGGFDSPTVAYSVLVVAKVEKGKSKKLKSVKELLGITIMERSSFEKNPIDFLEAKGYKEVKKDLIIKLPKYSLFELENGRKRMLASAGELQKGNELALPSKYVNFLYLASHYEKLKGSPEDNEQKQLFVEQHKHYLDEIIEQISEFSKRVILADANLDKVLSAYNKHRDKPIREQAENIIHLFTLTNLGAPAAFKYFDTTIDRKRYTSTKEVLDATLIHQSITGLYETRIDLSQLGGDGGGGSGGGGGTLNIEDEYRLHETSKEPDVPLGSTWLSDFPQAWAETGGMGLAVRQAPLIIPLKATSTPVSIKQYPMSQEARLGIKPHIQRLLDQGILVPCQSPWNTPLLPVKKPGTNDYRPVQDLREVNKRVEDIHPTVPNPYNLLSGLPPSHQWYTVLDLKDAFFCLRLHPTSQPLFAFEWRDPEMGISGQLTWTRLPQGFKNSPTLFNEALHRDLADFRIQHPDLILLQYVDDLLLAATSEQDCQRGTRALLQTLGNLGYRASAKKAQICQKQVKYLGYLLKEGQRWLTEARKETVMGQPTPKTPRQLREFLGTAGFCRLWIPGFAEMAAPLYPLTKPGTLFNWGPDQQKAYQEIKQALLTAPALGLPDLTKPFELFVDEKQGYAKGVLTQKLGPWRRPVAYLSKKLDPVAAGWPPCLRMVAAIAVLTKDAGKLTMGQPLVILAPHAVEALVKQPPDRWLSNARMTHYQAMLLDTDRVQFGPVVALNPATLLPLPEKEAPHDCLEILAETHGTRPDLTDQPIPDADYTWYTDGSSFLQEGQRRAGAAVTTETEVIWARALPAGTSAQRAELIALTQALKMAEGKKLNVYTDSRYAFATAHVHGEIYRRRGWLTSEGREIKNKNEILALLKALFLPKRLSIIHCPGHQKGNSAEARGNRMADQAAREAAMKAVLETSTLLAGKRTADGSEFEKRTADGSEFESPKKKAKVE

SEQ ID NO: 6583 - protein, 2091 aa, synthetic construct
MPAAKRVKLDGGDKKYSIGLDIGTNSVGWAVITDEYKVPSKKFKVLGNTDRHSIKKNLIGALLFDSGETAEATRLKRTARRRYTRRKNRICYLQEIFSNEMAKVDDSFFHRLEESFLVEEDKKHERHPIFGNIVDEVAYHEKYPTIYHLRKKLVDSTDKADLRLIYLALAHMIKFRGHFLIEGDLNPDNSDVDKLFIQLVQTYNQLFEENPINASGVDAKAILSARLSKSRRLENLIAQLPGEKKNGLFGNLIALSLGLTPNFKSNFDLAEDAKLQLSKDTYDDDLDNLLAQIGDQYADLFLAAKNLSDAILLSDILRVNTEITKAPLSASMIKRYDEHHQDLTLLKALVRQQLPEKYKEIFFDQSKNGYAGYIDGGASQEEFYKFIKPILEKMDGTEELLVKLNREDLLRKQRTFDNGSIPHQIHLGELHAILRRQEDFYPFLKDNREKIEKILTFRIPYYVGPLARGNSRFAWMTRKSEETITPWNFEEVVDKGASAQSFIERMTNFDKNLPNEKVLPKHSLLYEYFTVYNELTKVKYVTEGMRKPAFLSGEQKKAIVDLLFKTNRKVTVKQLKEDYFKKIECFDSVEISGVEDRFNASLGTYHDLLKIIKDKDFLDNEENEDILEDIVLTLTLFEDREMIEERLKTYAHLFDDKVMKQLKRRRYTGWGRLSRKLINGIRDKQSGKTILDFLKSDGFANRNFMQLIHDDSLTFKEDIQKAQVSGQGDSLHEHIANLAGSPAIKKGILQTVKVVDELVKVMGRHKPENIVIEMARENQTTQKGQKNSRERMKRIEEGIKELGSQILKEHPVENTQLQNEKLYLYYLQNGRDMYVDQELDINRLSDYDVDHIVPQSFLKDDSIDNKVLTRSDKARGKSDNVPSEEVVKKMKNYWRQLLNAKLITQRKFDNLTKAERGGLSELDKAGFIKRQLVETRQITKHVAQILDSRMNTKYDENDKLIREVKVITLKSKLVSDFRKDFQFYKVREINNYHHAHDAYLNAVVGTALIKKYPKLESEFVYGDYKVYDVRKMIAKSEQEIGKATAKYFFYSNIMNFFKTEITLANGEIRKRPLIETNGETGEIVWDKGRDFATVRKVLSMPQVNIVKKTEVQTGGFSKESILPKRNSDKLIARKKDWDPKKYGGFDSPTVAYSVLVVAKVEKGKSKKLKSVKELLGITIMERSSFEKNPIDFLEAKGYKEVKKDLIIKLPKYSLFELENGRKRMLASAGELQKGNELALPSKYVNFLYLASHYEKLKGSPEDNEQKQLFVEQHKHYLDEIIEQISEFSKRVILADANLDKVLSAYNKHRDKPIREQAENIIHLFTLTNLGAPAAFKYFDTTIDRKRYTSTKEVLDATLIHQSITGLYETRIDLSQLGGDGGGGSGGGGGTLNIEDEYRLHETSKEPDVPLGSTWLSDFPQAWAETGGMGLAVRQAPLIIPLKATSTPVSIKQYPMSQEARLGIKPHIQRLLDQGILVPCQSPWNTPLLPVKKPGTNDYRPVQDLREVNKRVEDIHPTVPNPYNLLSGLPPSHQWYTVLDLKDAFFCLRLHPTSQPLFAFEWRDPEMGISGQLTWTRLPQGFKNSPTLFNEALHRDLADFRIQHPDLILLQYVDDLLLAATSEQDCQRGTRALLQTLGNLGYRASAKKAQICQKQVKYLGYLLKEGQRWLTEARKETVMGQPTPKTPRQLREFLGKAGFCRLFIPGFAEMAAPLYPLTKPGTLFNWGPDQQKAYQEIKQALLTAPALGLPDLTKPFELFVDEKQGYAKGVLTQKLGPWRRPVAYLSKKLDPVAAGWPPCLRMVAAIAVLTKDAGKLTMGQPLVILAPHAVEALVKQPPDRWLSNARMTHYQAMLLDTDRVQFGPVVALNPATLLPLPEKEAPHDCLEILAETHGTRPDLTDQPIPDADYTWYTDGSSFLQEGQRRAGAAVTTETEVIWARALPAGTSAQRAELIALTQALKMAEGKKLNVYTDSRYAFATAHVHGEIYRRRGWLTSEGREIKNKNEILALLKALFLPKRLSIIHCPGHQKGNSAEARGNRMADQAAREAAMKAVLETSTLLAGKRTADGSEFEKRTADGSEFESPKKKAKVE

SEQ ID NO: 6584 - protein, 2093 aa, synthetic construct
MPAAKRVKLDGGDKKYSIGLDIGTNSVGWAVITDEYKVPSKKFKVLGNTDRHSIKKNLIGALLFDSGETAEATRLKRTARRRYTRRKNRICYLQEIFSNEMAKVDDSFFHRLEESFLVEEDKKHERHPIFGNIVDEVAYHEKYPTIYHLRKKLVDSTDKADLRLIYLALAHMIKFRGHFLIEGDLNPDNSDVDKLFIQLVQTYNQLFEENPINASGVDAKAILSARLSKSRRLENLIAQLPGEKKNGLFGNLIALSLGLTPNFKSNFDLAEDAKLQLSKDTYDDDLDNLLAQIGDQYADLFLAAKNLSDAILLSDILRVNTEITKAPLSASMIKRYDEHHQDLTLLKALVRQQLPEKYKEIFFDQSKNGYAGYIDGGASQEEFYKFIKPILEKMDGTEELLVKLNREDLLRKQRTFDNGSIPHQIHLGELHAILRRQEDFYPFLKDNREKIEKILTFRIPYYVGPLARGNSRFAWMTRKSEETITPWNFEEVVDKGASAQSFIERMTNFDKNLPNEKVLPKHSLLYEYFTVYNELTKVKYVTEGMRKPAFLSGEQKKAIVDLLFKTNRKVTVKQLKEDYFKKIECFDSVEISGVEDRFNASLGTYHDLLKIIKDKDFLDNEENEDILEDIVLTLTLFEDREMIEERLKTYAHLFDDKVMKQLKRRRYTGWGRLSRKLINGIRDKQSGKTILDFLKSDGFANRNFMQLIHDDSLTFKEDIQKAQVSGQGDSLHEHIANLAGSPAIKKGILQTVKVVDELVKVMGRHKPENIVIEMARENQTTQKGQKNSRERMKRIEEGIKELGSQILKEHPVENTQLQNEKLYLYYLQNGRDMYVDQELDINRLSDYDVDHIVPQSFLKDDSIDNKVLTRSDKARGKSDNVPSEEVVKKMKNYWRQLLNAKLITQRKFDNLTKAERGGLSELDKAGFIKRQLVETRQITKHVAQILDSRMNTKYDENDKLIREVKVITLKSKLVSDFRKDFQFYKVREINNYHHAHDAYLNAVVGTALIKKYPKLESEFVYGDYKVYDVRKMIAKSEQEIGKATAKYFFYSNIMNFFKTEITLANGEIRKRPLIETNGETGEIVWDKGRDFATVRKVLSMPQVNIVKKTEVQTGGFSKESILPKRNSDKLIARKKDWDPKKYGGFDSPTVAYSVLVVAKVEKGKSKKLKSVKELLGITIMERSSFEKNPIDFLEAKGYKEVKKDLIIKLPKYSLFELENGRKRMLASAGELQKGNELALPSKYVNFLYLASHYEKLKGSPEDNEQKQLFVEQHKHYLDEIIEQISEFSKRVILADANLDKVLSAYNKHRDKPIREQAENIIHLFTLTNLGAPAAFKYFDTTIDRKRYTSTKEVLDATLIHQSITGLYETRIDLSQLGGDGGGGGGGSGGTAPLEEEYRLFLEAPIQNVTLLEQWKREIPKVWAEINPPGLASTQAPIHVQLLSTALPVRVRQYPITLEAKRSLRETIRKFRAAGILRPVHSPWNTPLLPVRKSGTSEYRMVQDLREVNKRVETIHPTVPNPYTLLSLLPPDRIWYSVLDLKDAFFCIPLAPESQLIFAFEWADAEEGESGQLTWTRLPQGFKNSPTLFNEALNRDLQGFRLDHPSVSLLQYVDDLLIAADTQAACLSATRDLLMTLAELGYRVSGKKAQLCQEEVTYLGFKIHKGSRSLSNSRTQAILQIPVPKTKRQVREFLGTIGYCRLWIPGFAELAQPLYAATRPGNDPLVWGEKEEEAFQSLKLALTQPPALALPSLDKPFQLFVEETSGAAKGVLTQALGPWKRPVAYLSKRLDPVAAGWPRCLRAIAAAALLTREASKLTFGQDIEITSSHNLESLLRSPPDKWLTNARITQYQVLLLDPPRVRFKQTAALNPATLLPETDDTLPIHHCLDTLDSLTSTRPDLTDQPLAQAEATLFTDGSSYIRDGKRYAGAAVVTLDSVIWAEPLPIGTSAQKAELIALTKALEWSKDKSVNIYTDSRYAFATLHVHGMIYRERGWLTAGGKAIKNAPEILALLTAVWLPKRVAVMHCKGHQKDDAPTSTGNRRADEVAREVAIRPLSTQATISAGKRTADGSEFEKRTADGSEFESPKKKAKVE

SEQ ID NO: 6585 - protein, 2093 aa, synthetic construct
MPAAKRVKLDGGDKKYSIGLDIGTNSVGWAVITDEYKVPSKKFKVLGNTDRHSIKKNLIGALLFDSGETAEATRLKRTARRRYTRRKNRICYLQEIFSNEMAKVDDSFFHRLEESFLVEEDKKHERHPIFGNIVDEVAYHEKYPTIYHLRKKLVDSTDKADLRLIYLALAHMIKFRGHFLIEGDLNPDNSDVDKLFIQLVQTYNQLFEENPINASGVDAKAILSARLSKSRRLENLIAQLPGEKKNGLFGNLIALSLGLTPNFKSNFDLAEDAKLQLSKDTYDDDLDNLLAQIGDQYADLFLAAKNLSDAILLSDILRVNTEITKAPLSASMIKRYDEHHQDLTLLKALVRQQLPEKYKEIFFDQSKNGYAGYIDGGASQEEFYKFIKPILEKMDGTEELLVKLNREDLLRKQRTFDNGSIPHQIHLGELHAILRRQEDFYPFLKDNREKIEKILTFRIPYYVGPLARGNSRFAWMTRKSEETITPWNFEEVVDKGASAQSFIERMTNFDKNLPNEKVLPKHSLLYEYFTVYNELTKVKYVTEGMRKPAFLSGEQKKAIVDLLFKTNRKVTVKQLKEDYFKKIECFDSVEISGVEDRFNASLGTYHDLLKIIKDKDFLDNEENEDILEDIVLTLTLFEDREMIEERLKTYAHLFDDKVMKQLKRRRYTGWGRLSRKLINGIRDKQSGKTILDFLKSDGFANRNFMQLIHDDSLTFKEDIQKAQVSGQGDSLHEHIANLAGSPAIKKGILQTVKVVDELVKVMGRHKPENIVIEMARENQTTQKGQKNSRERMKRIEEGIKELGSQILKEHPVENTQLQNEKLYLYYLQNGRDMYVDQELDINRLSDYDVDHIVPQSFLKDDSIDNKVLTRSDKARGKSDNVPSEEVVKKMKNYWRQLLNAKLITQRKFDNLTKAERGGLSELDKAGFIKRQLVETRQITKHVAQILDSRMNTKYDENDKLIREVKVITLKSKLVSDFRKDFQFYKVREINNYHHAHDAYLNAVVGTALIKKYPKLESEFVYGDYKVYDVRKMIAKSEQEIGKATAKYFFYSNIMNFFKTEITLANGEIRKRPLIETNGETGEIVWDKGRDFATVRKVLSMPQVNIVKKTEVQTGGFSKESILPKRNSDKLIARKKDWDPKKYGGFDSPTVAYSVLVVAKVEKGKSKKLKSVKELLGITIMERSSFEKNPIDFLEAKGYKEVKKDLIIKLPKYSLFELENGRKRMLASAGELQKGNELALPSKYVNFLYLASHYEKLKGSPEDNEQKQLFVEQHKHYLDEIIEQISEFSKRVILADANLDKVLSAYNKHRDKPIREQAENIIHLFTLTNLGAPAAFKYFDTTIDRKRYTSTKEVLDATLIHQSITGLYETRIDLSQLGGDGGGGGGGSGGTAPLEEEYRLFLEAPIQNVTLLEQWKREIPKVWAEINPPGLASTQAPIHVQLLSTALPVRVRQYPITLEAKRSLRETIRKFRAAGILRPVHSPWNTPLLPVRKSGTSEYRMVQDLREVNKRVETIHPTVPNPYTLLSLLPPDRIWYSVLDLKDAFFCIPLAPESQLIFAFEWADAEEGESGQLTWTRLPQGFKNSPTLFNEALNRDLQGFRLDHPSVSLLQYVDDLLIAADTQAACLSATRDLLMTLAELGYRVSGKKAQLCQEEVTYLGFKIHKGSRSLSNSRTQAILQIPVPKTKRQVREFLGKIGYCRLFIPGFAELAQPLYAATRPGNDPLVWGEKEEEAFQSLKLALTQPPALALPSLDKPFQLFVEETSGAAKGVLTQALGPWKRPVAYLSKRLDPVAAGWPRCLRAIAAAALLTREASKLTFGQDIEITSSHNLESLLRSPPDKWLTNARITQYQVLLLDPPRVRFKQTAALNPATLLPETDDTLPIHHCLDTLDSLTSTRPDLTDQPLAQAEATLFTDGSSYIRDGKRYAGAAVVTLDSVIWAEPLPIGTSAQKAELIALTKALEWSKDKSVNIYTDSRYAFATLHVHGMIYRERGWLTAGGKAIKNAPEILALLTAVWLPKRVAVMHCKGHQKDDAPTSTGNRRADEVAREVAIRPLSTQATISAGKRTADGSEFEKRTADGSEFESPKKKAKVE

SEQ ID NO: 6586 - protein, 2097 aa, synthetic construct
MPAAKRVKLDGGDKKYSIGLDIGTNSVGWAVITDEYKVPSKKFKVLGNTDRHSIKKNLIGALLFDSGETAEATRLKRTARRRYTRRKNRICYLQEIFSNEMAKVDDSFFHRLEESFLVEEDKKHERHPIFGNIVDEVAYHEKYPTIYHLRKKLVDSTDKADLRLIYLALAHMIKFRGHFLIEGDLNPDNSDVDKLFIQLVQTYNQLFEENPINASGVDAKAILSARLSKSRRLENLIAQLPGEKKNGLFGNLIALSLGLTPNFKSNFDLAEDAKLQLSKDTYDDDLDNLLAQIGDQYADLFLAAKNLSDAILLSDILRVNTEITKAPLSASMIKRYDEHHQDLTLLKALVRQQLPEKYKEIFFDQSKNGYAGYIDGGASQEEFYKFIKPILEKMDGTEELLVKLNREDLLRKQRTFDNGSIPHQIHLGELHAILRRQEDFYPFLKDNREKIEKILTFRIPYYVGPLARGNSRFAWMTRKSEETITPWNFEEVVDKGASAQSFIERMTNFDKNLPNEKVLPKHSLLYEYFTVYNELTKVKYVTEGMRKPAFLSGEQKKAIVDLLFKTNRKVTVKQLKEDYFKKIECFDSVEISGVEDRFNASLGTYHDLLKIIKDKDFLDNEENEDILEDIVLTLTLFEDREMIEERLKTYAHLFDDKVMKQLKRRRYTGWGRLSRKLINGIRDKQSGKTILDFLKSDGFANRNFMQLIHDDSLTFKEDIQKAQVSGQGDSLHEHIANLAGSPAIKKGILQTVKVVDELVKVMGRHKPENIVIEMARENQTTQKGQKNSRERMKRIEEGIKELGSQILKEHPVENTQLQNEKLYLYYLQNGRDMYVDQELDINRLSDYDVDHIVPQSFLKDDSIDNKVLTRSDKARGKSDNVPSEEVVKKMKNYWRQLLNAKLITQRKFDNLTKAERGGLSELDKAGFIKRQLVETRQITKHVAQILDSRMNTKYDENDKLIREVKVITLKSKLVSDFRKDFQFYKVREINNYHHAHDAYLNAVVGTALIKKYPKLESEFVYGDYKVYDVRKMIAKSEQEIGKATAKYFFYSNIMNFFKTEITLANGEIRKRPLIETNGETGEIVWDKGRDFATVRKVLSMPQVNIVKKTEVQTGGFSKESILPKRNSDKLIARKKDWDPKKYGGFDSPTVAYSVLVVAKVEKGKSKKLKSVKELLGITIMERSSFEKNPIDFLEAKGYKEVKKDLIIKLPKYSLFELENGRKRMLASAGELQKGNELALPSKYVNFLYLASHYEKLKGSPEDNEQKQLFVEQHKHYLDEIIEQISEFSKRVILADANLDKVLSAYNKHRDKPIREQAENIIHLFTLTNLGAPAAFKYFDTTIDRKRYTSTKEVLDATLIHQSITGLYETRIDLSQLGGDGGGGGGGSGGTVSLQDEHRLFDIPVTTSLPDVWLQDFPQAWAETGGLGRAKCQAPIIIDLKPTAVPVSIKQYPMSLEAHMGIRQHIIKFLELGVLRPCRSPWNTPLLPVKKPGTQDYRPVQDLREINKRTVDIHPTVPNPYNLLSTLKPDYSWYTVLDLKDAFFCLPLAPQSQELFAFEWKDPERGISGQLTWTRLPQGFKNSPTLFNEALHRDLTDFRTQHPEVTLLQYVDDLLLAAPTKKACTQGTRHLLQELGEKGYRASAKKAQICQTKVTYLGYILSEGKRWLTPGRIETVARIPPPRNPREVREFLGTAGFCRLWIPGFAELAAPLYALTKPSTPFTWQTEHQLAFEALKKALLSAPALGLPDTSKPFTLFLDERQGIAKGVLTQKLGPWKRPVAYLSKKLDPVAAGWPPCLRIMAATAMLVKDSAKLTLGQPLTVITPHTLEAIVRQPPDRWITNARLTHYQALLLDTDRVQFGPPVTLNPATLLPVPENQPSPHDCRQVLAETHGTREDLKDQELPDADHTWYTDGSSYLDSGTRRAGAAVVDGHNTIWAQSLPPGTSAQKAELIALTKALELSKGKKANIYTDSRYAFATAHTHGSIYERRGWLTSEGKEIKNKAEIIALLKALFLPQEVAIIHCPGHQKGQDPVAVGNRQADRVARQAAMAEVLTLATEPDNTSHITAGKRTADGSEFEKRTADGSEFESPKKKAKVE

SEQ ID NO: 6587 - protein, 2090 aa, synthetic construct
MPAAKRVKLDGGDKKYSIGLDIGTNSVGWAVITDEYKVPSKKFKVLGNTDRHSIKKNLIGALLFDSGETAEATRLKRTARRRYTRRKNRICYLQEIFSNEMAKVDDSFFHRLEESFLVEEDKKHERHPIFGNIVDEVAYHEKYPTIYHLRKKLVDSTDKADLRLIYLALAHMIKFRGHFLIEGDLNPDNSDVDKLFIQLVQTYNQLFEENPINASGVDAKAILSARLSKSRRLENLIAQLPGEKKNGLFGNLIALSLGLTPNFKSNFDLAEDAKLQLSKDTYDDDLDNLLAQIGDQYADLFLAAKNLSDAILLSDILRVNTEITKAPLSASMIKRYDEHHQDLTLLKALVRQQLPEKYKEIFFDQSKNGYAGYIDGGASQEEFYKFIKPILEKMDGTEELLVKLNREDLLRKQRTFDNGSIPHQIHLGELHAILRRQEDFYPFLKDNREKIEKILTFRIPYYVGPLARGNSRFAWMTRKSEETITPWNFEEVVDKGASAQSFIERMTNFDKNLPNEKVLPKHSLLYEYFTVYNELTKVKYVTEGMRKPAFLSGEQKKAIVDLLFKTNRKVTVKQLKEDYFKKIECFDSVEISGVEDRFNASLGTYHDLLKIIKDKDFLDNEENEDILEDIVLTLTLFEDREMIEERLKTYAHLFDDKVMKQLKRRRYTGWGRLSRKLINGIRDKQSGKTILDFLKSDGFANRNFMQLIHDDSLTFKEDIQKAQVSGQGDSLHEHIANLAGSPAIKKGILQTVKVVDELVKVMGRHKPENIVIEMARENQTTQKGQKNSRERMKRIEEGIKELGSQILKEHPVENTQLQNEKLYLYYLQNGRDMYVDQELDINRLSDYDVDHIVPQSFLKDDSIDNKVLTRSDKARGKSDNVPSEEVVKKMKNYWRQLLNAKLITQRKFDNLTKAERGGLSELDKAGFIKRQLVETRQITKHVAQILDSRMNTKYDENDKLIREVKVITLKSKLVSDFRKDFQFYKVREINNYHHAHDAYLNAVVGTALIKKYPKLESEFVYGDYKVYDVRKMIAKSEQEIGKATAKYFFYSNIMNFFKTEITLANGEIRKRPLIETNGETGEIVWDKGRDFATVRKVLSMPQVNIVKKTEVQTGGFSKESILPKRNSDKLIARKKDWDPKKYGGFDSPTVAYSVLVVAKVEKGKSKKLKSVKELLGITIMERSSFEKNPIDFLEAKGYKEVKKDLIIKLPKYSLFELENGRKRMLASAGELQKGNELALPSKYVNFLYLASHYEKLKGSPEDNEQKQLFVEQHKHYLDEIIEQISEFSKRVILADANLDKVLSAYNKHRDKPIREQAENIIHLFTLTNLGAPAAFKYFDTTIDRKRYTSTKEVLDATLIHQSITGLYETRIDLSQLGGDGGGGGGGSGGTLQLEEEYRLFEPESTQKQEMDIWLKNFPQAWAETGGMGTAHCQAPVLIQLKATATPISIRQYPMPHEAYQGIKPHIRRMLDQGILKPCQSPWNTPLLPVKKPGTEDYRPVQDLREVNKRVEDIHPTVPNPYNLLSTLPPSHPWYTVLDLKDAFFCLRLHSESQLLFAFEWRDPEIGLSGQLTWTRLPQGFKNSPTLFNEALHSDLADFRVRYPALVLLQYVDDLLLAAATRTECLEGTKALLETLGNKGYRASAKKAQICLQEVTYLGYSLKDGQRWLTKARKEAILSIPVPKNSRQVREFLGTAGYCRLWIPGFAELAAPLYPLTRPGTLFQWGTEQQLAFEDIKKALLSSPALGLPDITKPFELFIDENSGFAKGVLVQKLGPWKRPVAYLSKKLDTVASGWPPCLRMVAAIAILVKDAGKLTLGQPLTILTSHPVEALVRQPPNKWLSNARMTHYQAMLLDAERVHFGPTVSLNPATLLPLPSGGNHHDCLQILAETHGTRPDLTDQPLPDADLTWYTDGSSFIRNGEREAGAAVTTESEVIWAAPLPPGTSAQRAELIALTQALKMAEGKKLTVYTDSRYAFATTHVHGEIYRRRGWLTSEGKEIKNKNEILALLEALFLPKRLSIIHCPGHQKGDSPQAKGNRLADDTAKKAATETHSSLTVLPAGKRTADGSEFEKRTADGSEFESPKKKAKVE

SEQ ID NO: 6588 - protein, 2213 aa, synthetic construct
MPAAKRVKLDGGDKKYSIGLDIGTNSVGWAVITDEYKVPSKKFKVLGNTDRHSIKKNLIGALLFDSGETAEATRLKRTARRRYTRRKNRICYLQEIFSNEMAKVDDSFFHRLEESFLVEEDKKHERHPIFGNIVDEVAYHEKYPTIYHLRKKLVDSTDKADLRLIYLALAHMIKFRGHFLIEGDLNPDNSDVDKLFIQLVQTYNQLFEENPINASGVDAKAILSARLSKSRRLENLIAQLPGEKKNGLFGNLIALSLGLTPNFKSNFDLAEDAKLQLSKDTYDDDLDNLLAQIGDQYADLFLAAKNLSDAILLSDILRVNTEITKAPLSASMIKRYDEHHQDLTLLKALVRQQLPEKYKEIFFDQSKNGYAGYIDGGASQEEFYKFIKPILEKMDGTEELLVKLNREDLLRKQRTFDNGSIPHQIHLGELHAILRRQEDFYPFLKDNREKIEKILTFRIPYYVGPLARGNSRFAWMTRKSEETITPWNFEEVVDKGASAQSFIERMTNFDKNLPNEKVLPKHSLLYEYFTVYNELTKVKYVTEGMRKPAFLSGEQKKAIVDLLFKTNRKVTVKQLKEDYFKKIECFDSVEISGVEDRFNASLGTYHDLLKIIKDKDFLDNEENEDILEDIVLTLTLFEDREMIEERLKTYAHLFDDKVMKQLKRRRYTGWGRLSRKLINGIRDKQSGKTILDFLKSDGFANRNFMQLIHDDSLTFKEDIQKAQVSGQGDSLHEHIANLAGSPAIKKGILQTVKVVDELVKVMGRHKPENIVIEMARENQTTQKGQKNSRERMKRIEEGIKELGSQILKEHPVENTQLQNEKLYLYYLQNGRDMYVDQELDINRLSDYDVDHIVPQSFLKDDSIDNKVLTRSDKARGKSDNVPSEEVVKKMKNYWRQLLNAKLITQRKFDNLTKAERGGLSELDKAGFIKRQLVETRQITKHVAQILDSRMNTKYDENDKLIREVKVITLKSKLVSDFRKDFQFYKVREINNYHHAHDAYLNAVVGTALIKKYPKLESEFVYGDYKVYDVRKMIAKSEQEIGKATAKYFFYSNIMNFFKTEITLANGEIRKRPLIETNGETGEIVWDKGRDFATVRKVLSMPQVNIVKKTEVQTGGFSKESILPKRNSDKLIARKKDWDPKKYGGFDSPTVAYSVLVVAKVEKGKSKKLKSVKELLGITIMERSSFEKNPIDFLEAKGYKEVKKDLIIKLPKYSLFELENGRKRMLASAGELQKGNELALPSKYVNFLYLASHYEKLKGSPEDNEQKQLFVEQHKHYLDEIIEQISEFSKRVILADANLDKVLSAYNKHRDKPIREQAENIIHLFTLTNLGAPAAFKYFDTTIDRKRYTSTKEVLDATLIHQSITGLYETRIDLSQLGGDGGGGGGGSGGTLGDQGSRGSDPLPEPRVTLTVEGIPTEFLVNTGAEHSVLTKPMGKMGSKRTVVAGATGSKVYPWTTKRLLKIGQKQVTHSFLVIPECPAPLLGRDLLTKLKAQIQFSTEGPQVTWEDRPAMCLVLNLEEEYRLHEKPVPPSIDPSWLQLFPMVWAEKAGMGLANQVPPVVVELKSDASPVAVRQYPMSKEAREGIRPHIQRFLDLGILVPCQSPWNTPLLPVKKPGTNDYRPVQDLREVNKRVQDIHPTVPNPYNLLSSLPPSHTWYSVLDLKDAFFCLKLHPNSQPLFAFEWRDPEKGNTGQLTWTRLPQGFKNSPTLFNEALHRDLASFRALNPQVVMLQYVDDLLVAAPTYRDCKEGTRRLLQELSKLGYRVSAKKAQLCREEVTYLGYLLKGGKRWLTPARKATVMKIPTPTTPRQVREFLGKAGFCRLFIPGFASLAAPLYPLTRPKVPFTWTEAHQEAFGRIKEALLSAPALALPDLTKPFALYVDEKEGVARGVLTQTLGPWRRPVAYLSKKLDPVASGWPTCLKAIAAVALLLKDADKLTLGQNVLVIAPHNLESIVRQPPDRWMTNARMTHYQSLLLNERVSFAPPAILNPATLLPVESDDTPIHICSEILAEETGTRPDLRDQPLPGVPAWYTDGSSFIMDGRRQAGAAIVDNKRTVWASNLPEGTSAQKAELIALTQALRLAEGKSINIYTDSRYAFATAHVHGAIYKQRGWLTSAGKDIKNKEEILALLEAIHLPKRVAIIHCPGHQRGTDPVATGNRKADEAAKQAAQSTRILTETTKNAGKRTADGSEFEKRTADGSEFESPKKKAKVE

SEQ ID NO: 6589 - protein, 2091 aa, synthetic construct; identical to SEQ ID NO: 4511

SEQ ID NO: 6590 - protein, 2091 aa, synthetic construct
MPAAKRVKLDGGDKKYSIGLDIGTNSVGWAVITDEYKVPSKKFKVLGNTDRHSIKKNLIGALLFDSGETAEATRLKRTARRRYTRRKNRICYLQEIFSNEMAKVDDSFFHRLEESFLVEEDKKHERHPIFGNIVDEVAYHEKYPTIYHLRKKLVDSTDKADLRLIYLALAHMIKFRGHFLIEGDLNPDNSDVDKLFIQLVQTYNQLFEENPINASGVDAKAILSARLSKSRRLENLIAQLPGEKKNGLFGNLIALSLGLTPNFKSNFDLAEDAKLQLSKDTYDDDLDNLLAQIGDQYADLFLAAKNLSDAILLSDILRVNTEITKAPLSASMIKRYDEHHQDLTLLKALVRQQLPEKYKEIFFDQSKNGYAGYIDGGASQEEFYKFIKPILEKMDGTEELLVKLNREDLLRKQRTFDNGSIPHQIHLGELHAILRRQEDFYPFLKDNREKIEKILTFRIPYYVGPLARGNSRFAWMTRKSEETITPWNFEEVVDKGASAQSFIERMTNFDKNLPNEKVLPKHSLLYEYFTVYNELTKVKYVTEGMRKPAFLSGEQKKAIVDLLFKTNRKVTVKQLKEDYFKKIECFDSVEISGVEDRFNASLGTYHDLLKIIKDKDFLDNEENEDILEDIVLTLTLFEDREMIEERLKTYAHLFDDKVMKQLKRRRYTGWGRLSRKLINGIRDKQSGKTILDFLKSDGFANRNFMQLIHDDSLTFKEDIQKAQVSGQGDSLHEHIANLAGSPAIKKGILQTVKVVDELVKVMGRHKPENIVIEMARENQTTQKGQKNSRERMKRIEEGIKELGSQILKEHPVENTQLQNEKLYLYYLQNGRDMYVDQELDINRLSDYDVDHIVPQSFLKDDSIDNKVLTRSDKARGKSDNVPSEEVVKKMKNYWRQLLNAKLITQRKFDNLTKAERGGLSELDKAGFIKRQLVETRQITKHVAQILDSRMNTKYDENDKLIREVKVITLKSKLVSDFRKDFQFYKVREINNYHHAHDAYLNAVVGTALIKKYPKLESEFVYGDYKVYDVRKMIAKSEQEIGKATAKYFFYSNIMNFFKTEITLANGEIRKRPLIETNGETGEIVWDKGRDFATVRKVLSMPQVNIVKKTEVQTGGFSKESILPKRNSDKLIARKKDWDPKKYGGFDSPTVAYSVLVVAKVEKGKSKKLKSVKELLGITIMERSSFEKNPIDFLEAKGYKEVKKDLIIKLPKYSLFELENGRKRMLASAGELQKGNELALPSKYVNFLYLASHYEKLKGSPEDNEQKQLFVEQHKHYLDEIIEQISEFSKRVILADANLDKVLSAYNKHRDKPIREQAENIIHLFTLTNLGAPAAFKYFDTTIDRKRYTSTKEVLDATLIHQSITGLYETRIDLSQLGGDGGGGGGGSGGTLGIEDEYRLHETSTEPDVSLGSTWLSDFPQAWAETGGMGLAVRQAPLIIPLKATSTPVSIQQYPMSHEARLGIKPHIQRLLDQGILVPCQSPWNTPLLPVKKPGTNDYRPVQDLREVNKRVEDIHPTVPNPYNLLSGLPPSHQWYTVLDLKDAFFCLRLHPTSQPLFAFEWRDPGMGISGQLTWTRLPQGFKNSPTLFNEALHRDLADFRIQHPDLILLQYVDDILLAATSELDCQQGTRALLQTLGDLGYRASAKKAQICQKQVKYLGYLLREGQRWLTEARKETVMGQPVPKTPRQLREFLGTAGFCRLWIPGFAEMAAPLYPLTKPGTLFSWGPDQQKAYQEIKQALLTAPALGLPDLTKPFELFVDEKQGYAKGVLTQKLGPWRRPVAYLSKKLDPVAAGWPPCLRMVAAIAVLTKDAGKLTMGQPLVILAPHAVEALVKQPPDRWLSNARMTHYQAMLLDTDRVQFGPVVALNPATLLPLPEEGAPHDCLEILAETHGTRPDLTDQPIPDADHTWYTDGSSFLQEGQRKAGAAVTTETEVIWAGALPAGTSAQRAELIALTQALKMAEGKRLNVYTDSRYAFATAHIHGEIYRRRGWLTSEGREIKNKSEILALLKALFLPKRLSIIHCLGHQKGDSAEARGNRLADQAAREAAIKTPPDTSTLLAGKRTADGSEFEKRTADGSEFESPKKKAKVE

SEQ ID NO: 6591 - protein, 2091 aa, synthetic construct; identical to SEQ ID NO: 4511

SEQ ID NO: 6592 - protein, 2091 aa, synthetic construct
MPAAKRVKLDGGDKKYSIGLDIGTNSVGWAVITDEYKVPSKKFKVLGNTDRHSIKKNLIGALLFDSGETAEATRLKRTARRRYTRRKNRICYLQEIFSNEMAKVDDSFFHRLEESFLVEEDKKHERHPIFGNIVDEVAYHEKYPTIYHLRKKLVDSTDKADLRLIYLALAHMIKFRGHFLIEGDLNPDNSDVDKLFIQLVQTYNQLFEENPINASGVDAKAILSARLSKSRRLENLIAQLPGEKKNGLFGNLIALSLGLTPNFKSNFDLAEDAKLQLSKDTYDDDLDNLLAQIGDQYADLFLAAKNLSDAILLSDILRVNTEITKAPLSASMIKRYDEHHQDLTLLKALVRQQLPEKYKEIFFDQSKNGYAGYIDGGASQEEFYKFIKPILEKMDGTEELLVKLNREDLLRKQRTFDNGSIPHQIHLGELHAILRRQEDFYPFLKDNREKIEKILTFRIPYYVGPLARGNSRFAWMTRKSEETITPWNFEEVVDKGASAQSFIERMTNFDKNLPNEKVLPKHSLLYEYFTVYNELTKVKYVTEGMRKPAFLSGEQKKAIVDLLFKTNRKVTVKQLKEDYFKKIECFDSVEISGVEDRFNASLGTYHDLLKIIKDKDFLDNEENEDILEDIVLTLTLFEDREMIEERLKTYAHLFDDKVMKQLKRRRYTGWGRLSRKLINGIRDKQSGKTILDFLKSDGFANRNFMQLIHDDSLTFKEDIQKAQVSGQGDSLHEHIANLAGSPAIKKGILQTVKVVDELVKVMGRHKPENIVIEMARENQTTQKGQKNSRERMKRIEEGIKELGSQILKEHPVENTQLQNEKLYLYYLQNGRDMYVDQELDINRLSDYDVDHIVPQSFLKDDSIDNKVLTRSDKARGKSDNVPSEEVVKKMKNYWRQLLNAKLITQRKFDNLTKAERGGLSELDKAGFIKRQLVETRQITKHVAQILDSRMNTKYDENDKLIREVKVITLKSKLVSDFRKDFQFYKVREINNYHHAHDAYLNAVVGTALIKKYPKLESEFVYGDYKVYDVRKMIAKSEQEIGKATAKYFFYSNIMNFFKTEITLANGEIRKRPLIETNGETGEIVWDKGRDFATVRKVLSMPQVNIVKKTEVQTGGFSKESILPKRNSDKLIARKKDWDPKKYGGFDSPTVAYSVLVVAKVEKGKSKKLKSVKELLGITIMERSSFEKNPIDFLEAKGYKEVKKDLIIKLPKYSLFELENGRKRMLASAGELQKGNELALPSKYVNFLYLASHYEKLKGSPEDNEQKQLFVEQHKHYLDEIIEQISEFSKRVILADANLDKVLSAYNKHRDKPIREQAENIIHLFTLTNLGAPAAFKYFDTTIDRKRYTSTKEVLDATLIHQSITGLYETRIDLSQLGGDGGGGGGGSGGTLNIEDEYRLHETSKGPDVPLGSTWLSDFPQAWAETGGMGLAFRQAPLIISLKATSTPVSIKQYPMSQEARLGIKPHIQRLLDQGILVPCQSPWNTPLLPVKKPGTNDYRPVQDLREVNKRVEDIHPTVPNPYNLLSGLPPSHQWYTVLDLKDAFFCLRLHPTSQSLFAFEWKDPEMGISGQLTWTRLPQGFKNSPTLFDEALHRDLADFRIQHPDLILLQYVDDLLLAATSELDCQQGTRALLQTLGDLGYRASAKKAQICQKQVKYLGYLLKEGQRWLTEARKETVMGQPTPKTPRQLREFLGTAGLCRLWIPGFAEMAAPLYPLTKTGTLFKWGPDQQKAYQEIKQALLTAPALGLPDLTKPFELFVDEKQGYAKGVLTQKLGPWRRPVAYLSKKLDPVAAGWPPCLRMVAAIAVLTKDVGKLTMGQPLVILAPHAVEALVKQPPDRWLSNARMTHYQALLLDTDRVQFGPIVALNPATLLPLPEEGLQHDCLDILAEAHGTRPDLTDQPLPDADHTWYTDGSSFLQEGQRRAGAAVTTETEVIWAKALPAGTSAQRAELIALTQALKMAAGKKLNVYTDSRYAFATAHIHGEIYRRRGLLTSEGKEIKNKDEILALLKALFLPKRLSIIHCPGHQKGNHAEARGNRMADQAAREVATRETPETSTLLAGKRTADGSEFEKRTADGSEFESPKKKAKVE

SEQ ID NO: 6593 - protein, 2091 aa, synthetic construct
MPAAKRVKLDGGDKKYSIGLDIGTNSVGWAVITDEYKVPSKKFKVLGNTDRHSIKKNLIGALLFDSGETAEATRLKRTARRRYTRRKNRICYLQEIFSNEMAKVDDSFFHRLEESFLVEEDKKHERHPIFGNIVDEVAYHEKYPTIYHLRKKLVDSTDKADLRLIYLALAHMIKFRGHFLIEGDLNPDNSDVDKLFIQLVQTYNQLFEENPINASGVDAKAILSARLSKSRRLENLIAQLPGEKKNGLFGNLIALSLGLTPNFKSNFDLAEDAKLQLSKDTYDDDLDNLLAQIGDQYADLFLAAKNLSDAILLSDILRVNTEITKAPLSASMIKRYDEHHQDLTLLKALVRQQLPEKYKEIFFDQSKNGYAGYIDGGASQEEFYKFIKPILEKMDGTEELLVKLNREDLLRKQRTFDNGSIPHQIHLGELHAILRRQEDFYPFLKDNREKIEKILTFRIPYYVGPLARGNSRFAWMTRKSEETITPWNFEEVVDKGASAQSFIERMTNFDKNLPNEKVLPKHSLLYEYFTVYNELTKVKYVTEGMRKPAFLSGEQKKAIVDLLFKTNRKVTVKQLKEDYFKKIECFDSVEISGVEDRFNASLGTYHDLLKIIKDKDFLDNEENEDILEDIVLTLTLFEDREMIEERLKTYAHLFDDKVMKQLKRRRYTGWGRLSRKLINGIRDKQSGKTILDFLKSDGFANRNFMQLIHDDSLTFKEDIQKAQVSGQGDSLHEHIANLAGSPAIKKGILQTVKVVDELVKVMGRHKPENIVIEMARENQTTQKGQKNSRERMKRIEEGIKELGSQILKEHPVENTQLQNEKLYLYYLQNGRDMYVDQELDINRLSDYDVDHIVPQSFLKDDSIDNKVLTRSDKARGKSDNVPSEEVVKKMKNYWRQLLNAKLITQRKFDNLTKAERGGLSELDKAGFIKRQLVETRQITKHVAQILDSRMNTKYDENDKLIREVKVITLKSKLVSDFRKDFQFYKVREINNYHHAHDAYLNAVVGTALIKKYPKLESEFVYGDYKVYDVRKMIAKSEQEIGKATAKYFFYSNIMNFFKTEITLANGEIRKRPLIETNGETGEIVWDKGRDFATVRKVLSMPQVNIVKKTEVQTGGFSKESILPKRNSDKLIARKKDWDPKKYGGFDSPTVAYSVLVVAKVEKGKSKKLKSVKELLGITIMERSSFEKNPIDFLEAKGYKEVKKDLIIKLPKYSLFELENGRKRMLASAGELQKGNELALPSKYVNFLYLASHYEKLKGSPEDNEQKQLFVEQHKHYLDEIIEQISEFSKRVILADANLDKVLSAYNKHRDKPIREQAENIIHLFTLTNLGAPAAFKYFDTTIDRKRYTSTKEVLDATLIHQSITGLYETRIDLSQLGGDGGGGGGGSGGTLNIEDEYRLHETSKGPDVPLGSTWLSDFPQAWAETGGMGLAVRQAPLIIPLKATSTPVSIKQYPMSQEARLGIKPHIQRLLDQGILVPCQSPWNTPLLPVKKPGTNDYRPVQDLREVNKRVEDIHPTVPNPYNLLSGLPPSHQWYTVLDLKDAFFCLRLHPTSQSLFAFEWRDPEMGISGQLTWTRLPQGFKNSPTLFNEALHRDLADFRIQHPDLILLQYVDDLLLAATSELDCQQGTRALLQTLGDLGYRASAKKAQICQKQVKYLGYLLKEGQRWLTEARKETVMGQPTPKTPRQLREFLGTAGFCRLWIPGFAEMAAPLYPLTKPGTLFEWGPDQQKAYQEIKQALLTAPALGLPDLTKPFELFVDEKQGYAKGVLTQKLGPWRRPVAYLSKKLDPVAAGWPPCLRMVAAIAVLTKDAGKLTMGQPLVILAPHAVEALVKQPPDRWLSNARMTHYQALLLDTDRVQFGPIVALNPATLLPLPEEGLQHDCLDILAEAHGTRPDLTDQPLPDADHTWYTDGSSFLQEGQRKAGAAVTTETEVVWAKALPAGTSAQRAELIALTQALKMAEGKKLNVYTDSRYAFATAHIHGEIYRRRGWLTSEGKEIKNKDEILALLKALFLPKRLSIIHCPGHQKGNRAEARGNRMADQAAREVATRETPETSTLLAGKRTADGSEFEKRTADGSEFESPKKKAKVE

SEQ ID NO: 6594 - protein, 2091 aa, synthetic construct
MPAAKRVKLDGGDKKYSIGLDIGTNSVGWAVITDEYKVPSKKFKVLGNTDRHSIKKNLIGALLFDSGETAEATRLKRTARRRYTRRKNRICYLQEIFSNEMAKVDDSFFHRLEESFLVEEDKKHERHPIFGNIVDEVAYHEKYPTIYHLRKKLVDSTDKADLRLIYLALAHMIKFRGHFLIEGDLNPDNSDVDKLFIQLVQTYNQLFEENPINASGVDAKAILSARLSKSRRLENLIAQLPGEKKNGLFGNLIALSLGLTPNFKSNFDLAEDAKLQLSKDTYDDDLDNLLAQIGDQYADLFLAAKNLSDAILLSDILRVNTEITKAPLSASMIKRYDEHHQDLTLLKALVRQQLPEKYKEIFFDQSKNGYAGYIDGGASQEEFYKFIKPILEKMDGTEELLVKLNREDLLRKQRTFDNGSIPHQIHLGELHAILRRQEDFYPFLKDNREKIEKILTFRIPYYVGPLARGNSRFAWMTRKSEETITPWNFEEVVDKGASAQSFIERMTNFDKNLPNEKVLPKHSLLYEYFTVYNELTKVKYVTEGMRKPAFLSGEQKKAIVDLLFKTNRKVTVKQLKEDYFKKIECFDSVEISGVEDRFNASLGTYHDLLKIIKDKDFLDNEENEDILEDIVLTLTLFEDREMIEERLKTYAHLFDDKVMKQLKRRRYTGWGRLSRKLINGIRDKQSGKTILDFLKSDGFANRNFMQLIHDDSLTFKEDIQKAQVSGQGDSLHEHIANLAGSPAIKKGILQTVKVVDELVKVMGRHKPENIVIEMARENQTTQKGQKNSRERMKRIEEGIKELGSQILKEHPVENTQLQNEKLYLYYLQNGRDMYVDQELDINRLSDYDVDHIVPQSFLKDDSIDNKVLTRSDKARGKSDNVPSEEVVKKMKNYWRQLLNAKLITQRKFDNLTKAERGGLSELDKAGFIKRQLVETRQITKHVAQILDSRMNTKYDENDKLIREVKVITLKSKLVSDFRKDFQFYKVREINNYHHAHDAYLNAVVGTALIKKYPKLESEFVYGDYKVYDVRKMIAKSEQEIGKATAKYFFYSNIMNFFKTEITLANGEIRKRPLIETNGETGEIVWDKGRDFATVRKVLSMPQVNIVKKTEVQTGGFSKESILPKRNSDKLIARKKDWDPKKYGGFDSPTVAYSVLVVAKVEKGKSKKLKSVKELLGITIMERSSFEKNPIDFLEAKGYKEVKKDLIIKLPKYSLFELENGRKRMLASAGELQKGNELALPSKYVNFLYLASHYEKLKGSPEDNEQKQLFVEQHKHYLDEIIEQISEFSKRVILADANLDKVLSAYNKHRDKPIREQAENIIHLFTLTNLGAPAAFKYFDTTIDRKRYTSTKEVLDATLIHQSITGLYETRIDLSQLGGDGGGGGGGSGGTLNIEDEYRLHETSKGPDVPLGSTWLSDFPQAWAETGGMGLAVRQAPLIIPLKATSTPVSIKQYPMSQEARLGIKPHIQRLLDQGILVPCQSPWNTPLLPVKKPGTNDYRPVQDLREVNKRVEDIHPTVPNPYNLLSGLPPSHQWYTVLDLKDAFFCLRLHPTSQSLFAFEWRDPEMGISGQLTWTRLPQGFKNSPTLFNEALHRDLADFRIQHPDLILLQYVDDLLLAATSELDCQQGTRALLQTLGDLGYRASAKKAQICQKQVKYLGYLLKEGQRWLTEARKETVMGQPTPKTPRQLREFLGKAGFCRLFIPGFAEMAAPLYPLTKPGTLFEWGPDQQKAYQEIKQALLTAPALGLPDLTKPFELFVDEKQGYAKGVLTQKLGPWRRPVAYLSKKLDPVAAGWPPCLRMVAAIAVLTKDAGKLTMGQPLVILAPHAVEALVKQPPDRWLSNARMTHYQALLLDTDRVQFGPIVALNPATLLPLPEEGLQHDCLDILAEAHGTRPDLTDQPLPDADHTWYTDGSSFLQEGQRKAGAAVTTETEVVWAKALPAGTSAQRAELIALTQALKMAEGKKLNVYTDSRYAFATAHIHGEIYRRRGWLTSEGKEIKNKDEILALLKALFLPKRLSIIHCPGHQKGNRAEARGNRMADQAAREVATRETPETSTLLAGKRTADGSEFEKRTADGSEFESPKKKAKVE

SEQ ID NO: 6595 - protein, 2111 aa, synthetic construct
MPAAKRVKLDGGDKKYSIGLDIGTNSVGWAVITDEYKVPSKKFKVLGNTDRHSIKKNLIGALLFDSGETAEATRLKRTARRRYTRRKNRICYLQEIFSNEMAKVDDSFFHRLEESFLVEEDKKHERHPIFGNIVDEVAYHEKYPTIYHLRKKLVDSTDKADLRLIYLALAHMIKFRGHFLIEGDLNPDNSDVDKLFIQLVQTYNQLFEENPINASGVDAKAILSARLSKSRRLENLIAQLPGEKKNGLFGNLIALSLGLTPNFKSNFDLAEDAKLQLSKDTYDDDLDNLLAQIGDQYADLFLAAKNLSDAILLSDILRVNTEITKAPLSASMIKRYDEHHQDLTLLKALVRQQLPEKYKEIFFDQSKNGYAGYIDGGASQEEFYKFIKPILEKMDGTEELLVKLNREDLLRKQRTFDNGSIPHQIHLGELHAILRRQEDFYPFLKDNREKIEKILTFRIPYYVGPLARGNSRFAWMTRKSEETITPWNFEEVVDKGASAQSFIERMTNFDKNLPNEKVLPKHSLLYEYFTVYNELTKVKYVTEGMRKPAFLSGEQKKAIVDLLFKTNRKVTVKQLKEDYFKKIECFDSVEISGVEDRFNASLGTYHDLLKIIKDKDFLDNEENEDILEDIVLTLTLFEDREMIEERLKTYAHLFDDKVMKQLKRRRYTGWGRLSRKLINGIRDKQSGKTILDFLKSDGFANRNFMQLIHDDSLTFKEDIQKAQVSGQGDSLHEHIANLAGSPAIKKGILQTVKVVDELVKVMGRHKPENIVIEMARENQTTQKGQKNSRERMKRIEEGIKELGSQILKEHPVENTQLQNEKLYLYYLQNGRDMYVDQELDINRLSDYDVDHIVPQSFLKDDSIDNKVLTRSDKARGKSDNVPSEEVVKKMKNYWRQLLNAKLITQRKFDNLTKAERGGLSELDKAGFIKRQLVETRQITKHVAQILDSRMNTKYDENDKLIREVKVITLKSKLVSDFRKDFQFYKVREINNYHHAHDAYLNAVVGTALIKKYPKLESEFVYGDYKVYDVRKMIAKSEQEIGKATAKYFFYSNIMNFFKTEITLANGEIRKRPLIETNGETGEIVWDKGRDFATVRKVLSMPQVNIVKKTEVQTGGFSKESILPKRNSDKLIARKKDWDPKKYGGFDSPTVAYSVLVVAKVEKGKSKKLKSVKELLGITIMERSSFEKNPIDFLEAKGYKEVKKDLIIKLPKYSLFELENGRKRMLASAGELQKGNELALPSKYVNFLYLASHYEKLKGSPEDNEQKQLFVEQHKHYLDEIIEQISEFSKRVILADANLDKVLSAYNKHRDKPIREQAENIIHLFTLTNLGAPAAFKYFDTTIDRKRYTSTKEVLDATLIHQSITGLYETRIDLSQLGGDGGGGGGGSGGTLNIEDEYRLHETSKEPDVSLGSTWLSDFPQAWAETGGMGLAVRQAPLIIPLKATSTPVSIKQYPMSQEARLGIKPHIQRLLDQGILVPCQSPWNTPLLPVKKPGTNDYRPVQDLREVNKRVEDIHPTVPNPYNLLSGLPPSHQWYTVLDLKDAFFCLRLHPTSQPLFAFEWRDPEMGISGQLTWTRLPQGFKNSPTLFNEALHRDLADFRIQHPDLILLQYVDDLLLAATSELDCQQGTRALLQTLGNLGYRASAKKAQICQKQVKYLGYLLKEGQRWLTEARKETVMGQPTPKTPRQLREFLGKAGFCRLFIPGFAEMAAPLYPLTKPGTLFNWGPDQQKAYQEIKQALLTAPALGLPDLTKPFELFVDEKQGYAKGVLTQKLGPWRRPVAYLSKKLDPVAAGWPPCLRMVAAIAVLTKDAGKLTMGQPLVILAPHAVEALVKQPPDRWLSNARMTHYQALLLDTDRVQFGPVVALNPATLLPLPEEGLQHNCLDILAEAHGTRPDLTDQPLPDADHTWYTDGSSLLQEGQRKAGAAVTTETEVIWAKALPAGTSAQRAELIALTQALKMAEGKKLNVYTDSRYAFATAHIHGEIYRRRGWLTSEGKEIKNKDEILALLKALFLPKRLSIIHCPGHQKGHSAEARGNRMADQAARKAAITETPDTSTLLIENSSPSGGSKRTADGSEFEAGKRTADGSEFEKRTADGSEFESPKKKAKVE

SEQ ID NO: 6596 - protein, 2111 aa, synthetic construct; identical to SEQ ID NO: 6595

SEQ ID NO: 6597 - protein, 2091 aa, synthetic construct
MPAAKRVKLDGGDKKYSIGLDIGTNSVGWAVITDEYKVPSKKFKVLGNTDRHSIKKNLIGALLFDSGETAEATRLKRTARRRYTRRKNRICYLQEIFSNEMAKVDDSFFHRLEESFLVEEDKKHERHPIFGNIVDEVAYHEKYPTIYHLRKKLVDSTDKADLRLIYLALAHMIKFRGHFLIEGDLNPDNSDVDKLFIQLVQTYNQLFEENPINASGVDAKAILSARLSKSRRLENLIAQLPGEKKNGLFGNLIALSLGLTPNFKSNFDLAEDAKLQLSKDTYDDDLDNLLAQIGDQYADLFLAAKNLSDAILLSDILRVNTEITKAPLSASMIKRYDEHHQDLTLLKALVRQQLPEKYKEIFFDQSKNGYAGYIDGGASQEEFYKFIKPILEKMDGTEELLVKLNREDLLRKQRTFDNGSIPHQIHLGELHAILRRQEDFYPFLKDNREKIEKILTFRIPYYVGPLARGNSRFAWMTRKSEETITPWNFEEVVDKGASAQSFIERMTNFDKNLPNEKVLPKHSLLYEYFTVYNELTKVKYVTEGMRKPAFLSGEQKKAIVDLLFKTNRKVTVKQLKEDYFKKIECFDSVEISGVEDRFNASLGTYHDLLKIIKDKDFLDNEENEDILEDIVLTLTLFEDREMIEERLKTYAHLFDDKVMKQLKRRRYTGWGRLSRKLINGIRDKQSGKTILDFLKSDGFANRNFMQLIHDDSLTFKEDIQKAQVSGQGDSLHEHIANLAGSPAIKKGILQTVKVVDELVKVMGRHKPENIVIEMARENQTTQKGQKNSRERMKRIEEGIKELGSQILKEHPVENTQLQNEKLYLYYLQNGRDMYVDQELDINRLSDYDVDHIVPQSFLKDDSIDNKVLTRSDKARGKSDNVPSEEVVKKMKNYWRQLLNAKLITQRKFDNLTKAERGGLSELDKAGFIKRQLVETRQITKHVAQILDSRMNTKYDENDKLIREVKVITLKSKLVSDFRKDFQFYKVREINNYHHAHDAYLNAVVGTALIKKYPKLESEFVYGDYKVYDVRKMIAKSEQEIGKATAKYFFYSNIMNFFKTEITLANGEIRKRPLIETNGETGEIVWDKGRDFATVRKVLSMPQVNIVKKTEVQTGGFSKESILPKRNSDKLIARKKDWDPKKYGGFDSPTVAYSVLVVAKVEKGKSKKLKSVKELLGITIMERSSFEKNPIDFLEAKGYKEVKKDLIIKLPKYSLFELENGRKRMLASAGELQKGNELALPSKYVNFLYLASHYEKLKGSPEDNEQKQLFVEQHKHYLDEIIEQISEFSKRVILADANLDKVLSAYNKHRDKPIREQAENIIHLFTLTNLGAPAAFKYFDTTIDRKRYTSTKEVLDATLIHQSITGLYETRIDLSQLGGDGGGGGGGSGGTLNIEDEYRLHEISTEPDVSPGSTWLSDFPQAWAETGGMGLAVRQAPLIIPLKATSTPVSIKQYPMSQEAKLGIKPHIQRLLDQGILVPCQSPWNTPLLPVKKPGTNDYRPVQGLREVNKRVEDIHPTVPNPYNLLSGLPTSHRWYTVLDLKDAFFCLRLHPTSQPLFASEWRDPGMGISGQLTWTRLPQGFKNSPTLFNEALHRGLADFRIQHPDLILLQYVDDLLLAATSELDCQQGTRALLKTLGNLGYRASAKKAQICQKQVKYLGYLLREGQRWLTEARKETVMGQPTPKTPRQLREFLGTAGFCRLWIPRFAEMAAPLYPLTKPGTLFNWGPDQQKAYHEIKQALLTAPALGLPDLTKPFELFVDEKQGYAKGVLTQKLGPWRRPVAYLSKKLDPVAAGWPPCLRMVAAIAVLTKDAGKLTMGQPLVILAPHAVEALVKQPPDRWLSNARMTHYQAMLLDTDRVQFGPVVALNPATLLPLPEEGAPHDCLEILAETHGTEPDLTDQPIPDADHTWYTDGSSFLQEGQRKAGAAVTTETEVIWARALPAGTSAQRAELIALTQALKMAEGKRLNVYTDSRYAFATAHIHGEIYKRRGWLTSEGREIKNKSEILALLKALFLPKRLSIIHCLGHQKGDSAEARGNRLADQAAREAAIKTPPDTSTLLAGKRTADGSEFEKRTADGSEFESPKKKAKVE

SEQ ID NO: 6598 - protein, 2082 aa, synthetic construct
MPAAKRVKLDGGDKKYSIGLDIGTNSVGWAVITDEYKVPSKKFKVLGNTDRHSIKKNLIGALLFDSGETAEATRLKRTARRRYTRRKNRICYLQEIFSNEMAKVDDSFFHRLEESFLVEEDKKHERHPIFGNIVDEVAYHEKYPTIYHLRKKLVDSTDKADLRLIYLALAHMIKFRGHFLIEGDLNPDNSDVDKLFIQLVQTYNQLFEENPINASGVDAKAILSARLSKSRRLENLIAQLPGEKKNGLFGNLIALSLGLTPNFKSNFDLAEDAKLQLSKDTYDDDLDNLLAQIGDQYADLFLAAKNLSDAILLSDILRVNTEITKAPLSASMIKRYDEHHQDLTLLKALVRQQLPEKYKEIFFDQSKNGYAGYIDGGASQEEFYKFIKPILEKMDGTEELLVKLNREDLLRKQRTFDNGSIPHQIHLGELHAILRRQEDFYPFLKDNREKIEKILTFRIPYYVGPLARGNSRFAWMTRKSEETITPWNFEEVVDKGASAQSFIERMTNFDKNLPNEKVLPKHSLLYEYFTVYNELTKVKYVTEGMRKPAFLSGEQKKAIVDLLFKTNRKVTVKQLKEDYFKKIECFDSVEISGVEDRFNASLGTYHDLLKIIKDKDFLDNEENEDILEDIVLTLTLFEDREMIEERLKTYAHLFDDKVMKQLKRRRYTGWGRLSRKLINGIRDKQSGKTILDFLKSDGFANRNFMQLIHDDSLTFKEDIQKAQVSGQGDSLHEHIANLAGSPAIKKGILQTVKVVDELVKVMGRHKPENIVIEMARENQTTQKGQKNSRERMKRIEEGIKELGSQILKEHPVENTQLQNEKLYLYYLQNGRDMYVDQELDINRLSDYDVDHIVPQSFLKDDSIDNKVLTRSDKARGKSDNVPSEEVVKKMKNYWRQLLNAKLITQRKFDNLTKAERGGLSELDKAGFIKRQLVETRQITKHVAQILDSRMNTKYDENDKLIREVKVITLKSKLVSDFRKDFQFYKVREINNYHHAHDAYLNAVVGTALIKKYPKLESEFVYGDYKVYDVRKMIAKSEQEIGKATAKYFFYSNIMNFFKTEITLANGEIRKRPLIETNGETGEIVWDKGRDFATVRKVLSMPQVNIVKKTEVQTGGFSKESILPKRNSDKLIARKKDWDPKKYGGFDSPTVAYSVLVVAKVEKGKSKKLKSVKELLGITIMERSSFEKNPIDFLEAKGYKEVKKDLIIKLPKYSLFELENGRKRMLASAGELQKGNELALPSKYVNFLYLASHYEKLKGSPEDNEQKQLFVEQHKHYLDEIIEQISEFSKRVILADANLDKVLSAYNKHRDKPIREQAENIIHLFTLTNLGAPAAFKYFDTTIDRKRYTSTKEVLDATLIHQSITGLYETRIDLSQLGGDGGGGGGGSGGIPWLMKKPLQLTTLVPLQEYEERLLKQTMLTGSYKEKLQSLFLKYDALWQHWENQVGHRRIKPHHIATGTVNPRPQKQYPINPKAKASIQTVINDLLKQGVLIQQNSIMNTPVYPVPKPDGKWRMVLDYREVNKTIPLIAAQNQHSAGILSSIFRGKYKTTLDLSNGFWAHSITPESYWLTAFTWLGQQYCWTRLPQGFLNSPALFNADVVDLLKEVPNVQVYVDDIYISHDDPREHLEQLEKVFSLLLNAGYVVSLKKSEIAQHEVEFLGFNITKEGRGLTETFKQKLLNITPPRDLKQLQSILGKLNFARNFIPNFSELVKPLYNIIATAPGKYITWTTDNSQQLQNIISMLNSAENLEERNPEVRLIMKVNTSPSAGYIRFYNEFAKRPIMYLNYVYTKAEVKFTNTEKLLTTIHKGLIKALDLGMGQEILVYSPIVSMTKIQKTPLPERKALPIRWITWMSYLEDPRIQFHYDKTLPELQQVPTVTDDIIAKIKHPSEFSMVFYTDGSAIKHPNVNKSHNAGMGIAQVQFKPEFTVINTWSIPLGDHTAQLAEVAAVEFACKKALKIDGPVLIVTDSFYVAESVNKELPYWQSNGFFNNKKKPLKHVSKWKSIADCIQLKPDIIIIHEKGHQPTASTFHTEGNNLADKLATQGSYVVNAGKRTADGSEFEKRTADGSEFESPKKKAKVE

SEQ ID NO: 6599 - protein, 2089 aa, synthetic construct
MPAAKRVKLDGGDKKYSIGLDIGTNSVGWAVITDEYKVPSKKFKVLGNTDRHSIKKNLIGALLFDSGETAEATRLKRTARRRYTRRKNRICYLQEIFSNEMAKVDDSFFHRLEESFLVEEDKKHERHPIFGNIVDEVAYHEKYPTIYHLRKKLVDSTDKADLRLIYLALAHMIKFRGHFLIEGDLNPDNSDVDKLFIQLVQTYNQLFEENPINASGVDAKAILSARLSKSRRLENLIAQLPGEKKNGLFGNLIALSLGLTPNFKSNFDLAEDAKLQLSKDTYDDDLDNLLAQIGDQYADLFLAAKNLSDAILLSDILRVNTEITKAPLSASMIKRYDEHHQDLTLLKALVRQQLPEKYKEIFFDQSKNGYAGYIDGGASQEEFYKFIKPILEKMDGTEELLVKLNREDLLRKQRTFDNGSIPHQIHLGELHAILRRQEDFYPFLKDNREKIEKILTFRIPYYVGPLARGNSRFAWMTRKSEETITPWNFEEVVDKGASAQSFIERMTNFDKNLPNEKVLPKHSLLYEYFTVYNELTKVKYVTEGMRKPAFLSGEQKKAIVDLLFKTNRKVTVKQLKEDYFKKIECFDSVEISGVEDRFNASLGTYHDLLKIIKDKDFLDNEENEDILEDIVLTLTLFEDREMIEERLKTYAHLFDDKVMKQLKRRRYTGWGRLSRKLINGIRDKQSGKTILDFLKSDGFANRNFMQLIHDDSLTFKEDIQKAQVSGQGDSLHEHIANLAGSPAIKKGILQTVKVVDELVKVMGRHKPENIVIEMARENQTTQKGQKNSRERMKRIEEGIKELGSQILKEHPVENTQLQNEKLYLYYLQNGRDMYVDQELDINRLSDYDVDHIVPQSFLKDDSIDNKVLTRSDKARGKSDNVPSEEVVKKMKNYWRQLLNAKLITQRKFDNLTKAERGGLSELDKAGFIKRQLVETRQITKHVAQILDSRMNTKYDENDKLIREVKVITLKSKLVSDFRKDFQFYKVREINNYHHAHDAYLNAVVGTALIKKYPKLESEFVYGDYKVYDVRKMIAKSEQEIGKATAKYFFYSNIMNFFKTEITLANGEIRKRPLIETNGETGEIVWDKGRDFATVRKVLSMPQVNIVKKTEVQTGGFSKESILPKRNSDKLIARKKDWDPKKYGGFDSPTVAYSVLVVAKVEKGKSKKLKSVKELLGITIMERSSFEKNPIDFLEAKGYKEVKKDLIIKLPKYSLFELENGRKRMLASAGELQKGNELALPSKYVNFLYLASHYEKLKGSPEDNEQKQLFVEQHKHYLDEIIEQISEFSKRVILADANLDKVLSAYNKHRDKPIREQAENIIHLFTLTNLGAPAAFKYFDTTIDRKRYTSTKEVLDATLIHQSITGLYETRIDLSQLGGDGGGGGGGSGGVLNLEEEYRLHEKPVPSSIDPSWLQLFPTVWAERAGMGLANQVPPVVVELRSGASPVAVRQYPMSKEAREGIRPHIQRFLDLGVLVPCQSPWNTPLLPVKKPGTNDYRPVQDLREINKRVQDIHPTVPNPYNLLSSLPPSHTWYSVLDLKDAFFCLKLHPNSQPLFAFEWRDPEKGNTGQLTWTRLPQGFKNSPTLFNEALHRDLAPFRALNPQVVLLQYVDDLLVAAPTYRDCKEGTQKLLQELSKLGYRVSAKKAQLCQKEVTYLGYLLKEGKRWLTPARKATVMKIPPPTTPRQVREFLGTAGFCRLWIPGFASLAAPLYPLTKPSIPFIWTEEHQKAFDRIKEALLSAPALALPDLTKPFTLYVDERAGVARGVLTQTLGPWRRPVAYLSKKLDPVASGWPTCLKAVAAVALLLKDADKLTLGQNVTVIASHSLESIVRQPPDRWMTNARMTHYQSLLLNERVSFAPPAVLNPATLLPVESEATPVHRCSEILAEETGTRRDLKDQPLPGVPAWYTDGSSFIAEGKRRAGAAIVDGKRTVWASSLPEGTSAQKAELVALTQALRLAEGKDINIYTDSRYAFATAHIHGAIYKQRGWLTSAGKDIKNKEEILALLEAIHLPKRVAIIHCPGHQKGNDPVATGNRRADEAAKQAALSTRVLAETTKPAGKRTADGSEFEKRTADGSEFESPKKKAKVE

SEQ ID NO: 6600 - protein, 2089 aa, synthetic construct
MPAAKRVKLDGGDKKYSIGLDIGTNSVGWAVITDEYKVPSKKFKVLGNTDRHSIKKNLIGALLFDSGETAEATRLKRTARRRYTRRKNRICYLQEIFSNEMAKVDDSFFHRLEESFLVEEDKKHERHPIFGNIVDEVAYHEKYPTIYHLRKKLVDSTDKADLRLIYLALAHMIKFRGHFLIEGDLNPDNSDVDKLFIQLVQTYNQLFEENPINASGVDAKAILSARLSKSRRLENLIAQLPGEKKNGLFGNLIALSLGLTPNFKSNFDLAEDAKLQLSKDTYDDDLDNLLAQIGDQYADLFLAAKNLSDAILLSDILRVNTEITKAPLSASMIKRYDEHHQDLTLLKALVRQQLPEKYKEIFFDQSKNGYAGYIDGGASQEEFYKFIKPILEKMDGTEELLVKLNREDLLRKQRTFDNGSIPHQIHLGELHAILRRQEDFYPFLKDNREKIEKILTFRIPYYVGPLARGNSRFAWMTRKSEETITPWNFEEVVDKGASAQSFIERMTNFDKNLPNEKVLPKHSLLYEYFTVYNELTKVKYVTEGMRKPAFLSGEQKKAIVDLLFKTNRKVTVKQLKEDYFKKIECFDSVEISGVEDRFNASLGTYHDLLKIIKDKDFLDNEENEDILEDIVLTLTLFEDREMIEERLKTYAHLFDDKVMKQLKRRRYTGWGRLSRKLINGIRDKQSGKTILDFLKSDGFANRNFMQLIHDDSLTFKEDIQKAQVSGQGDSLHEHIANLAGSPAIKKGILQTVKVVDELVKVMGRHKPENIVIEMARENQTTQKGQKNSRERMKRIEEGIKELGSQILKEHPVENTQLQNEKLYLYYLQNGRDMYVDQELDINRLSDYDVDHIVPQSFLKDDSIDNKVLTRSDKARGKSDNVPSEEVVKKMKNYWRQLLNAKLITQRKFDNLTKAERGGLSELDKAGFIKRQLVETRQITKHVAQILDSRMNTKYDENDKLIREVKVITLKSKLVSDFRKDFQFYKVREINNYHHAHDAYLNAVVGTALIKKYPKLESEFVYGDYKVYDVRKMIAKSEQEIGKATAKYFFYSNIMNFFKTEITLANGEIRKRPLIETNGETGEIVWDKGRDFATVRKVLSMPQVNIVKKTEVQTGGFSKESILPKRNSDKLIARKKDWDPKKYGGFDSPTVAYSVLVVAKVEKGKSKKLKSVKELLGITIMERSSFEKNPIDFLEAKGYKEVKKDLIIKLPKYSLFELENGRKRMLASAGELQKGNELALPSKYVNFLYLASHYEKLKGSPEDNEQKQLFVEQHKHYLDEIIEQISEFSKRVILADANLDKVLSAYNKHRDKPIREQAENIIHLFTLTNLGAPAAFKYFDTTIDRKRYTSTKEVLDATLIHQSITGLYETRIDLSQLGGDGGGGGGGSGGVLNLEEEYRLHEKPVPSSIDPSWLQLFPTVWAERAGMGLANQVPPVVVELRSGASPVAVRQYPMSKEAREGIRPHIQRFLDLGVLVPCQSPWNTPLLPVKKPGTNDYRPVQDLREINKRVQDIHPTVPNPYNLLSSLPPSHTWYSVLDLKDAFFCLKLHPNSQPLFAFEWRDPEKGNTGQLTWTRLPQGFKNSPTLFNEALHRDLAPFRALNPQVVLLQYVDDLLVAAPTYRDCKEGTQKLLQELSKLGYRVSAKKAQLCQKEVTYLGYLLKEGKRWLTPARKATVMKIPPPTTPRQVREFLGKAGFCRLFIPGFASLAAPLYPLTKPSIPFIWTEEHQKAFDRIKEALLSAPALALPDLTKPFTLYVDERAGVARGVLTQTLGPWRRPVAYLSKKLDPVASGWPTCLKAVAAVALLLKDADKLTLGQNVTVIASHSLESIVRQPPDRWMTNARMTHYQSLLLNERVSFAPPAVLNPATLLPVESEATPVHRCSEILAEETGTRRDLKDQPLPGVPAWYTDGSSFIAEGKRRAGAAIVDGKRTVWASSLPEGTSAQKAELVALTQALRLAEGKDINIYTDSRYAFATAHIHGAIYKQRGWLTSAGKDIKNKEEILALLEAIHLPKRVAIIHCPGHQKGNDPVATGNRRADEAAKQAALSTRVLAETTKPAGKRTADGSEFEKRTADGSEFESPKKKAKVE

SEQ ID NO: 6601 - protein, 2091 aa, synthetic construct
MPAAKRVKLDGGDKKYSIGLDIGTNSVGWAVITDEYKVPSKKFKVLGNTDRHSIKKNLIGALLFDSGETAEATRLKRTARRRYTRRKNRICYLQEIFSNEMAKVDDSFFHRLEESFLVEEDKKHERHPIFGNIVDEVAYHEKYPTIYHLRKKLVDSTDKADLRLIYLALAHMIKFRGHFLIEGDLNPDNSDVDKLFIQLVQTYNQLFEENPINASGVDAKAILSARLSKSRRLENLIAQLPGEKKNGLFGNLIALSLGLTPNFKSNFDLAEDAKLQLSKDTYDDDLDNLLAQIGDQYADLFLAAKNLSDAILLSDILRVNTEITKAPLSASMIKRYDEHHQDLTLLKALVRQQLPEKYKEIFFDQSKNGYAGYIDGGASQEEFYKFIKPILEKMDGTEELLVKLNREDLLRKQRTFDNGSIPHQIHLGELHAILRRQEDFYPFLKDNREKIEKILTFRIPYYVGPLARGNSRFAWMTRKSEETITPWNFEEVVDKGASAQSFIERMTNFDKNLPNEKVLPKHSLLYEYFTVYNELTKVKYVTEGMRKPAFLSGEQKKAIVDLLFKTNRKVTVKQLKEDYFKKIECFDSVEISGVEDRFNASLGTYHDLLKIIKDKDFLDNEENEDILEDIVLTLTLFEDREMIEERLKTYAHLFDDKVMKQLKRRRYTGWGRLSRKLINGIRDKQSGKTILDFLKSDGFANRNFMQLIHDDSLTFKEDIQKAQVSGQGDSLHEHIANLAGSPAIKKGILQTVKVVDELVKVMGRHKPENIVIEMARENQTTQKGQKNSRERMKRIEEGIKELGSQILKEHPVENTQLQNEKLYLYYLQNGRDMYVDQELDINRLSDYDVDHIVPQSFLKDDSIDNKVLTRSDKARGKSDNVPSEEVVKKMKNYWRQLLNAKLITQRKFDNLTKAERGGLSELDKAGFIKRQLVETRQITKHVAQILDSRMNTKYDENDKLIREVKVITLKSKLVSDFRKDFQFYKVREINNYHHAHDAYLNAVVGTALIKKYPKLESEFVYGDYKVYDVRKMIAKSEQEIGKATAKYFFYSNIMNFFKTEITLANGEIRKRPLIETNGETGEIVWDKGRDFATVRKVLSMPQVNIVKKTEVQTGGFSKESILPKRNSDKLIARKKDWDPKKYGGFDSPTVAYSVLVVAKVEKGKSKKLKSVKELLGITIMERSSFEKNPIDFLEAKGYKEVKKDLIIKLPKYSLFELENGRKRMLASAGELQKGNELALPSKYVNFLYLASHYEKLKGSPEDNEQKQLFVEQHKHYLDEIIEQISEFSKRVILADANLDKVLSAYNKHRDKPIREQAENIIHLFTLTNLGAPAAFKYFDTTIDRKRYTSTKEVLDATLIHQSITGLYETRIDLSQLGGDGGGGGGGSGGTLNIEDEYRLHETSKEPDVPLGSTWLSDFPQAWAETGGMGLAVRQAPLIIPLKATSTPVSIKQYPMSQEARLGIKPHIQRLLDQGILVPCQSPWNTPLLPVKKPGTNDYRPVQDLREVNKRVEDIHPTVPNPYNLLSGLPPSHQWYTVLDLKDAFFCLRLHPTSQPLFAFEWRDPEMGISGQLTWTRLPQGFKNSPTLFNEALHRDLADFRIQHPDLILLQYVDDLLLAATSEQDCQRGTRALLQTLGNLGYRASAKKAQICQKQVKYLGYLLKEGQRWLTEARKETVMGQPTPKTPRQLREFLGKAGFCRLFIPGFAEMAAPLYPLTKPGTLFNWGPDQQKAYQEIKQALLTAPALGLPDLTKPFELFVDEKQGYAKGVLTQKLGPWRRPVAYLSKKLDPVAAGWPPCLRMVAAIAVLTKDAGKLTMGQPLVILAPHAVEALVKQPPDRWLSNARMTHYQAMLLDTDRVQFGPVVALNPATLLPLPEKEAPHDCLEILAETHGTRPDLTDQPIPDADYTWYTDGSSFLQEGQRRAGAAVTTETEVIWARALPAGTSAQRAELIALTQALKMAEGKKLNVYTDSRYAFATAHVHGEIYRRRGWLTSEGREIKNKNEILALLKALFLPKRLSIIHCPGHQKGNSAEARGNRMADQAAREAAMKAVLETSTLLAGKRTADGSEFEKRTADGSEFESPKKKAKVE

SEQ ID NO: 6602 - protein, 2168 aa, synthetic construct
MPAAKRVKLDGGDKKYSIGLDIGTNSVGWAVITDEYKVPSKKFKVLGNTDRHSIKKNLIGALLFDSGETAEATRLKRTARRRYTRRKNRICYLQEIFSNEMAKVDDSFFHRLEESFLVEEDKKHERHPIFGNIVDEVAYHEKYPTIYHLRKKLVDSTDKADLRLIYLALAHMIKFRGHFLIEGDLNPDNSDVDKLFIQLVQTYNQLFEENPINASGVDAKAILSARLSKSRRLENLIAQLPGEKKNGLFGNLIALSLGLTPNFKSNFDLAEDAKLQLSKDTYDDDLDNLLAQIGDQYADLFLAAKNLSDAILLSDILRVNTEITKAPLSASMIKRYDEHHQDLTLLKALVRQQLPEKYKEIFFDQSKNGYAGYIDGGASQEEFYKFIKPILEKMDGTEELLVKLNREDLLRKQRTFDNGSIPHQIHLGELHAILRRQEDFYPFLKDNREKIEKILTFRIPYYVGPLARGNSRFAWMTRKSEETITPWNFEEVVDKGASAQSFIERMTNFDKNLPNEKVLPKHSLLYEYFTVYNELTKVKYVTEGMRKPAFLSGEQKKAIVDLLFKTNRKVTVKQLKEDYFKKIECFDSVEISGVEDRFNASLGTYHDLLKIIKDKDFLDNEENEDILEDIVLTLTLFEDREMIEERLKTYAHLFDDKVMKQLKRRRYTGWGRLSRKLINGIRDKQSGKTILDFLKSDGFANRNFMQLIHDDSLTFKEDIQKAQVSGQGDSLHEHIANLAGSPAIKKGILQTVKVVDELVKVMGRHKPENIVIEMARENQTTQKGQKNSRERMKRIEEGIKELGSQILKEHPVENTQLQNEKLYLYYLQNGRDMYVDQELDINRLSDYDVDHIVPQSFLKDDSIDNKVLTRSDKARGKSDNVPSEEVVKKMKNYWRQLLNAKLITQRKFDNLTKAERGGLSELDKAGFIKRQLVETRQITKHVAQILDSRMNTKYDENDKLIREVKVITLKSKLVSDFRKDFQFYKVREINNYHHAHDAYLNAVVGTALIKKYPKLESEFVYGDYKVYDVRKMIAKSEQEIGKATAKYFFYSNIMNFFKTEITLANGEIRKRPLIETNGETGEIVWDKGRDFATVRKVLSMPQVNIVKKTEVQTGGFSKESILPKRNSDKLIARKKDWDPKKYGGFDSPTVAYSVLVVAKVEKGKSKKLKSVKELLGITIMERSSFEKNPIDFLEAKGYKEVKKDLIIKLPKYSLFELENGRKRMLASAGELQKGNELALPSKYVNFLYLASHYEKLKGSPEDNEQKQLFVEQHKHYLDEIIEQISEFSKRVILADANLDKVLSAYNKHRDKPIREQAENIIHLFTLTNLGAPAAFKYFDTTIDRKRYTSTKEVLDATLIHQSITGLYETRIDLSQLGGDGGGGSGSSGGMDLLKPLTVERKGVKIKGYWNSQADITCVPKDLLQGEEPVRQQNVTTIHGTQEGDVYYVNLKIDGRRINTEVIGTTLDYAIITPGDVPWILKKPLELTIKLDLEEQQGTLLNNSILSKKGKEELKQLFEKYSALWQSWENQVGHRRIRPHKIATGTVKPTPQKQYHINPKAKPDIQIVINDLLKQGVLIQKESTMNTPVYPVPKPNGRWRMVLDYRAVNKVTPLIAVQNQHSYGILGSLFKGRYKTTIDLSNGFWAHPIVPEDYWITAFTWQGKQYCWTVLPQGFLNSPGLFTGDVVDLLQGIPNVEVYVDDVYISHDSEKEHLEYLDILFNRLKEAGYIISLKKSNIANSIVDFLGFQITNEGRGLTDTFKEKLENITAPTTLKQLQSILGLLNFARNFIPDFTELIAPLYALIPKSTKNYVPWQIEHSTTLETLITKLNGAEYLQGRKGDKTLIMKVNASYTTGYIRYYNEGEKKPISYVSIVFSKTELKFTELEKLLTTVHKGLLKALDLSMGQNIHVYSPIVSMQNIQKTPQTAKKALASRWLSWLSYLEDPRIRFFYDPQMPALKDLPAVDTGKDNKKHPSNFQHIFYTDGSAITSPTKEGHLNAGMGIVYFINKDGNLQKQQEWSISLGNHTAQFAEIAAFEFALKKCLPLGGNILVVTDSNYVAKAYNEELDVWASNGFVNNRKKPLKHISKWKSVADLKRLRPDVVVTHEPGHQKLDSSPHAYGNNLADQLATQASFKVHAGKRTADGSEFEKRTADGSEFESPKKKAKVE

SEQ ID NO: 6603 - protein, 2090 aa, synthetic construct
MPAAKRVKLDGGDKKYSIGLDIGTNSVGWAVITDEYKVPSKKFKVLGNTDRHSIKKNLIGALLFDSGETAEATRLKRTARRRYTRRKNRICYLQEIFSNEMAKVDDSFFHRLEESFLVEEDKKHERHPIFGNIVDEVAYHEKYPTIYHLRKKLVDSTDKADLRLIYLALAHMIKFRGHFLIEGDLNPDNSDVDKLFIQLVQTYNQLFEENPINASGVDAKAILSARLSKSRRLENLIAQLPGEKKNGLFGNLIALSLGLTPNFKSNFDLAEDAKLQLSKDTYDDDLDNLLAQIGDQYADLFLAAKNLSDAILLSDILRVNTEITKAPLSASMIKRYDEHHQDLTLLKALVRQQLPEKYKEIFFDQSKNGYAGYIDGGASQEEFYKFIKPILEKMDGTEELLVKLNREDLLRKQRTFDNGSIPHQIHLGELHAILRRQEDFYPFLKDNREKIEKILTFRIPYYVGPLARGNSRFAWMTRKSEETITPWNFEEVVDKGASAQSFIERMTNFDKNLPNEKVLPKHSLLYEYFTVYNELTKVKYVTEGMRKPAFLSGEQKKAIVDLLFKTNRKVTVKQLKEDYFKKIECFDSVEISGVEDRFNASLGTYHDLLKIIKDKDFLDNEENEDILEDIVLTLTLFEDREMIEERLKTYAHLFDDKVMKQLKRRRYTGWGRLSRKLINGIRDKQSGKTILDFLKSDGFANRNFMQLIHDDSLTFKEDIQKAQVSGQGDSLHEHIANLAGSPAIKKGILQTVKVVDELVKVMGRHKPENIVIEMARENQTTQKGQKNSRERMKRIEEGIKELGSQILKEHPVENTQLQNEKLYLYYLQNGRDMYVDQELDINRLSDYDVDHIVPQSFLKDDSIDNKVLTRSDKARGKSDNVPSEEVVKKMKNYWRQLLNAKLITQRKFDNLTKAERGGLSELDKAGFIKRQLVETRQITKHVAQILDSRMNTKYDENDKLIREVKVITLKSKLVSDFRKDFQFYKVREINNYHHAHDAYLNAVVGTALIKKYPKLESEFVYGDYKVYDVRKMIAKSEQEIGKATAKYFFYSNIMNFFKTEITLANGEIRKRPLIETNGETGEIVWDKGRDFATVRKVLSMPQVNIVKKTEVQTGGFSKESILPKRNSDKLIARKKDWDPKKYGGFDSPTVAYSVLVVAKVEKGKSKKLKSVKELLGITIMERSSFEKNPIDFLEAKGYKEVKKDLIIKLPKYSLFELENGRKRMLASAGELQKGNELALPSKYVNFLYLASHYEKLKGSPEDNEQKQLFVEQHKHYLDEIIEQISEFSKRVILADANLDKVLSAYNKHRDKPIREQAENIIHLFTLTNLGAPAAFKYFDTTIDRKRYTSTKEVLDATLIHQSITGLYETRIDLSQLGGDGGGGSGSSGGTLQLEEEYRLFEPESTQKQEMDIWLKNFPQAWAETGGMGTAHCQAPVLIQLKATATPISIRQYPMPHEAYQGIKPHIRRMLDQGILKPCQSPWNTPLLPVKKPGTEDYRPVQDLREVNKRVEDIHPTVPNPYNLLSTLPPSHPWYTVLDLKDAFFCLRLHSESQLLFAFEWRDPEIGLSGQLTWTRLPQGFKNSPTLFNEALHSDLADFRVRYPALVLLQYVDDLLLAAATRTECLEGTKALLETLGNKGYRASAKKAQICLQEVTYLGYSLKDGQRWLTKARKEAILSIPVPKNSRQVREFLGKAGYCRLFIPGFAELAAPLYPLTRPGTLFQWGTEQQLAFEDIKKALLSSPALGLPDITKPFELFIDENSGFAKGVLVQKLGPWKRPVAYLSKKLDTVASGWPPCLRMVAAIAILVKDAGKLTLGQPLTILTSHPVEALVRQPPNKWLSNARMTHYQAMLLDAERVHFGPTVSLNPATLLPLPSGGNHHDCLQILAETHGTRPDLTDQPLPDADLTWYTDGSSFIRNGEREAGAAVTTESEVIWAAPLPPGTSAQRAELIALTQALKMAEGKKLTVYTDSRYAFATTHVHGEIYRRRGWLTSEGKEIKNKNEILALLEALFLPKRLSIIHCPGHQKGDSPQAKGNRLADDTAKKAATETHSSLTVLPAGKRTADGSEFEKRTADGSEFESPKKKAKVE

SEQ ID NO: 6604 - protein, 2213 aa, synthetic construct
MPAAKRVKLDGGDKKYSIGLDIGTNSVGWAVITDEYKVPSKKFKVLGNTDRHSIKKNLIGALLFDSGETAEATRLKRTARRRYTRRKNRICYLQEIFSNEMAKVDDSFFHRLEESFLVEEDKKHERHPIFGNIVDEVAYHEKYPTIYHLRKKLVDSTDKADLRLIYLALAHMIKFRGHFLIEGDLNPDNSDVDKLFIQLVQTYNQLFEENPINASGVDAKAILSARLSKSRRLENLIAQLPGEKKNGLFGNLIALSLGLTPNFKSNFDLAEDAKLQLSKDTYDDDLDNLLAQIGDQYADLFLAAKNLSDAILLSDILRVNTEITKAPLSASMIKRYDEHHQDLTLLKALVRQQLPEKYKEIFFDQSKNGYAGYIDGGASQEEFYKFIKPILEKMDGTEELLVKLNREDLLRKQRTFDNGSIPHQIHLGELHAILRRQEDFYPFLKDNREKIEKILTFRIPYYVGPLARGNSRFAWMTRKSEETITPWNFEEVVDKGASAQSFIERMTNFDKNLPNEKVLPKHSLLYEYFTVYNELTKVKYVTEGMRKPAFLSGEQKKAIVDLLFKTNRKVTVKQLKEDYFKKIECFDSVEISGVEDRFNASLGTYHDLLKIIKDKDFLDNEENEDILEDIVLTLTLFEDREMIEERLKTYAHLFDDKVMKQLKRRRYTGWGRLSRKLINGIRDKQSGKTILDFLKSDGFANRNFMQLIHDDSLTFKEDIQKAQVSGQGDSLHEHIANLAGSPAIKKGILQTVKVVDELVKVMGRHKPENIVIEMARENQTTQKGQKNSRERMKRIEEGIKELGSQILKEHPVENTQLQNEKLYLYYLQNGRDMYVDQELDINRLSDYDVDHIVPQSFLKDDSIDNKVLTRSDKARGKSDNVPSEEVVKKMKNYWRQLLNAKLITQRKFDNLTKAERGGLSELDKAGFIKRQLVETRQITKHVAQILDSRMNTKYDENDKLIREVKVITLKSKLVSDFRKDFQFYKVREINNYHHAHDAYLNAVVGTALIKKYPKLESEFVYGDYKVYDVRKMIAKSEQEIGKATAKYFFYSNIMNFFKTEITLANGEIRKRPLIETNGETGEIVWDKGRDFATVRKVLSMPQVNIVKKTEVQTGGFSKESILPKRNSDKLIARKKDWDPKKYGGFDSPTVAYSVLVVAKVEKGKSKKLKSVKELLGITIMERSSFEKNPIDFLEAKGYKEVKKDLIIKLPKYSLFELENGRKRMLASAGELQKGNELALPSKYVNFLYLASHYEKLKGSPEDNEQKQLFVEQHKHYLDEIIEQISEFSKRVILADANLDKVLSAYNKHRDKPIREQAENIIHLFTLTNLGAPAAFKYFDTTIDRKRYTSTKEVLDATLIHQSITGLYETRIDLSQLGGDGGGGSGSSGGTLGDQGSRGSDPLPEPRVTLTVEGIPTEFLVNTGAEHSVLTKPMGKMGSKRTVVAGATGSKVYPWTTKRLLKIGQKQVTHSFLVIPECPAPLLGRDLLTKLKAQIQFSTEGPQVTWEDRPAMCLVLNLEEEYRLHEKPVPPSIDPSWLQLFPMVWAEKAGMGLANQVPPVVVELKSDASPVAVRQYPMSKEAREGIRPHIQRFLDLGILVPCQSPWNTPLLPVKKPGTNDYRPVQDLREVNKRVQDIHPTVPNPYNLLSSLPPSHTWYSVLDLKDAFFCLKLHPNSQPLFAFEWRDPEKGNTGQLTWTRLPQGFKNSPTLFDEALHRDLASFRALNPQVVMLQYVDDLLVAAPTYRDCKEGTRRLLQELSKLGYRVSAKKAQLCREEVTYLGYLLKGGKRWLTPARKATVMKIPTPTTPRQVREFLGTAGFCRLWIPGFASLAAPLYPLTREKVPFTWTEAHQEAFGRIKEALLSAPALALPDLTKPFALYVDEKEGVARGVLTQTLGPWRRPVAYLSKKLDPVASGWPTCLKAIAAVALLLKDADKLTLGQNVLVIAPHNLESIVRQPPDRWMTNARMTHYQSLLLNERVSFAPPAILNPATLLPVESDDTPIHICSEILAEETGTRPDLRDQPLPGVPAWYTDGSSFIMDGRRQAGAAIVDNKRTVWASNLPEGTSAQKAELIALTQALRLAEGKSINIYTDSRYAFATAHVHGAIYKQRGLLTSAGKDIKNKEEILALLEAIHLPKRVAIIHCPGHQRGTDPVATGNRKADEAAKQAAQSTRILTETTKNAGKRTADGSEFEKRTADGSEFESPKKKAKVE

SEQ ID NO: 6605 - protein, 2091 aa, synthetic construct
MPAAKRVKLDGGDKKYSIGLDIGTNSVGWAVITDEYKVPSKKFKVLGNTDRHSIKKNLIGALLFDSGETAEATRLKRTARRRYTRRKNRICYLQEIFSNEMAKVDDSFFHRLEESFLVEEDKKHERHPIFGNIVDEVAYHEKYPTIYHLRKKLVDSTDKADLRLIYLALAHMIKFRGHFLIEGDLNPDNSDVDKLFIQLVQTYNQLFEENPINASGVDAKAILSARLSKSRRLENLIAQLPGEKKNGLFGNLIALSLGLTPNFKSNFDLAEDAKLQLSKDTYDDDLDNLLAQIGDQYADLFLAAKNLSDAILLSDILRVNTEITKAPLSASMIKRYDEHHQDLTLLKALVRQQLPEKYKEIFFDQSKNGYAGYIDGGASQEEFYKFIKPILEKMDGTEELLVKLNREDLLRKQRTFDNGSIPHQIHLGELHAILRRQEDFYPFLKDNREKIEKILTFRIPYYVGPLARGNSRFAWMTRKSEETITPWNFEEVVDKGASAQSFIERMTNFDKNLPNEKVLPKHSLLYEYFTVYNELTKVKYVTEGMRKPAFLSGEQKKAIVDLLFKTNRKVTVKQLKEDYFKKIECFDSVEISGVEDRFNASLGTYHDLLKIIKDKDFLDNEENEDILEDIVLTLTLFEDREMIEERLKTYAHLFDDKVMKQLKRRRYTGWGRLSRKLINGIRDKQSGKTILDFLKSDGFANRNFMQLIHDDSLTFKEDIQKAQVSGQGDSLHEHIANLAGSPAIKKGILQTVKVVDELVKVMGRHKPENIVIEMARENQTTQKGQKNSRERMKRIEEGIKELGSQILKEHPVENTQLQNEKLYLYYLQNGRDMYVDQELDINRLSDYDVDHIVPQSFLKDDSIDNKVLTRSDKARGKSDNVPSEEVVKKMKNYWRQLLNAKLITQRKFDNLTKAERGGLSELDKAGFIKRQLVETRQITKHVAQILDSRMNTKYDENDKLIREVKVITLKSKLVSDFRKDFQFYKVREINNYHHAHDAYLNAVVGTALIKKYPKLESEFVYGDYKVYDVRKMIAKSEQEIGKATAKYFFYSNIMNFFKTEITLANGEIRKRPLIETNGETGEIVWDKGRDFATVRKVLSMPQVNIVKKTEVQTGGFSKESILPKRNSDKLIARKKDWDPKKYGGFDSPTVAYSVLVVAKVEKGKSKKLKSVKELLGITIMERSSFEKNPIDFLEAKGYKEVKKDLIIKLPKYSLFELENGRKRMLASAGELQKGNELALPSKYVNFLYLASHYEKLKGSPEDNEQKQLFVEQHKHYLDEIIEQISEFSKRVILADANLDKVLSAYNKHRDKPIREQAENIIHLFTLTNLGAPAAFKYFDTTIDRKRYTSTKEVLDATLIHQSITGLYETRIDLSQLGGDGGGGSGSSGGTLGIEDEYRLHETSTEPDVSLGSTWLSDFPQAWAETGGMGLAVRQAPLIIPLKATSTPVSIQQYPMSHEARLGIKPHIQRLLDQGILVPCQSPWNTPLLPVKKPGTNDYRPVQDLREVNKRVEDIHPTVPNPYNLLSGLPPSHQWYTVLDLKDAFFCLRLHPTSQPLFAFEWRDPGMGISGQLTWTRLPQGFKNSPTLFDEALHRDLADFRIQHPDLILLQYVDDILLAATSELDCQQGTRALLQTLGDLGYRASAKKAQICQKQVKYLGYLLREGQRWLTEARKETVMGQPVPKTPRQLREFLGTAGFCRLWIPGFAEMAAPLYPLTKTGTLFSWGPDQQKAYQEIKQALLTAPALGLPDLTKPFELFVDEKQGYAKGVLTQKLGPWRRPVAYLSKKLDPVAAGWPPCLRMVAAIAVLTKDAGKLTMGQPLVILAPHAVEALVKQPPDRWLSNARMTHYQAMLLDTDRVQFGPVVALNPATLLPLPEEGAPHDCLEILAETHGTRPDLTDQPIPDADHTWYTDGSSFLQEGQRKAGAAVTTETEVIWAGALPAGTSAQRAELIALTQALKMAEGKRLNVYTDSRYAFATAHIHGEIYRRRGLLTSEGREIKNKSEILALLKALFLPKRLSIIHCLGHQKGDSAEARGNRLADQAAREAAIKTPPDTSTLLAGKRTADGSEFEKRTADGSEFESPKKKAKVE

SEQ ID NO: 6606 - protein, 2091 aa, synthetic construct
MPAAKRVKLDGGDKKYSIGLDIGTNSVGWAVITDEYKVPSKKFKVLGNTDRHSIKKNLIGALLFDSGETAEATRLKRTARRRYTRRKNRICYLQEIFSNEMAKVDDSFFHRLEESFLVEEDKKHERHPIFGNIVDEVAYHEKYPTIYHLRKKLVDSTDKADLRLIYLALAHMIKFRGHFLIEGDLNPDNSDVDKLFIQLVQTYNQLFEENPINASGVDAKAILSARLSKSRRLENLIAQLPGEKKNGLFGNLIALSLGLTPNFKSNFDLAEDAKLQLSKDTYDDDLDNLLAQIGDQYADLFLAAKNLSDAILLSDILRVNTEITKAPLSASMIKRYDEHHQDLTLLKALVRQQLPEKYKEIFFDQSKNGYAGYIDGGASQEEFYKFIKPILEKMDGTEELLVKLNREDLLRKQRTFDNGSIPHQIHLGELHAILRRQEDFYPFLKDNREKIEKILTFRIPYYVGPLARGNSRFAWMTRKSEETITPWNFEEVVDKGASAQSFIERMTNFDKNLPNEKVLPKHSLLYEYFTVYNELTKVKYVTEGMRKPAFLSGEQKKAIVDLLFKTNRKVTVKQLKEDYFKKIECFDSVEISGVEDRFNASLGTYHDLLKIIKDKDFLDNEENEDILEDIVLTLTLFEDREMIEERLKTYAHLFDDKVMKQLKRRRYTGWGRLSRKLINGIRDKQSGKTILDFLKSDGFANRNFMQLIHDDSLTFKEDIQKAQVSGQGDSLHEHIANLAGSPAIKKGILQTVKVVDELVKVMGRHKPENIVIEMARENQTTQKGQKNSRERMKRIEEGIKELGSQILKEHPVENTQLQNEKLYLYYLQNGRDMYVDQELDINRLSDYDVDHIVPQSFLKDDSIDNKVLTRSDKARGKSDNVPSEEVVKKMKNYWRQLLNAKLITQRKFDNLTKAERGGLSELDKAGFIKRQLVETRQITKHVAQILDSRMNTKYDENDKLIREVKVITLKSKLVSDFRKDFQFYKVREINNYHHAHDAYLNAVVGTALIKKYPKLESEFVYGDYKVYDVRKMIAKSEQEIGKATAKYFFYSNIMNFFKTEITLANGEIRKRPLIETNGETGEIVWDKGRDFATVRKVLSMPQVNIVKKTEVQTGGFSKESILPKRNSDKLIARKKDWDPKKYGGFDSPTVAYSVLVVAKVEKGKSKKLKSVKELLGITIMERSSFEKNPIDFLEAKGYKEVKKDLIIKLPKYSLFELENGRKRMLASAGELQKGNELALPSKYVNFLYLASHYEKLKGSPEDNEQKQLFVEQHKHYLDEIIEQISEFSKRVILADANLDKVLSAYNKHRDKPIREQAENIIHLFTLTNLGAPAAFKYFDTTIDRKRYTSTKEVLDATLIHQSITGLYETRIDLSQLGGDGGGGSGSSGGTLGIEDEYRLHETSTEPDVSLGSTWLSDFPQAWAETGGMGLAVRQAPLIIPLKATSTPVSIQQYPMSHEARLGIKPHIQRLLDQGILVPCQSPWNTPLLPVKKPGTNDYRPVQDLREVNKRVEDIHPTVPNPYNLLSGLPPSHQWYTVLDLKDAFFCLRLHPTSQPLFAFEWRDPGMGISGQLTWTRLPQGFKNSPTLFNEALHRDLADFRIQHPDLILLQYVDDILLAATSELDCQQGTRALLQTLGDLGYRASAKKAQICQKQVKYLGYLLREGQRWLTEARKETVMGQPVPKTPRQLREFLGTAGFCRLWIPGFAEMAAPLYPLTKPGTLFSWGPDQQKAYQEIKQALLTAPALGLPDLTKPFELFVDEKQGYAKGVLTQKLGPWRRPVAYLSKKLDPVAAGWPPCLRMVAAIAVLTKDAGKLTMGQPLVILAPHAVEALVKQPPDRWLSNARMTHYQAMLLDTDRVQFGPVVALNPATLLPLPEEGAPHDCLEILAETHGTRPDLTDQPIPDADHTWYTDGSSFLQEGQRKAGAAVTTETEVIWAGALPAGTSAQRAELIALTQALKMAEGKRLNVYTDSRYAFATAHIHGEIYRRRGWLTSEGREIKNKSEILALLKALFLPKRLSIIHCLGHQKGDSAEARGNRLADQAAREAAIKTPPDTSTLLAGKRTADGSEFEKRTADGSEFESPKKKAKVE

SEQ ID NO: 6607 - protein, 2091 aa, synthetic construct
MPAAKRVKLDGGDKKYSIGLDIGTNSVGWAVITDEYKVPSKKFKVLGNTDRHSIKKNLIGALLFDSGETAEATRLKRTARRRYTRRKNRICYLQEIFSNEMAKVDDSFFHRLEESFLVEEDKKHERHPIFGNIVDEVAYHEKYPTIYHLRKKLVDSTDKADLRLIYLALAHMIKFRGHFLIEGDLNPDNSDVDKLFIQLVQTYNQLFEENPINASGVDAKAILSARLSKSRRLENLIAQLPGEKKNGLFGNLIALSLGLTPNFKSNFDLAEDAKLQLSKDTYDDDLDNLLAQIGDQYADLFLAAKNLSDAILLSDILRVNTEITKAPLSASMIKRYDEHHQDLTLLKALVRQQLPEKYKEIFFDQSKNGYAGYIDGGASQEEFYKFIKPILEKMDGTEELLVKLNREDLLRKQRTFDNGSIPHQIHLGELHAILRRQEDFYPFLKDNREKIEKILTFRIPYYVGPLARGNSRFAWMTRKSEETITPWNFEEVVDKGASAQSFIERMTNFDKNLPNEKVLPKHSLLYEYFTVYNELTKVKYVTEGMRKPAFLSGEQKKAIVDLLFKTNRKVTVKQLKEDYFKKIECFDSVEISGVEDRFNASLGTYHDLLKIIKDKDFLDNEENEDILEDIVLTLTLFEDREMIEERLKTYAHLFDDKVMKQLKRRRYTGWGRLSRKLINGIRDKQSGKTILDFLKSDGFANRNFMQLIHDDSLTFKEDIQKAQVSGQGDSLHEHIANLAGSPAIKKGILQTVKVVDELVKVMGRHKPENIVIEMARENQTTQKGQKNSRERMKRIEEGIKELGSQILKEHPVENTQLQNEKLYLYYLQNGRDMYVDQELDINRLSDYDVDHIVPQSFLKDDSIDNKVLTRSDKARGKSDNVPSEEVVKKMKNYWRQLLNAKLITQRKFDNLTKAERGGLSELDKAGFIKRQLVETRQITKHVAQILDSRMNTKYDENDKLIREVKVITLKSKLVSDFRKDFQFYKVREINNYHHAHDAYLNAVVGTALIKKYPKLESEFVYGDYKVYDVRKMIAKSEQEIGKATAKYFFYSNIMNFFKTEITLANGEIRKRPLIETNGETGEIVWDKGRDFATVRKVLSMPQVNIVKKTEVQTGGFSKESILPKRNSDKLIARKKDWDPKKYGGFDSPTVAYSVLVVAKVEKGKSKKLKSVKELLGITIMERSSFEKNPIDFLEAKGYKEVKKDLIIKLPKYSLFELENGRKRMLASAGELQKGNELALPSKYVNFLYLASHYEKLKGSPEDNEQKQLFVEQHKHYLDEIIEQISEFSKRVILADANLDKVLSAYNKHRDKPIREQAENIIHLFTLTNLGAPAAFKYFDTTIDRKRYTSTKEVLDATLIHQSITGLYETRIDLSQLGGDGGGGSGSSGGTLNIEDEYRLHETSKGPDVPLGSTWLSDFPQAWAETGGMGLAVRQAPLIIPLKATSTPVSIKQYPMSQEARLGIKPHIQRLLDQGILVPCQSPWNTPLLPVKKPGTNDYRPVQDLREVNKRVEDIHPTVPNPYNLLSGLPPSHQWYTVLDLKDAFFCLRLHPTSQSLFAFEWRDPEMGISGQLTWTRLPQGFKNSPTLFNEALHRDLADFRIQHPDLILLQYVDDLLLAATSELDCQQGTRALLQTLGDLGYRASAKKAQICQKQVKYLGYLLKEGQRWLTEARKETVMGQPTPKTPRQLREFLGKAGFCRLFIPGFAEMAAPLYPLTKPGTLFEWGPDQQKAYQEIKQALLTAPALGLPDLTKPFELFVDEKQGYAKGVLTQKLGPWRRPVAYLSKKLDPVAAGWPPCLRMVAAIAVLTKDAGKLTMGQPLVILAPHAVEALVKQPPDRWLSNARMTHYQALLLDTDRVQFGPIVALNPATLLPLPEEGLQHDCLDILAEAHGTRPDLTDQPLPDADHTWYTDGSSFLQEGQRKAGAAVTTETEVVWAKALPAGTSAQRAELIALTQALKMAEGKKLNVYTDSRYAFATAHIHGEIYRRRGWLTSEGKEIKNKDEILALLKALFLPKRLSIIHCPGHQKGNRAEARGNRMADQAAREVATRETPETSTLLAGKRTADGSEFEKRTADGSEFESPKKKAKVE

SEQ ID NO: 6608 - protein, 2082 aa, synthetic construct
MPAAKRVKLDGGDKKYSIGLDIGTNSVGWAVITDEYKVPSKKFKVLGNTDRHSIKKNLIGALLFDSGETAEATRLKRTARRRYTRRKNRICYLQEIFSNEMAKVDDSFFHRLEESFLVEEDKKHERHPIFGNIVDEVAYHEKYPTIYHLRKKLVDSTDKADLRLIYLALAHMIKFRGHFLIEGDLNPDNSDVDKLFIQLVQTYNQLFEENPINASGVDAKAILSARLSKSRRLENLIAQLPGEKKNGLFGNLIALSLGLTPNFKSNFDLAEDAKLQLSKDTYDDDLDNLLAQIGDQYADLFLAAKNLSDAILLSDILRVNTEITKAPLSASMIKRYDEHHQDLTLLKALVRQQLPEKYKEIFFDQSKNGYAGYIDGGASQEEFYKFIKPILEKMDGTEELLVKLNREDLLRKQRTFDNGSIPHQIHLGELHAILRRQEDFYPFLKDNREKIEKILTFRIPYYVGPLARGNSRFAWMTRKSEETITPWNFEEVVDKGASAQSFIERMTNFDKNLPNEKVLPKHSLLYEYFTVYNELTKVKYVTEGMRKPAFLSGEQKKAIVDLLFKTNRKVTVKQLKEDYFKKIECFDSVEISGVEDRFNASLGTYHDLLKIIKDKDFLDNEENEDILEDIVLTLTLFEDREMIEERLKTYAHLFDDKVMKQLKRRRYTGWGRLSRKLINGIRDKQSGKTILDFLKSDGFANRNFMQLIHDDSLTFKEDIQKAQVSGQGDSLHEHIANLAGSPAIKKGILQTVKVVDELVKVMGRHKPENIVIEMARENQTTQKGQKNSRERMKRIEEGIKELGSQILKEHPVENTQLQNEKLYLYYLQNGRDMYVDQELDINRLSDYDVDHIVPQSFLKDDSIDNKVLTRSDKARGKSDNVPSEEVVKKMKNYWRQLLNAKLITQRKFDNLTKAERGGLSELDKAGFIKRQLVETRQITKHVAQILDSRMNTKYDENDKLIREVKVITLKSKLVSDFRKDFQFYKVREINNYHHAHDAYLNAVVGTALIKKYPKLESEFVYGDYKVYDVRKMIAKSEQEIGKATAKYFFYSNIMNFFKTEITLANGEIRKRPLIETNGETGEIVWDKGRDFATVRKVLSMPQVNIVKKTEVQTGGFSKESILPKRNSDKLIARKKDWDPKKYGGFDSPTVAYSVLVVAKVEKGKSKKLKSVKELLGITIMERSSFEKNPIDFLEAKGYKEVKKDLIIKLPKYSLFELENGRKRMLASAGELQKGNELALPSKYVNFLYLASHYEKLKGSPEDNEQKQLFVEQHKHYLDEIIEQISEFSKRVILADANLDKVLSAYNKHRDKPIREQAENIIHLFTLTNLGAPAAFKYFDTTIDRKRYTSTKEVLDATLIHQSITGLYETRIDLSQLGGDGGGGSGSSGGVPWLMKKPLQLTVLVPLHEYQERLLQQTALPKEQKELLQKLFLKYDALWQHWENQVGHRRIKPHNIATGTLAPRPQKQYPINPKAKPSIQIVIDDLLKQGVLIQQNSTMNTPVYPVPKPDGKWRMVLDYREVNKTIPLIAAQNQHSAGILSSIYRGKYKTTLDLTNGFWAHPITPESYWLTAFTWQGKQYCWTRLPQGFLNSPALFNADVVDLLKEIPNVQAYVDDIYISHDDPQEHLEQLEKIFSILLNAGYVVSLKKSEIAQREVEFLGFNITKEGRGLTDTFKQKLLNITPPKDLKQLQSILGLLNFARNFIPNYSELVKPLYTIVAPANGKFISWTEDNSNQLQHIISVLNQADNLEERNPETRLIIKVNSSPSAGYIRYYNEGSKRPIMYVNYIFSKAEAKFTQTEKLLTTMHKGLIKAMDLAMGQEILVYSPIVSMTKIQRTPLPERKALPVRWITWMTYLEDPRIQFHYDKSLPELQQIPNVTEDVIAKTKHPSEFAMVFYTDGSAIKHPDVNKSHSAGMGIAQVQFIPEYKIVHQWSIPLGDHTAQLAEIAAVEFACKKALKISGPVLIVTDSFYVAESANKELPYWKSNGFLNNKKKPLRHVSKWKSIAECLQLKPDIIIMHEKGHQQPMTTLHTEGNNLADKLATQGSYVVHAGKRTADGSEFEKRTADGSEFESPKKKAKVE

SEQ ID NO: 6609 - protein, 2082 aa, synthetic construct
MPAAKRVKLDGGDKKYSIGLDIGTNSVGWAVITDEYKVPSKKFKVLGNTDRHSIKKNLIGALLFDSGETAEATRLKRTARRRYTRRKNRICYLQEIFSNEMAKVDDSFFHRLEESFLVEEDKKHERHPIFGNIVDEVAYHEKYPTIYHLRKKLVDSTDKADLRLIYLALAHMIKFRGHFLIEGDLNPDNSDVDKLFIQLVQTYNQLFEENPINASGVDAKAILSARLSKSRRLENLIAQLPGEKKNGLFGNLIALSLGLTPNFKSNFDLAEDAKLQLSKDTYDDDLDNLLAQIGDQYADLFLAAKNLSDAILLSDILRVNTEITKAPLSASMIKRYDEHHQDLTLLKALVRQQLPEKYKEIFFDQSKNGYAGYIDGGASQEEFYKFIKPILEKMDGTEELLVKLNREDLLRKQRTFDNGSIPHQIHLGELHAILRRQEDFYPFLKDNREKIEKILTFRIPYYVGPLARGNSRFAWMTRKSEETITPWNFEEVVDKGASAQSFIERMTNFDKNLPNEKVLPKHSLLYEYFTVYNELTKVKYVTEGMRKPAFLSGEQKKAIVDLLFKTNRKVTVKQLKEDYFKKIECFDSVEISGVEDRFNASLGTYHDLLKIIKDKDFLDNEENEDILEDIVLTLTLFEDREMIEERLKTYAHLFDDKVMKQLKRRRYTGWGRLSRKLINGIRDKQSGKTILDFLKSDGFANRNFMQLIHDDSLTFKEDIQKAQVSGQGDSLHEHIANLAGSPAIKKGILQTVKVVDELVKVMGRHKPENIVIEMARENQTTQKGQKNSRERMKRIEEGIKELGSQILKEHPVENTQLQNEKLYLYYLQNGRDMYVDQELDINRLSDYDVDHIVPQSFLKDDSIDNKVLTRSDKARGKSDNVPSEEVVKKMKNYWRQLLNAKLITQRKFDNLTKAERGGLSELDKAGFIKRQLVETRQITKHVAQILDSRMNTKYDENDKLIREVKVITLKSKLVSDFRKDFQFYKVREINNYHHAHDAYLNAVVGTALIKKYPKLESEFVYGDYKVYDVRKMIAKSEQEIGKATAKYFFYSNIMNFFKTEITLANGEIRKRPLIETNGETGEIVWDKGRDFATVRKVLSMPQVNIVKKTEVQTGGFSKESILPKRNSDKLIARKKDWDPKKYGGFDSPTVAYSVLVVAKVEKGKSKKLKSVKELLGITIMERSSFEKNPIDFLEAKGYKEVKKDLIIKLPKYSLFELENGRKRMLASAGELQKGNELALPSKYVNFLYLASHYEKLKGSPEDNEQKQLFVEQHKHYLDEIIEQISEFSKRVILADANLDKVLSAYNKHRDKPIREQAENIIHLFTLTNLGAPAAFKYFDTTIDRKRYTSTKEVLDATLIHQSITGLYETRIDLSQLGGDGGGGSGSSGGIPWLMKKPLQLTTLVPLQEYEERLLKQTMLTGSYKEKLQSLFLKYDALWQHWENQVGHRRIKPHHIATGTVNPRPQKQYPINPKAKASIQTVINDLLKQGVLIQQNSIMNTPVYPVPKPDGKWRMVLDYREVNKTIPLIAAQNQHSAGILSSIFRGKYKTTLDLSNGFWAHSITPESYWLTAFTWLGQQYCWTRLPQGFLNSPALFNADVVDLLKEVPNVQVYVDDIYISHDDPREHLEQLEKVFSLLLNAGYVVSLKKSEIAQHEVEFLGFNITKEGRGLTETFKQKLLNITPPRDLKQLQSILGLLNFARNFIPNFSELVKPLYNIIATAPGKYITWTTDNSQQLQNIISMLNSAENLEERNPEVRLIMKVNTSPSAGYIRFYNEFAKRPIMYLNYVYTKAEVKFTNTEKLLTTIHKGLIKALDLGMGQEILVYSPIVSMTKIQKTPLPERKALPIRWITWMSYLEDPRIQFHYDKTLPELQQVPTVTDDIIAKIKHPSEFSMVFYTDGSAIKHPNVNKSHNAGMGIAQVQFKPEFTVINTWSIPLGDHTAQLAEVAAVEFACKKALKIDGPVLIVTDSFYVAESVNKELPYWQSNGFFNNKKKPLKHVSKWKSIADCIQLKPDIIIIHEKGHQPTASTFHTEGNNLADKLATQGSYVVNAGKRTADGSEFEKRTADGSEFESPKKKAKVE

SEQ ID NO: 6610 - protein, 2082 aa, synthetic construct
MPAAKRVKLDGGDKKYSIGLDIGTNSVGWAVITDEYKVPSKKFKVLGNTDRHSIKKNLIGALLFDSGETAEATRLKRTARRRYTRRKNRICYLQEIFSNEMAKVDDSFFHRLEESFLVEEDKKHERHPIFGNIVDEVAYHEKYPTIYHLRKKLVDSTDKADLRLIYLALAHMIKFRGHFLIEGDLNPDNSDVDKLFIQLVQTYNQLFEENPINASGVDAKAILSARLSKSRRLENLIAQLPGEKKNGLFGNLIALSLGLTPNFKSNFDLAEDAKLQLSKDTYDDDLDNLLAQIGDQYADLFLAAKNLSDAILLSDILRVNTEITKAPLSASMIKRYDEHHQDLTLLKALVRQQLPEKYKEIFFDQSKNGYAGYIDGGASQEEFYKFIKPILEKMDGTEELLVKLNREDLLRKQRTFDNGSIPHQIHLGELHAILRRQEDFYPFLKDNREKIEKILTFRIPYYVGPLARGNSRFAWMTRKSEETITPWNFEEVVDKGASAQSFIERMTNFDKNLPNEKVLPKHSLLYEYFTVYNELTKVKYVTEGMRKPAFLSGEQKKAIVDLLFKTNRKVTVKQLKEDYFKKIECFDSVEISGVEDRFNASLGTYHDLLKIIKDKDFLDNEENEDILEDIVLTLTLFEDREMIEERLKTYAHLFDDKVMKQLKRRRYTGWGRLSRKLINGIRDKQSGKTILDFLKSDGFANRNFMQLIHDDSLTFKEDIQKAQVSGQGDSLHEHIANLAGSPAIKKGILQTVKVVDELVKVMGRHKPENIVIEMARENQTTQKGQKNSRERMKRIEEGIKELGSQILKEHPVENTQLQNEKLYLYYLQNGRDMYVDQELDINRLSDYDVDHIVPQSFLKDDSIDNKVLTRSDKARGKSDNVPSEEVVKKMKNYWRQLLNAKLITQRKFDNLTKAERGGLSELDKAGFIKRQLVETRQITKHVAQILDSRMNTKYDENDKLIREVKVITLKSKLVSDFRKDFQFYKVREINNYHHAHDAYLNAVVGTALIKKYPKLESEFVYGDYKVYDVRKMIAKSEQEIGKATAKYFFYSNIMNFFKTEITLANGEIRKRPLIETNGETGEIVWDKGRDFATVRKVLSMPQVNIVKKTEVQTGGFSKESILPKRNSDKLIARKKDWDPKKYGGFDSPTVAYSVLVVAKVEKGKSKKLKSVKELLGITIMERSSFEKNPIDFLEAKGYKEVKKDLIIKLPKYSLFELENGRKRMLASAGELQKGNELALPSKYVNFLYLASHYEKLKGSPEDNEQKQLFVEQHKHYLDEIIEQISEFSKRVILADANLDKVLSAYNKHRDKPIREQAENIIHLFTLTNLGAPAAFKYFDTTIDRKRYTSTKEVLDATLIHQSITGLYETRIDLSQLGGDGGGGSGSSGGIPWLMKKPLQLTTLVPLQEYEERLLKQTMLTGSYKEKLQSLFLKYDALWQHWENQVGHRRIKPHHIATGTVNPRPQKQYPINPKAKASIQTVINDLLKQGVLIQQNSIMNTPVYPVPKPDGKWRMVLDYREVNKTIPLIAAQNQHSAGILSSIFRGKYKTTLDLSNGFWAHSITPESYWLTAFTWLGQQYCWTRLPQGFLNSPALFNADVVDLLKEVPNVQVYVDDIYISHDDPREHLEQLEKVFSLLLNAGYVVSLKKSEIAQHEVEFLGFNITKEGRGLTETFKQKLLNITPPRDLKQLQSILGKLNFARNFIPNFSELVKPLYNIIATAPGKYITWTTDNSQQLQNIISMLNSAENLEERNPEVRLIMKVNTSPSAGYIRFYNEFAKRPIMYLNYVYTKAEVKFTNTEKLLTTIHKGLIKALDLGMGQEILVYSPIVSMTKIQKTPLPERKALPIRWITWMSYLEDPRIQFHYDKTLPELQQVPTVTDDIIAKIKHPSEFSMVFYTDGSAIKHPNVNKSHNAGMGIAQVQFKPEFTVINTWSIPLGDHTAQLAEVAAVEFACKKALKIDGPVLIVTDSFYVAESVNKELPYWQSNGFFNNKKKPLKHVSKWKSIADCIQLKPDIIIIHEKGHQPTASTFHTEGNNLADKLATQGSYVVNAGKRTADGSEFEKRTADGSEFESPKKKAKVE

SEQ ID NO: 6611 - protein, 2089 aa, synthetic construct
MPAAKRVKLDGGDKKYSIGLDIGTNSVGWAVITDEYKVPSKKFKVLGNTDRHSIKKNLIGALLFDSGETAEATRLKRTARRRYTRRKNRICYLQEIFSNEMAKVDDSFFHRLEESFLVEEDKKHERHPIFGNIVDEVAYHEKYPTIYHLRKKLVDSTDKADLRLIYLALAHMIKFRGHFLIEGDLNPDNSDVDKLFIQLVQTYNQLFEENPINASGVDAKAILSARLSKSRRLENLIAQLPGEKKNGLFGNLIALSLGLTPNFKSNFDLAEDAKLQLSKDTYDDDLDNLLAQIGDQYADLFLAAKNLSDAILLSDILRVNTEITKAPLSASMIKRYDEHHQDLTLLKALVRQQLPEKYKEIFFDQSKNGYAGYIDGGASQEEFYKFIKPILEKMDGTEELLVKLNREDLLRKQRTFDNGSIPHQIHLGELHAILRRQEDFYPFLKDNREKIEKILTFRIPYYVGPLARGNSRFAWMTRKSEETITPWNFEEVVDKGASAQSFIERMTNFDKNLPNEKVLPKHSLLYEYFTVYNELTKVKYVTEGMRKPAFLSGEQKKAIVDLLFKTNRKVTVKQLKEDYFKKIECFDSVEISGVEDRFNASLGTYHDLLKIIKDKDFLDNEENEDILEDIVLTLTLFEDREMIEERLKTYAHLFDDKVMKQLKRRRYTGWGRLSRKLINGIRDKQSGKTILDFLKSDGFANRNFMQLIHDDSLTFKEDIQKAQVSGQGDSLHEHIANLAGSPAIKKGILQTVKVVDELVKVMGRHKPENIVIEMARENQTTQKGQKNSRERMKRIEEGIKELGSQILKEHPVENTQLQNEKLYLYYLQNGRDMYVDQELDINRLSDYDVDHIVPQSFLKDDSIDNKVLTRSDKARGKSDNVPSEEVVKKMKNYWRQLLNAKLITQRKFDNLTKAERGGLSELDKAGFIKRQLVETRQITKHVAQILDSRMNTKYDENDKLIREVKVITLKSKLVSDFRKDFQFYKVREINNYHHAHDAYLNAVVGTALIKKYPKLESEFVYGDYKVYDVRKMIAKSEQEIGKATAKYFFYSNIMNFFKTEITLANGEIRKRPLIETNGETGEIVWDKGRDFATVRKVLSMPQVNIVKKTEVQTGGFSKESILPKRNSDKLIARKKDWDPKKYGGFDSPTVAYSVLVVAKVEKGKSKKLKSVKELLGITIMERSSFEKNPIDFLEAKGYKEVKKDLIIKLPKYSLFELENGRKRMLASAGELQKGNELALPSKYVNFLYLASHYEKLKGSPEDNEQKQLFVEQHKHYLDEIIEQISEFSKRVILADANLDKVLSAYNKHRDKPIREQAENIIHLFTLTNLGAPAAFKYFDTTIDRKRYTSTKEVLDATLIHQSITGLYETRIDLSQLGGDGGGGSGSSGGVLNLEEEYRLHEKPVPSSIDPSWLQLFPTVWAERAGMGLANQVPPVVVELRSGASPVAVRQYPMSKEAREGIRPHIQRFLDLGVLVPCQSPWNTPLLPVKKPGTNDYRPVQDLREINKRVQDIHPTVPNPYNLLSSLPPSHTWYSVLDLKDAFFCLKLHPNSQPLFAFEWRDPEKGNTGQLTWTRLPQGFKNSPTLFNEALHRDLAPFRALNPQVVLLQYVDDLLVAAPTYRDCKEGTQKLLQELSKLGYRVSAKKAQLCQKEVTYLGYLLKEGKRWLTPARKATVMKIPPPTTPRQVREFLGTAGFCRLWIPGFASLAAPLYPLTKPSIPFIWTEEHQKAFDRIKEALLSAPALALPDLTKPFTLYVDERAGVARGVLTQTLGPWRRPVAYLSKKLDPVASGWPTCLKAVAAVALLLKDADKLTLGQNVTVIASHSLESIVRQPPDRWMTNARMTHYQSLLLNERVSFAPPAVLNPATLLPVESEATPVHRCSEILAEETGTRRDLKDQPLPGVPAWYTDGSSFIAEGKRRAGAAIVDGKRTVWASSLPEGTSAQKAELVALTQALRLAEGKDINIYTDSRYAFATAHIHGAIYKQRGWLTSAGKDIKNKEEILALLEAIHLPKRVAIIHCPGHQKGNDPVATGNRRADEAAKQAALSTRVLAETTKPAGKRTADGSEFEKRTADGSEFESPKKKAKVE

SEQ ID NO: 6612 - protein, 2091 aa, synthetic construct
MPAAKRVKLDGGDKKYSIGLDIGTNSVGWAVITDEYKVPSKKFKVLGNTDRHSIKKNLIGALLFDSGETAEATRLKRTARRRYTRRKNRICYLQEIFSNEMAKVDDSFFHRLEESFLVEEDKKHERHPIFGNIVDEVAYHEKYPTIYHLRKKLVDSTDKADLRLIYLALAHMIKFRGHFLIEGDLNPDNSDVDKLFIQLVQTYNQLFEENPINASGVDAKAILSARLSKSRRLENLIAQLPGEKKNGLFGNLIALSLGLTPNFKSNFDLAEDAKLQLSKDTYDDDLDNLLAQIGDQYADLFLAAKNLSDAILLSDILRVNTEITKAPLSASMIKRYDEHHQDLTLLKALVRQQLPEKYKEIFFDQSKNGYAGYIDGGASQEEFYKFIKPILEKMDGTEELLVKLNREDLLRKQRTFDNGSIPHQIHLGELHAILRRQEDFYPFLKDNREKIEKILTFRIPYYVGPLARGNSRFAWMTRKSEETITPWNFEEVVDKGASAQSFIERMTNFDKNLPNEKVLPKHSLLYEYFTVYNELTKVKYVTEGMRKPAFLSGEQKKAIVDLLFKTNRKVTVKQLKEDYFKKIECFDSVEISGVEDRFNASLGTYHDLLKIIKDKDFLDNEENEDILEDIVLTLTLFEDREMIEERLKTYAHLFDDKVMKQLKRRRYTGWGRLSRKLINGIRDKQSGKTILDFLKSDGFANRNFMQLIHDDSLTFKEDIQKAQVSGQGDSLHEHIANLAGSPAIKKGILQTVKVVDELVKVMGRHKPENIVIEMARENQTTQKGQKNSRERMKRIEEGIKELGSQILKEHPVENTQLQNEKLYLYYLQNGRDMYVDQELDINRLSDYDVDHIVPQSFLKDDSIDNKVLTRSDKARGKSDNVPSEEVVKKMKNYWRQLLNAKLITQRKFDNLTKAERGGLSELDKAGFIKRQLVETRQITKHVAQILDSRMNTKYDENDKLIREVKVITLKSKLVSDFRKDFQFYKVREINNYHHAHDAYLNAVVGTALIKKYPKLESEFVYGDYKVYDVRKMIAKSEQEIGKATAKYFFYSNIMNFFKTEITLANGEIRKRPLIETNGETGEIVWDKGRDFATVRKVLSMPQVNIVKKTEVQTGGFSKESILPKRNSDKLIARKKDWDPKKYGGFDSPTVAYSVLVVAKVEKGKSKKLKSVKELLGITIMERSSFEKNPIDFLEAKGYKEVKKDLIIKLPKYSLFELENGRKRMLASAGELQKGNELALPSKYVNFLYLASHYEKLKGSPEDNEQKQLFVEQHKHYLDEIIEQISEFSKRVILADANLDKVLSAYNKHRDKPIREQAENIIHLFTLTNLGAPAAFKYFDTTIDRKRYTSTKEVLDATLIHQSITGLYETRIDLSQLGGDGGGGSGSSGGTLNIEDEYRLHETSKEPDVPLGSTWLSDFPQAWAETGGMGLAVRQAPLIIPLKATSTPVSIKQYPMSQEARLGIKPHIQRLLDQGILVPCQSPWNTPLLPVKKPGTNDYRPVQDLREVNKRVEDIHPTVPNPYNLLSGLPPSHQWYTVLDLKDAFFCLRLHPTSQPLFAFEWRDPEMGISGQLTWTRLPQGFKNSPTLFNEALHRDLADFRIQHPDLILLQYVDDLLLAATSEQDCQRGTRALLQTLGNLGYRASAKKAQICQKQVKYLGYLLKEGQRWLTEARKETVMGQPTPKTPRQLREFLGTAGFCRLWIPGFAEMAAPLYPLTKPGTLFNWGPDQQKAYQEIKQALLTAPALGLPDLTKPFELFVDEKQGYAKGVLTQKLGPWRRPVAYLSKKLDPVAAGWPPCLRMVAAIAVLTKDAGKLTMGQPLVILAPHAVEALVKQPPDRWLSNARMTHYQAMLLDTDRVQFGPVVALNPATLLPLPEKEAPHDCLEILAETHGTRPDLTDQPIPDADYTWYTDGSSFLQEGQRRAGAAVTTETEVIWARALPAGTSAQRAELIALTQALKMAEGKKLNVYTDSRYAFATAHVHGEIYRRRGWLTSEGREIKNKNEILALLKALFLPKRLSIIHCPGHQKGNSAEARGNRMADQAAREAAMKAVLETSTLLAGKRTADGSEFEKRTADGSEFESPKKKAKVE

SEQ ID NO: 6613 - protein, 2093 aa, synthetic construct
MPAAKRVKLDGGDKKYSIGLDIGTNSVGWAVITDEYKVPSKKFKVLGNTDRHSIKKNLIGALLFDSGETAEATRLKRTARRRYTRRKNRICYLQEIFSNEMAKVDDSFFHRLEESFLVEEDKKHERHPIFGNIVDEVAYHEKYPTIYHLRKKLVDSTDKADLRLIYLALAHMIKFRGHFLIEGDLNPDNSDVDKLFIQLVQTYNQLFEENPINASGVDAKAILSARLSKSRRLENLIAQLPGEKKNGLFGNLIALSLGLTPNFKSNFDLAEDAKLQLSKDTYDDDLDNLLAQIGDQYADLFLAAKNLSDAILLSDILRVNTEITKAPLSASMIKRYDEHHQDLTLLKALVRQQLPEKYKEIFFDQSKNGYAGYIDGGASQEEFYKFIKPILEKMDGTEELLVKLNREDLLRKQRTFDNGSIPHQIHLGELHAILRRQEDFYPFLKDNREKIEKILTFRIPYYVGPLARGNSRFAWMTRKSEETITPWNFEEVVDKGASAQSFIERMTNFDKNLPNEKVLPKHSLLYEYFTVYNELTKVKYVTEGMRKPAFLSGEQKKAIVDLLFKTNRKVTVKQLKEDYFKKIECFDSVEISGVEDRFNASLGTYHDLLKIIKDKDFLDNEENEDILEDIVLTLTLFEDREMIEERLKTYAHLFDDKVMKQLKRRRYTGWGRLSRKLINGIRDKQSGKTILDFLKSDGFANRNFMQLIHDDSLTFKEDIQKAQVSGQGDSLHEHIANLAGSPAIKKGILQTVKVVDELVKVMGRHKPENIVIEMARENQTTQKGQKNSRERMKRIEEGIKELGSQILKEHPVENTQLQNEKLYLYYLQNGRDMYVDQELDINRLSDYDVDHIVPQSFLKDDSIDNKVLTRSDKARGKSDNVPSEEVVKKMKNYWRQLLNAKLITQRKFDNLTKAERGGLSELDKAGFIKRQLVETRQITKHVAQILDSRMNTKYDENDKLIREVKVITLKSKLVSDFRKDFQFYKVREINNYHHAHDAYLNAVVGTALIKKYPKLESEFVYGDYKVYDVRKMIAKSEQEIGKATAKYFFYSNIMNFFKTEITLANGEIRKRPLIETNGETGEIVWDKGRDFATVRKVLSMPQVNIVKKTEVQTGGFSKESILPKRNSDKLIARKKDWDPKKYGGFDSPTVAYSVLVVAKVEKGKSKKLKSVKELLGITIMERSSFEKNPIDFLEAKGYKEVKKDLIIKLPKYSLFELENGRKRMLASAGELQKGNELALPSKYVNFLYLASHYEKLKGSPEDNEQKQLFVEQHKHYLDEIIEQISEFSKRVILADANLDKVLSAYNKHRDKPIREQAENIIHLFTLTNLGAPAAFKYFDTTIDRKRYTSTKEVLDATLIHQSITGLYETRIDLSQLGGDGGGSSGGSGGTAPLEEEYRLFLEAPIQNVTLLEQWKREIPKVWAEINPPGLASTQAPIHVQLLSTALPVRVRQYPITLEAKRSLRETIRKFRAAGILRPVHSPWNTPLLPVRKSGTSEYRMVQDLREVNKRVETIHPTVPNPYTLLSLLPPDRIWYSVLDLKDAFFCIPLAPESQLIFAFEWADAEEGESGQLTWTRLPQGFKNSPTLFDEALNRDLQGFRLDHPSVSLLQYVDDLLIAADTQAACLSATRDLLMTLAELGYRVSGKKAQLCQEEVTYLGFKIHKGSRSLSNSRTQAILQIPVPKTKRQVREFLGTIGYCRLWIPGFAELAQPLYAATRGGNDPLVWGEKEEEAFQSLKLALTQPPALALPSLDKPFQLFVEETSGAAKGVLTQALGPWKRPVAYLSKRLDPVAAGWPRCLRAIAAAALLTREASKLTFGQDIEITSSHNLESLLRSPPDKWLTNARITQYQVLLLDPPRVRFKQTAALNPATLLPETDDTLPIHHCLDTLDSLTSTRPDLTDQPLAQAEATLFTDGSSYIRDGKRYAGAAVVTLDSVIWAEPLPIGTSAQKAELIALTKALEWSKDKSVNIYTDSRYAFATLHVHGMIYRERGLLTAGGKAIKNAPEILALLTAVWLPKRVAVMHCKGHQKDDAPTSTGNRRADEVAREVAIRPLSTQATISAGKRTADGSEFEKRTADGSEFESPKKKAKVE

SEQ ID NO: 6614 - protein, 2097 aa, synthetic construct
MPAAKRVKLDGGDKKYSIGLDIGTNSVGWAVITDEYKVPSKKFKVLGNTDRHSIKKNLIGALLFDSGETAEATRLKRTARRRYTRRKNRICYLQEIFSNEMAKVDDSFFHRLEESFLVEEDKKHERHPIFGNIVDEVAYHEKYPTIYHLRKKLVDSTDKADLRLIYLALAHMIKFRGHFLIEGDLNPDNSDVDKLFIQLVQTYNQLFEENPINASGVDAKAILSARLSKSRRLENLIAQLPGEKKNGLFGNLIALSLGLTPNFKSNFDLAEDAKLQLSKDTYDDDLDNLLAQIGDQYADLFLAAKNLSDAILLSDILRVNTEITKAPLSASMIKRYDEHHQDLTLLKALVRQQLPEKYKEIFFDQSKNGYAGYIDGGASQEEFYKFIKPILEKMDGTEELLVKLNREDLLRKQRTFDNGSIPHQIHLGELHAILRRQEDFYPFLKDNREKIEKILTFRIPYYVGPLARGNSRFAWMTRKSEETITPWNFEEVVDKGASAQSFIERMTNFDKNLPNEKVLPKHSLLYEYFTVYNELTKVKYVTEGMRKPAFLSGEQKKAIVDLLFKTNRKVTVKQLKEDYFKKIECFDSVEISGVEDRFNASLGTYHDLLKIIKDKDFLDNEENEDILEDIVLTLTLFEDREMIEERLKTYAHLFDDKVMKQLKRRRYTGWGRLSRKLINGIRDKQSGKTILDFLKSDGFANRNFMQLIHDDSLTFKEDIQKAQVSGQGDSLHEHIANLAGSPAIKKGILQTVKVVDELVKVMGRHKPENIVIEMARENQTTQKGQKNSRERMKRIEEGIKELGSQILKEHPVENTQLQNEKLYLYYLQNGRDMYVDQELDINRLSDYDVDHIVPQSFLKDDSIDNKVLTRSDKARGKSDNVPSEEVVKKMKNYWRQLLNAKLITQRKFDNLTKAERGGLSELDKAGFIKRQLVETRQITKHVAQILDSRMNTKYDENDKLIREVKVITLKSKLVSDFRKDFQFYKVREINNYHHAHDAYLNAVVGTALIKKYPKLESEFVYGDYKVYDVRKMIAKSEQEIGKATAKYFFYSNIMNFFKTEITLANGEIRKRPLIETNGETGEIVWDKGRDFATVRKVLSMPQVNIVKKTEVQTGGFSKESILPKRNSDKLIARKKDWDPKKYGGFDSPTVAYSVLVVAKVEKGKSKKLKSVKELLGITIMERSSFEKNPIDFLEAKGYKEVKKDLIIKLPKYSLFELENGRKRMLASAGELQKGNELALPSKYVNFLYLASHYEKLKGSPEDNEQKQLFVEQHKHYLDEIIEQISEFSKRVILADANLDKVLSAYNKHRDKPIREQAENIIHLFTLTNLGAPAAFKYFDTTIDRKRYTSTKEVLDATLIHQSITGLYETRIDLSQLGGDGGGSSGGSGGTVSLQDEHRLFDIPVTTSLPDVWLQDFPQAWAETGGLGRAKCQAPIIIDLKPTAVPVSIKQYPMSLEAHMGIRQHIIKFLELGVLRPCRSPWNTPLLPVKKPGTQDYRPVQDLREINKRTVDIHPTVPNPYNLLSTLKPDYSWYTVLDLKDAFFCLPLAPQSQELFAFEWKDPERGISGQLTWTRLPQGFKNSPTLFNEALHRDLTDFRTQHPEVTLLQYVDDLLLAAPTKKACTQGTRHLLQELGEKGYRASAKKAQICQTKVTYLGYILSEGKRWLTPGRIETVARIPPPRNPREVREFLGTAGFCRLWIPGFAELAAPLYALTKPSTPFTWQTEHQLAFEALKKALLSAPALGLPDTSKPFTLFLDERQGIAKGVLTQKLGPWKRPVAYLSKKLDPVAAGWPPCLRIMAATAMLVKDSAKLTLGQPLTVITPHTLEAIVRQPPDRWITNARLTHYQALLLDTDRVQFGPPVTLNPATLLPVPENQPSPHDCRQVLAETHGTREDLKDQELPDADHTWYTDGSSYLDSGTRRAGAAVVDGHNTIWAQSLPPGTSAQKAELIALTKALELSKGKKANIYTDSRYAFATAHTHGSIYERRGWLTSEGKEIKNKAEIIALLKALFLPQEVAIIHCPGHQKGQDPVAVGNRQADRVARQAAMAEVLTLATEPDNTSHITAGKRTADGSEFEKRTADGSEFESPKKKAKVE

SEQ ID NO: 6615 - protein, 2090 aa, synthetic construct
MPAAKRVKLDGGDKKYSIGLDIGTNSVGWAVITDEYKVPSKKFKVLGNTDRHSIKKNLIGALLFDSGETAEATRLKRTARRRYTRRKNRICYLQEIFSNEMAKVDDSFFHRLEESFLVEEDKKHERHPIFGNIVDEVAYHEKYPTIYHLRKKLVDSTDKADLRLIYLALAHMIKFRGHFLIEGDLNPDNSDVDKLFIQLVQTYNQLFEENPINASGVDAKAILSARLSKSRRLENLIAQLPGEKKNGLFGNLIALSLGLTPNFKSNFDLAEDAKLQLSKDTYDDDLDNLLAQIGDQYADLFLAAKNLSDAILLSDILRVNTEITKAPLSASMIKRYDEHHQDLTLLKALVRQQLPEKYKEIFFDQSKNGYAGYIDGGASQEEFYKFIKPILEKMDGTEELLVKLNREDLLRKQRTFDNGSIPHQIHLGELHAILRRQEDFYPFLKDNREKIEKILTFRIPYYVGPLARGNSRFAWMTRKSEETITPWNFEEVVDKGASAQSFIERMTNFDKNLPNEKVLPKHSLLYEYFTVYNELTKVKYVTEGMRKPAFLSGEQKKAIVDLLFKTNRKVTVKQLKEDYFKKIECFDSVEISGVEDRFNASLGTYHDLLKIIKDKDFLDNEENEDILEDIVLTLTLFEDREMIEERLKTYAHLFDDKVMKQLKRRRYTGWGRLSRKLINGIRDKQSGKTILDFLKSDGFANRNFMQLIHDDSLTFKEDIQKAQVSGQGDSLHEHIANLAGSPAIKKGILQTVKVVDELVKVMGRHKPENIVIEMARENQTTQKGQKNSRERMKRIEEGIKELGSQILKEHPVENTQLQNEKLYLYYLQNGRDMYVDQELDINRLSDYDVDHIVPQSFLKDDSIDNKVLTRSDKARGKSDNVPSEEVVKKMKNYWRQLLNAKLITQRKFDNLTKAERGGLSELDKAGFIKRQLVETRQITKHVAQILDSRMNTKYDENDKLIREVKVITLKSKLVSDFRKDFQFYKVREINNYHHAHDAYLNAVVGTALIKKYPKLESEFVYGDYKVYDVRKMIAKSEQEIGKATAKYFFYSNIMNFFKTEITLANGEIRKRPLIETNGETGEIVWDKGRDFATVRKVLSMPQVNIVKKTEVQTGGFSKESILPKRNSDKLIARKKDWDPKKYGGFDSPTVAYSVLVVAKVEKGKSKKLKSVKELLGITIMERSSFEKNPIDFLEAKGYKEVKKDLIIKLPKYSLFELENGRKRMLASAGELQKGNELALPSKYVNFLYLASHYEKLKGSPEDNEQKQLFVEQHKHYLDEIIEQISEFSKRVILADANLDKVLSAYNKHRDKPIREQAENIIHLFTLTNLGAPAAFKYFDTTIDRKRYTSTKEVLDATLIHQSITGLYETRIDLSQLGGDGGGSSGGSGGTLQLEEEYRLFEPESTQKQEMDIWLKNFPQAWAETGGMGTAHCQAPVLIQLKATATPISIRQYPMPHEAYQGIKPHIRRMLDQGILKPCQSPWNTPLLPVKKPGTEDYRPVQDLREVNKRVEDIHPTVPNPYNLLSTLPPSHPWYTVLDLKDAFFCLRLHSESQLLFAFEWRDPEIGLSGQLTWTRLPQGFKNSPTLFNEALHSDLADFRVRYPALVLLQYVDDLLLAAATRTECLEGTKALLETLGNKGYRASAKKAQICLQEVTYLGYSLKDGQRWLTKARKEAILSIPVPKNSRQVREFLGKAGYCRLFIPGFAELAAPLYPLTRPGTLFQWGTEQQLAFEDIKKALLSSPALGLPDITKPFELFIDENSGFAKGVLVQKLGPWKRPVAYLSKKLDTVASGWPPCLRMVAAIAILVKDAGKLTLGQPLTILTSHPVEALVRQPPNKWLSNARMTHYQAMLLDAERVHFGPTVSLNPATLLPLPSGGNHHDCLQILAETHGTRPDLTDQPLPDADLTWYTDGSSFIRNGEREAGAAVTTESEVIWAAPLPPGTSAQRAELIALTQALKMAEGKKLTVYTDSRYAFATTHVHGEIYRRRGWLTSEGKEIKNKNEILALLEALFLPKRLSIIHCPGHQKGDSPQAKGNRLADDTAKKAATETHSSLTVLPAGKRTADGSEFEKRTADGSEFESPKKKAKVE

SEQ ID NO: 6616 - protein, 2213 aa, synthetic construct
MPAAKRVKLDGGDKKYSIGLDIGTNSVGWAVITDEYKVPSKKFKVLGNTDRHSIKKNLIGALLFDSGETAEATRLKRTARRRYTRRKNRICYLQEIFSNEMAKVDDSFFHRLEESFLVEEDKKHERHPIFGNIVDEVAYHEKYPTIYHLRKKLVDSTDKADLRLIYLALAHMIKFRGHFLIEGDLNPDNSDVDKLFIQLVQTYNQLFEENPINASGVDAKAILSARLSKSRRLENLIAQLPGEKKNGLFGNLIALSLGLTPNFKSNFDLAEDAKLQLSKDTYDDDLDNLLAQIGDQYADLFLAAKNLSDAILLSDILRVNTEITKAPLSASMIKRYDEHHQDLTLLKALVRQQLPEKYKEIFFDQSKNGYAGYIDGGASQEEFYKFIKPILEKMDGTEELLVKLNREDLLRKQRTFDNGSIPHQIHLGELHAILRRQEDFYPFLKDNREKIEKILTFRIPYYVGPLARGNSRFAWMTRKSEETITPWNFEEVVDKGASAQSFIERMTNFDKNLPNEKVLPKHSLLYEYFTVYNELTKVKYVTEGMRKPAFLSGEQKKAIVDLLFKTNRKVTVKQLKEDYFKKIECFDSVEISGVEDRFNASLGTYHDLLKIIKDKDFLDNEENEDILEDIVLTLTLFEDREMIEERLKTYAHLFDDKVMKQLKRRRYTGWGRLSRKLINGIRDKQSGKTILDFLKSDGFANRNFMQLIHDDSLTFKEDIQKAQVSGQGDSLHEHIANLAGSPAIKKGILQTVKVVDELVKVMGRHKPENIVIEMARENQTTQKGQKNSRERMKRIEEGIKELGSQILKEHPVENTQLQNEKLYLYYLQNGRDMYVDQELDINRLSDYDVDHIVPQSFLKDDSIDNKVLTRSDKARGKSDNVPSEEVVKKMKNYWRQLLNAKLITQRKFDNLTKAERGGLSELDKAGFIKRQLVETRQITKHVAQILDSRMNTKYDENDKLIREVKVITLKSKLVSDFRKDFQFYKVREINNYHHAHDAYLNAVVGTALIKKYPKLESEFVYGDYKVYDVRKMIAKSEQEIGKATAKYFFYSNIMNFFKTEITLANGEIRKRPLIETNGETGEIVWDKGRDFATVRKVLSMPQVNIVKKTEVQTGGFSKESILPKRNSDKLIARKKDWDPKKYGGFDSPTVAYSVLVVAKVEKGKSKKLKSVKELLGITIMERSSFEKNPIDFLEAKGYKEVKKDLIIKLPKYSLFELENGRKRMLASAGELQKGNELALPSKYVNFLYLASHYEKLKGSPEDNEQKQLFVEQHKHYLDEIIEQISEFSKRVILADANLDKVLSAYNKHRDKPIREQAENIIHLFTLTNLGAPAAFKYFDTTIDRKRYTSTKEVLDATLIHQSITGLYETRIDLSQLGGDGGGSSGGSGGTLGDQGSRGSDPLPEPRVTLTVEGIPTEFLVNTGAEHSVLTKPMGKMGSKRTVVAGATGSKVYPWTTKRLLKIGQKQVTHSFLVIPECPAPLLGRDLLTKLKAQIQFSTEGPQVTWEDRPAMCLVLNLEEEYRLHEKPVPPSIDPSWLQLFPMVWAEKAGMGLANQVPPVVVELKSDASPVAVRQYPMSKEAREGIRPHIQRFLDLGILVPCQSPWNTPLLPVKKPGTNDYRPVQDLREVNKRVQDIHPTVPNPYNLLSSLPPSHTWYSVLDLKDAFFCLKLHPNSQPLFAFEWRDPEKGNTGQLTWTRLPQGFKNSPTLFNEALHRDLASFRALNPQVVMLQYVDDLLVAAPTYRDCKEGTRRLLQELSKLGYRVSAKKAQLCREEVTYLGYLLKGGKRWLTPARKATVMKIPTPTTPRQVREFLGKAGFCRLFIPGFASLAAPLYPLTRPKVPFTWTEAHQEAFGRIKEALLSAPALALPDLTKPFALYVDEKEGVARGVLTQTLGPWRRPVAYLSKKLDPVASGWPTCLKAIAAVALLLKDADKLTLGQNVLVIAPHNLESIVRQPPDRWMTNARMTHYQSLLLNERVSFAPPAILNPATLLPVESDDTPIHICSEILAEETGTRPDLRDQPLPGVPAWYTDGSSFIMDGRRQAGAAIVDNKRTVWASNLPEGTSAQKAELIALTQALRLAEGKSINIYTDSRYAFATAHVHGAIYKQRGWLTSAGKDIKNKEEILALLEAIHLPKRVAIIHCPGHQRGTDPVATGNRKADEAAKQAAQSTRILTETTKNAGKRTADGSEFEKRTADGSEFESPKKKAKVE

SEQ ID NO: 6617 - protein, 2091 aa, synthetic construct
MPAAKRVKLDGGDKKYSIGLDIGTNSVGWAVITDEYKVPSKKFKVLGNTDRHSIKKNLIGALLFDSGETAEATRLKRTARRRYTRRKNRICYLQEIFSNEMAKVDDSFFHRLEESFLVEEDKKHERHPIFGNIVDEVAYHEKYPTIYHLRKKLVDSTDKADLRLIYLALAHMIKFRGHFLIEGDLNPDNSDVDKLFIQLVQTYNQLFEENPINASGVDAKAILSARLSKSRRLENLIAQLPGEKKNGLFGNLIALSLGLTPNFKSNFDLAEDAKLQLSKDTYDDDLDNLLAQIGDQYADLFLAAKNLSDAILLSDILRVNTEITKAPLSASMIKRYDEHHQDLTLLKALVRQQLPEKYKEIFFDQSKNGYAGYIDGGASQEEFYKFIKPILEKMDGTEELLVKLNREDLLRKQRTFDNGSIPHQIHLGELHAILRRQEDFYPFLKDNREKIEKILTFRIPYYVGPLARGNSRFAWMTRKSEETITPWNFEEVVDKGASAQSFIERMTNFDKNLPNEKVLPKHSLLYEYFTVYNELTKVKYVTEGMRKPAFLSGEQKKAIVDLLFKTNRKVTVKQLKEDYFKKIECFDSVEISGVEDRFNASLGTYHDLLKIIKDKDFLDNEENEDILEDIVLTLTLFEDREMIEERLKTYAHLFDDKVMKQLKRRRYTGWGRLSRKLINGIRDKQSGKTILDFLKSDGFANRNFMQLIHDDSLTFKEDIQKAQVSGQGDSLHEHIANLAGSPAIKKGILQTVKVVDELVKVMGRHKPENIVIEMARENQTTQKGQKNSRERMKRIEEGIKELGSQILKEHPVENTQLQNEKLYLYYLQNGRDMYVDQELDINRLSDYDVDHIVPQSFLKDDSIDNKVLTRSDKARGKSDNVPSEEVVKKMKNYWRQLLNAKLITQRKFDNLTKAERGGLSELDKAGFIKRQLVETRQITKHVAQILDSRMNTKYDENDKLIREVKVITLKSKLVSDFRKDFQFYKVREINNYHHAHDAYLNAVVGTALIKKYPKLESEFVYGDYKVYDVRKMIAKSEQEIGKATAKYFFYSNIMNFFKTEITLANGEIRKRPLIETNGETGEIVWDKGRDFATVRKVLSMPQVNIVKKTEVQTGGFSKESILPKRNSDKLIARKKDWDPKKYGGFDSPTVAYSVLVVAKVEKGKSKKLKSVKELLGITIMERSSFEKNPIDFLEAKGYKEVKKDLIIKLPKYSLFELENGRKRMLASAGELQKGNELALPSKYVNFLYLASHYEKLKGSPEDNEQKQLFVEQHKHYLDEIIEQISEFSKRVILADANLDKVLSAYNKHRDKPIREQAENIIHLFTLTNLGAPAAFKYFDTTIDRKRYTSTKEVLDATLIHQSITGLYETRIDLSQLGGDGGGSSGGSGGTLGIEDEYRLHETSTEPDVSLGSTWLSDFPQAWAETGGMGLAVRQAPLIIPLKATSTPVSIQQYPMSHEARLGIKPHIQRLLDQGILVPCQSPWNTPLLPVKKPGTNDYRPVQDLREVNKRVEDIHPTVPNPYNLLSGLPPSHQWYTVLDLKDAFFCLRLHPTSQPLFAFEWRDPGMGISGQLTWTRLPQGFKNSPTLFNEALHRDLADFRIQHPDLILLQYVDDILLAATSELDCQQGTRALLQTLGDLGYRASAKKAQICQKQVKYLGYLLREGQRWLTEARKETVMGQPVPKTPRQLREFLGTAGFCRLWIPGFAEMAAPLYPLTKPGTLFSWGPDQQKAYQEIKQALLTAPALGLPDLTKPFELFVDEKQGYAKGVLTQKLGPWRRPVAYLSKKLDPVAAGWPPCLRMVAAIAVLTKDAGKLTMGQPLVILAPHAVEALVKQPPDRWLSNARMTHYQAMLLDTDRVQFGPVVALNPATLLPLPEEGAPHDCLEILAETHGTRPDLTDQPIPDADHTWYTDGSSFLQEGQRKAGAAVTTETEVIWAGALPAGTSAQRAELIALTQALKMAEGKRLNVYTDSRYAFATAHIHGEIYRRRGWLTSEGREIKNKSEILALLKALFLPKRLSIIHCLGHQKGDSAEARGNRLADQAAREAAIKTPPDTSTLLAGKRTADGSEFEKRTADGSEFESPKKKAKVE

SEQ ID NO: 6618 - protein, 2091 aa, synthetic construct
MPAAKRVKLDGGDKKYSIGLDIGTNSVGWAVITDEYKVPSKKFKVLGNTDRHSIKKNLIGALLFDSGETAEATRLKRTARRRYTRRKNRICYLQEIFSNEMAKVDDSFFHRLEESFLVEEDKKHERHPIFGNIVDEVAYHEKYPTIYHLRKKLVDSTDKADLRLIYLALAHMIKFRGHFLIEGDLNPDNSDVDKLFIQLVQTYNQLFEENPINASGVDAKAILSARLSKSRRLENLIAQLPGEKKNGLFGNLIALSLGLTPNFKSNFDLAEDAKLQLSKDTYDDDLDNLLAQIGDQYADLFLAAKNLSDAILLSDILRVNTEITKAPLSASMIKRYDEHHQDLTLLKALVRQQLPEKYKEIFFDQSKNGYAGYIDGGASQEEFYKFIKPILEKMDGTEELLVKLNREDLLRKQRTFDNGSIPHQIHLGELHAILRRQEDFYPFLKDNREKIEKILTFRIPYYVGPLARGNSRFAWMTRKSEETITPWNFEEVVDKGASAQSFIERMTNFDKNLPNEKVLPKHSLLYEYFTVYNELTKVKYVTEGMRKPAFLSGEQKKAIVDLLFKTNRKVTVKQLKEDYFKKIECFDSVEISGVEDRFNASLGTYHDLLKIIKDKDFLDNEENEDILEDIVLTLTLFEDREMIEERLKTYAHLFDDKVMKQLKRRRYTGWGRLSRKLINGIRDKQSGKTILDFLKSDGFANRNFMQLIHDDSLTFKEDIQKAQVSGQGDSLHEHIANLAGSPAIKKGILQTVKVVDELVKVMGRHKPENIVIEMARENQTTQKGQKNSRERMKRIEEGIKELGSQILKEHPVENTQLQNEKLYLYYLQNGRDMYVDQELDINRLSDYDVDHIVPQSFLKDDSIDNKVLTRSDKARGKSDNVPSEEVVKKMKNYWRQLLNAKLITQRKFDNLTKAERGGLSELDKAGFIKRQLVETRQITKHVAQILDSRMNTKYDENDKLIREVKVITLKSKLVSDFRKDFQFYKVREINNYHHAHDAYLNAVVGTALIKKYPKLESEFVYGDYKVYDVRKMIAKSEQEIGKATAKYFFYSNIMNFFKTEITLANGEIRKRPLIETNGETGEIVWDKGRDFATVRKVLSMPQVNIVKKTEVQTGGFSKESILPKRNSDKLIARKKDWDPKKYGGFDSPTVAYSVLVVAKVEKGKSKKLKSVKELLGITIMERSSFEKNPIDFLEAKGYKEVKKDLIIKLPKYSLFELENGRKRMLASAGELQKGNELALPSKYVNFLYLASHYEKLKGSPEDNEQKQLFVEQHKHYLDEIIEQISEFSKRVILADANLDKVLSAYNKHRDKPIREQAENIIHLFTLTNLGAPAAFKYFDTTIDRKRYTSTKEVLDATLIHQSITGLYETRIDLSQLGGDGGGSSGGSGGTLNIEDEYRLHETSKEPDVSLGSTWLSDFPQAWAETGGMGLAVRQAPLIIPLKATSTPVSIKQYPMSQEARLGIKPHIQRLLDQGILVPCQSPWNTPLLPVKKPGTNDYRPVQDLREVNKRVEDIHPTVPNPYNLLSGLPPSHQWYTVLDLKDAFFCLRLHPTSQPLFAFEWRDPEMGISGQLTWTRLPQGFKNSPTLFNEALHRDLAGFRIQHPDLILLQYVDDLLLAATSELDCQQGTRALLQTLGDLGYRASAKKAQICQKQVKYLGYLLKEGQRWLTEARKETVMGQPIPKTPRQLREFLGTAGFCRLWIPGFAEMAAPLYPLTKPGTLFNWGPDQQKAFQEIKQALLTAPALGLPDLTKPFELFVDEKQGYAKGVLTQKLGPWRRPVAYLSKKLDPVAAGWPPCLRMVAAIAVLTKDAGKLTMGQPLVILAPHAVEALVKQPPDRWLSNARMTHYQALLLDTDRVQFGPVVALNPATLLPLPEEGLQHDCLDILAEAHGTRSDLMDQPLPDADHTWYTDGSSFLQEGQRKAGAAVTTETEVIWARALPAGTSAQRAELIALTQALKMAEGKKLNVYTDSRYAFATAHIHGEIYRRRGWLTSEGKEIKNKDEILALLKALFLPKRLSIIHCPGHQKGNSAEARGNRMADQAAREVATRETPETSTLLAGKRTADGSEFEKRTADGSEFESPKKKAKVE

SEQ ID NO: 6619 - protein, 2089 aa, synthetic construct
MPAAKRVKLDGGDKKYSIGLDIGTNSVGWAVITDEYKVPSKKFKVLGNTDRHSIKKNLIGALLFDSGETAEATRLKRTARRRYTRRKNRICYLQEIFSNEMAKVDDSFFHRLEESFLVEEDKKHERHPIFGNIVDEVAYHEKYPTIYHLRKKLVDSTDKADLRLIYLALAHMIKFRGHFLIEGDLNPDNSDVDKLFIQLVQTYNQLFEENPINASGVDAKAILSARLSKSRRLENLIAQLPGEKKNGLFGNLIALSLGLTPNFKSNFDLAEDAKLQLSKDTYDDDLDNLLAQIGDQYADLFLAAKNLSDAILLSDILRVNTEITKAPLSASMIKRYDEHHQDLTLLKALVRQQLPEKYKEIFFDQSKNGYAGYIDGGASQEEFYKFIKPILEKMDGTEELLVKLNREDLLRKQRTFDNGSIPHQIHLGELHAILRRQEDFYPFLKDNREKIEKILTFRIPYYVGPLARGNSRFAWMTRKSEETITPWNFEEVVDKGASAQSFIERMTNFDKNLPNEKVLPKHSLLYEYFTVYNELTKVKYVTEGMRKPAFLSGEQKKAIVDLLFKTNRKVTVKQLKEDYFKKIECFDSVEISGVEDRFNASLGTYHDLLKIIKDKDFLDNEENEDILEDIVLTLTLFEDREMIEERLKTYAHLFDDKVMKQLKRRRYTGWGRLSRKLINGIRDKQSGKTILDFLKSDGFANRNFMQLIHDDSLTFKEDIQKAQVSGQGDSLHEHIANLAGSPAIKKGILQTVKVVDELVKVMGRHKPENIVIEMARENQTTQKGQKNSRERMKRIEEGIKELGSQILKEHPVENTQLQNEKLYLYYLQNGRDMYVDQELDINRLSDYDVDHIVPQSFLKDDSIDNKVLTRSDKARGKSDNVPSEEVVKKMKNYWRQLLNAKLITQRKFDNLTKAERGGLSELDKAGFIKRQLVETRQITKHVAQILDSRMNTKYDENDKLIREVKVITLKSKLVSDFRKDFQFYKVREINNYHHAHDAYLNAVVGTALIKKYPKLESEFVYGDYKVYDVRKMIAKSEQEIGKATAKYFFYSNIMNFFKTEITLANGEIRKRPLIETNGETGEIVWDKGRDFATVRKVLSMPQVNIVKKTEVQTGGFSKESILPKRNSDKLIARKKDWDPKKYGGFDSPTVAYSVLVVAKVEKGKSKKLKSVKELLGITIMERSSFEKNPIDFLEAKGYKEVKKDLIIKLPKYSLFELENGRKRMLASAGELQKGNELALPSKYVNFLYLASHYEKLKGSPEDNEQKQLFVEQHKHYLDEIIEQISEFSKRVILADANLDKVLSAYNKHRDKPIREQAENIIHLFTLTNLGAPAAFKYFDTTIDRKRYTSTKEVLDATLIHQSITGLYETRIDLSQLGGDGGGSSGGSGGVLNLEEEYRLHEKPVPSSIDPSWLQLFPTVWAERAGMGLANQVPPVVVELRSGASPVAVRQYPMSKEAREGIRPHIQRFLDLGVLVPCQSPWNTPLLPVKKPGTNDYRPVQDLREINKRVQDIHPTVPNPYNLLSSLPPSHTWYSVLDLKDAFFCLKLHPNSQPLFAFEWRDPEKGNTGQLTWTRLPQGFKNSPTLFNEALHRDLAPFRALNPQVVLLQYVDDLLVAAPTYRDCKEGTQKLLQELSKLGYRVSAKKAQLCQKEVTYLGYLLKEGKRWLTPARKATVMKIPPPTTPRQVREFLGTAGFCRLWIPGFASLAAPLYPLTKPSIPFIWTEEHQKAFDRIKEALLSAPALALPDLTKPFTLYVDERAGVARGVLTQTLGPWRRPVAYLSKKLDPVASGWPTCLKAVAAVALLLKDADKLTLGQNVTVIASHSLESIVRQPPDRWMTNARMTHYQSLLLNERVSFAPPAVLNPATLLPVESEATPVHRCSEILAEETGTRRDLKDQPLPGVPAWYTDGSSFIAEGKRRAGAAIVDGKRTVWASSLPEGTSAQKAELVALTQALRLAEGKDINIYTDSRYAFATAHIHGAIYKQRGWLTSAGKDIKNKEEILALLEAIHLPKRVAIIHCPGHQKGNDPVATGNRRADEAAKQAALSTRVLAETTKPAGKRTADGSEFEKRTADGSEFESPKKKAKVE

SEQ ID NO: 6620 - protein, 2091 aa, synthetic construct
MPAAKRVKLDGGDKKYSIGLDIGTNSVGWAVITDEYKVPSKKFKVLGNTDRHSIKKNLIGALLFDSGETAEATRLKRTARRRYTRRKNRICYLQEIFSNEMAKVDDSFFHRLEESFLVEEDKKHERHPIFGNIVDEVAYHEKYPTIYHLRKKLVDSTDKADLRLIYLALAHMIKFRGHFLIEGDLNPDNSDVDKLFIQLVQTYNQLFEENPINASGVDAKAILSARLSKSRRLENLIAQLPGEKKNGLFGNLIALSLGLTPNFKSNFDLAEDAKLQLSKDTYDDDLDNLLAQIGDQYADLFLAAKNLSDAILLSDILRVNTEITKAPLSASMIKRYDEHHQDLTLLKALVRQQLPEKYKEIFFDQSKNGYAGYIDGGASQEEFYKFIKPILEKMDGTEELLVKLNREDLLRKQRTFDNGSIPHQIHLGELHAILRRQEDFYPFLKDNREKIEKILTFRIPYYVGPLARGNSRFAWMTRKSEETITPWNFEEVVDKGASAQSFIERMTNFDKNLPNEKVLPKHSLLYEYFTVYNELTKVKYVTEGMRKPAFLSGEQKKAIVDLLFKTNRKVTVKQLKEDYFKKIECFDSVEISGVEDRFNASLGTYHDLLKIIKDKDFLDNEENEDILEDIVLTLTLFEDREMIEERLKTYAHLFDDKVMKQLKRRRYTGWGRLSRKLINGIRDKQSGKTILDFLKSDGFANRNFMQLIHDDSLTFKEDIQKAQVSGQGDSLHEHIANLAGSPAIKKGILQTVKVVDELVKVMGRHKPENIVIEMARENQTTQKGQKNSRERMKRIEEGIKELGSQILKEHPVENTQLQNEKLYLYYLQNGRDMYVDQELDINRLSDYDVDHIVPQSFLKDDSIDNKVLTRSDKARGKSDNVPSEEVVKKMKNYWRQLLNAKLITQRKFDNLTKAERGGLSELDKAGFIKRQLVETRQITKHVAQILDSRMNTKYDENDKLIREVKVITLKSKLVSDFRKDFQFYKVREINNYHHAHDAYLNAVVGTALIKKYPKLESEFVYGDYKVYDVRKMIAKSEQEIGKATAKYFFYSNIMNFFKTEITLANGEIRKRPLIETNGETGEIVWDKGRDFATVRKVLSMPQVNIVKKTEVQTGGFSKESILPKRNSDKLIARKKDWDPKKYGGFDSPTVAYSVLVVAKVEKGKSKKLKSVKELLGITIMERSSFEKNPIDFLEAKGYKEVKKDLIIKLPKYSLFELENGRKRMLASAGELQKGNELALPSKYVNFLYLASHYEKLKGSPEDNEQKQLFVEQHKHYLDEIIEQISEFSKRVILADANLDKVLSAYNKHRDKPIREQAENIIHLFTLTNLGAPAAFKYFDTTIDRKRYTSTKEVLDATLIHQSITGLYETRIDLSQLGGDGGGSSGGSGGTLNIEDEYRLHETSKEPDVPLGSTWLSDFPQAWAETGGMGLAVRQAPLIIPLKATSTPVSIKQYPMSQEARLGIKPHIQRLLDQGILVPCQSPWNTPLLPVKKPGTNDYRPVQDLREVNKRVEDIHPTVPNPYNLLSGLPPSHQWYTVLDLKDAFFCLRLHPTSQPLFAFEWRDPEMGISGQLTWTRLPQGFKNSPTLFNEALHRDLADFRIQHPDLILLQYVDDLLLAATSEQDCQRGTRALLQTLGNLGYRASAKKAQICQKQVKYLGYLLKEGQRWLTEARKETVMGQPTPKTPRQLREFLGTAGFCRLWIPGFAEMAAPLYPLTKPGTLFNWGPDQQKAYQEIKQALLTAPALGLPDLTKPFELFVDEKQGYAKGVLTQKLGPWRRPVAYLSKKLDPVAAGWPPCLRMVAAIAVLTKDAGKLTMGQPLVILAPHAVEALVKQPPDRWLSNARMTHYQAMLLDTDRVQFGPVVALNPATLLPLPEKEAPHDCLEILAETHGTRPDLTDQPIPDADYTWYTDGSSFLQEGQRRAGAAVTTETEVIWARALPAGTSAQRAELIALTQALKMAEGKKLNVYTDSRYAFATAHVHGEIYRRRGWLTSEGREIKNKNEILALLKALFLPKRLSIIHCPGHQKGNSAEARGNRMADQAAREAAMKAVLETSTLLAGKRTADGSEFEKRTADGSEFESPKKKAKVE

SEQ ID NO: 6621 - protein, 2095 aa, synthetic construct
MPAAKRVKLDGGDKKYSIGLDIGTNSVGWAVITDEYKVPSKKFKVLGNTDRHSIKKNLIGALLFDSGETAEATRLKRTARRRYTRRKNRICYLQEIFSNEMAKVDDSFFHRLEESFLVEEDKKHERHPIFGNIVDEVAYHEKYPTIYHLRKKLVDSTDKADLRLIYLALAHMIKFRGHFLIEGDLNPDNSDVDKLFIQLVQTYNQLFEENPINASGVDAKAILSARLSKSRRLENLIAQLPGEKKNGLFGNLIALSLGLTPNFKSNFDLAEDAKLQLSKDTYDDDLDNLLAQIGDQYADLFLAAKNLSDAILLSDILRVNTEITKAPLSASMIKRYDEHHQDLTLLKALVRQQLPEKYKEIFFDQSKNGYAGYIDGGASQEEFYKFIKPILEKMDGTEELLVKLNREDLLRKQRTFDNGSIPHQIHLGELHAILRRQEDFYPFLKDNREKIEKILTFRIPYYVGPLARGNSRFAWMTRKSEETITPWNFEEVVDKGASAQSFIERMTNFDKNLPNEKVLPKHSLLYEYFTVYNELTKVKYVTEGMRKPAFLSGEQKKAIVDLLFKTNRKVTVKQLKEDYFKKIECFDSVEISGVEDRFNASLGTYHDLLKIIKDKDFLDNEENEDILEDIVLTLTLFEDREMIEERLKTYAHLFDDKVMKQLKRRRYTGWGRLSRKLINGIRDKQSGKTILDFLKSDGFANRNFMQLIHDDSLTFKEDIQKAQVSGQGDSLHEHIANLAGSPAIKKGILQTVKVVDELVKVMGRHKPENIVIEMARENQTTQKGQKNSRERMKRIEEGIKELGSQILKEHPVENTQLQNEKLYLYYLQNGRDMYVDQELDINRLSDYDVDHIVPQSFLKDDSIDNKVLTRSDKARGKSDNVPSEEVVKKMKNYWRQLLNAKLITQRKFDNLTKAERGGLSELDKAGFIKRQLVETRQITKHVAQILDSRMNTKYDENDKLIREVKVITLKSKLVSDFRKDFQFYKVREINNYHHAHDAYLNAVVGTALIKKYPKLESEFVYGDYKVYDVRKMIAKSEQEIGKATAKYFFYSNIMNFFKTEITLANGEIRKRPLIETNGETGEIVWDKGRDFATVRKVLSMPQVNIVKKTEVQTGGFSKESILPKRNSDKLIARKKDWDPKKYGGFDSPTVAYSVLVVAKVEKGKSKKLKSVKELLGITIMERSSFEKNPIDFLEAKGYKEVKKDLIIKLPKYSLFELENGRKRMLASAGELQKGNELALPSKYVNFLYLASHYEKLKGSPEDNEQKQLFVEQHKHYLDEIIEQISEFSKRVILADANLDKVLSAYNKHRDKPIREQAENIIHLFTLTNLGAPAAFKYFDTTIDRKRYTSTKEVLDATLIHQSITGLYETRIDLSQLGGDGGGGSEAAAKGGTAPLEEEYRLFLEAPIQNVTLLEQWKREIPKVWAEINPPGLASTQAPIHVQLLSTALPVRVRQYPITLEAKRSLRETIRKFRAAGILRPVHSPWNTPLLPVRKSGTSEYRMVQDLREVNKRVETIHPTVPNPYTLLSLLPPDRIWYSVLDLKDAFFCIPLAPESQLIFAFEWADAEEGESGQLTWTRLPQGFKNSPTLFNEALNRDLQGFRLDHPSVSLLQYVDDLLIAADTQAACLSATRDLLMTLAELGYRVSGKKAQLCQEEVTYLGFKIHKGSRSLSNSRTQAILQIPVPKTKRQVREFLGTIGYCRLWIPGFAELAQPLYAATRPGNDPLVWGEKEEEAFQSLKLALTQPPALALPSLDKPFQLFVEETSGAAKGVLTQALGPWKRPVAYLSKRLDPVAAGWPRCLRAIAAAALLTREASKLTFGQDIEITSSHNLESLLRSPPDKWLTNARITQYQVLLLDPPRVRFKQTAALNPATLLPETDDTLPIHHCLDTLDSLTSTRPDLTDQPLAQAEATLFTDGSSYIRDGKRYAGAAVVTLDSVIWAEPLPIGTSAQKAELIALTKALEWSKDKSVNIYTDSRYAFATLHVHGMIYRERGWLTAGGKAIKNAPEILALLTAVWLPKRVAVMHCKGHQKDDAPTSTGNRRADEVAREVAIRPLSTQATISAGKRTADGSEFEKRTADGSEFESPKKKAKVE

SEQ ID NO: 6622 - protein, 2095 aa, synthetic construct
MPAAKRVKLDGGDKKYSIGLDIGTNSVGWAVITDEYKVPSKKFKVLGNTDRHSIKKNLIGALLFDSGETAEATRLKRTARRRYTRRKNRICYLQEIFSNEMAKVDDSFFHRLEESFLVEEDKKHERHPIFGNIVDEVAYHEKYPTIYHLRKKLVDSTDKADLRLIYLALAHMIKFRGHFLIEGDLNPDNSDVDKLFIQLVQTYNQLFEENPINASGVDAKAILSARLSKSRRLENLIAQLPGEKKNGLFGNLIALSLGLTPNFKSNFDLAEDAKLQLSKDTYDDDLDNLLAQIGDQYADLFLAAKNLSDAILLSDILRVNTEITKAPLSASMIKRYDEHHQDLTLLKALVRQQLPEKYKEIFFDQSKNGYAGYIDGGASQEEFYKFIKPILEKMDGTEELLVKLNREDLLRKQRTFDNGSIPHQIHLGELHAILRRQEDFYPFLKDNREKIEKILTFRIPYYVGPLARGNSRFAWMTRKSEETITPWNFEEVVDKGASAQSFIERMTNFDKNLPNEKVLPKHSLLYEYFTVYNELTKVKYVTEGMRKPAFLSGEQKKAIVDLLFKTNRKVTVKQLKEDYFKKIECFDSVEISGVEDRFNASLGTYHDLLKIIKDKDFLDNEENEDILEDIVLTLTLFEDREMIEERLKTYAHLFDDKVMKQLKRRRYTGWGRLSRKLINGIRDKQSGKTILDFLKSDGFANRNFMQLIHDDSLTFKEDIQKAQVSGQGDSLHEHIANLAGSPAIKKGILQTVKVVDELVKVMGRHKPENIVIEMARENQTTQKGQKNSRERMKRIEEGIKELGSQILKEHPVENTQLQNEKLYLYYLQNGRDMYVDQELDINRLSDYDVDHIVPQSFLKDDSIDNKVLTRSDKARGKSDNVPSEEVVKKMKNYWRQLLNAKLITQRKFDNLTKAERGGLSELDKAGFIKRQLVETRQITKHVAQILDSRMNTKYDENDKLIREVKVITLKSKLVSDFRKDFQFYKVREINNYHHAHDAYLNAVVGTALIKKYPKLESEFVYGDYKVYDVRKMIAKSEQEIGKATAKYFFYSNIMNFFKTEITLANGEIRKRPLIETNGETGEIVWDKGRDFATVRKVLSMPQVNIVKKTEVQTGGFSKESILPKRNSDKLIARKKDWDPKKYGGFDSPTVAYSVLVVAKVEKGKSKKLKSVKELLGITIMERSSFEKNPIDFLEAKGYKEVKKDLIIKLPKYSLFELENGRKRMLASAGELQKGNELALPSKYVNFLYLASHYEKLKGSPEDNEQKQLFVEQHKHYLDEIIEQISEFSKRVILADANLDKVLSAYNKHRDKPIREQAENIIHLFTLTNLGAPAAFKYFDTTIDRKRYTSTKEVLDATLIHQSITGLYETRIDLSQLGGDGGGGSEAAAKGGTAPLEEEYRLFLEAPIQNVTLLEQWKREIPKVWAEINPPGLASTQAPIHVQLLSTALPVRVRQYPITLEAKRSLRETIRKFRAAGILRPVHSPWNTPLLPVRKSGTSEYRMVQDLREVNKRVETIHPTVPNPYTLLSLLPPDRIWYSVLDLKDAFFCIPLAPESQLIFAFEWADAEEGESGQLTWTRLPQGFKNSPTLFNEALNRDLQGFRLDHPSVSLLQYVDDLLIAADTQAACLSATRDLLMTLAELGYRVSGKKAQLCQEEVTYLGFKIHKGSRSLSNSRTQAILQIPVPKTKRQVREFLGKIGYCRLFIPGFAELAQPLYAATRPGNDPLVWGEKEEEAFQSLKLALTQPPALALPSLDKPFQLFVEETSGAAKGVLTQALGPWKRPVAYLSKRLDPVAAGWPRCLRAIAAAALLTREASKLTFGQDIEITSSHNLESLLRSPPDKWLTNARITQYQVLLLDPPRVRFKQTAALNPATLLPETDDTLPIHHCLDTLDSLTSTRPDLTDQPLAQAEATLFTDGSSYIRDGKRYAGAAVVTLDSVIWAEPLPIGTSAQKAELIALTKALEWSKDKSVNIYTDSRYAFATLHVHGMIYRERGWLTAGGKAIKNAPEILALLTAVWLPKRVAVMHCKGHQKDDAPTSTGNRRADEVAREVAIRPLSTQATISAGKRTADGSEFEKRTADGSEFESPKKKAKVE

SEQ ID NO: 6623 - protein, 2092 aa, synthetic construct
MPAAKRVKLDGGDKKYSIGLDIGTNSVGWAVITDEYKVPSKKFKVLGNTDRHSIKKNLIGALLFDSGETAEATRLKRTARRRYTRRKNRICYLQEIFSNEMAKVDDSFFHRLEESFLVEEDKKHERHPIFGNIVDEVAYHEKYPTIYHLRKKLVDSTDKADLRLIYLALAHMIKFRGHFLIEGDLNPDNSDVDKLFIQLVQTYNQLFEENPINASGVDAKAILSARLSKSRRLENLIAQLPGEKKNGLFGNLIALSLGLTPNFKSNFDLAEDAKLQLSKDTYDDDLDNLLAQIGDQYADLFLAAKNLSDAILLSDILRVNTEITKAPLSASMIKRYDEHHQDLTLLKALVRQQLPEKYKEIFFDQSKNGYAGYIDGGASQEEFYKFIKPILEKMDGTEELLVKLNREDLLRKQRTFDNGSIPHQIHLGELHAILRRQEDFYPFLKDNREKIEKILTFRIPYYVGPLARGNSRFAWMTRKSEETITPWNFEEVVDKGASAQSFIERMTNFDKNLPNEKVLPKHSLLYEYFTVYNELTKVKYVTEGMRKPAFLSGEQKKAIVDLLFKTNRKVTVKQLKEDYFKKIECFDSVEISGVEDRFNASLGTYHDLLKIIKDKDFLDNEENEDILEDIVLTLTLFEDREMIEERLKTYAHLFDDKVMKQLKRRRYTGWGRLSRKLINGIRDKQSGKTILDFLKSDGFANRNFMQLIHDDSLTFKEDIQKAQVSGQGDSLHEHIANLAGSPAIKKGILQTVKVVDELVKVMGRHKPENIVIEMARENQTTQKGQKNSRERMKRIEEGIKELGSQILKEHPVENTQLQNEKLYLYYLQNGRDMYVDQELDINRLSDYDVDHIVPQSFLKDDSIDNKVLTRSDKARGKSDNVPSEEVVKKMKNYWRQLLNAKLITQRKFDNLTKAERGGLSELDKAGFIKRQLVETRQITKHVAQILDSRMNTKYDENDKLIREVKVITLKSKLVSDFRKDFQFYKVREINNYHHAHDAYLNAVVGTALIKKYPKLESEFVYGDYKVYDVRKMIAKSEQEIGKATAKYFFYSNIMNFFKTEITLANGEIRKRPLIETNGETGEIVWDKGRDFATVRKVLSMPQVNIVKKTEVQTGGFSKESILPKRNSDKLIARKKDWDPKKYGGFDSPTVAYSVLVVAKVEKGKSKKLKSVKELLGITIMERSSFEKNPIDFLEAKGYKEVKKDLIIKLPKYSLFELENGRKRMLASAGELQKGNELALPSKYVNFLYLASHYEKLKGSPEDNEQKQLFVEQHKHYLDEIIEQISEFSKRVILADANLDKVLSAYNKHRDKPIREQAENIIHLFTLTNLGAPAAFKYFDTTIDRKRYTSTKEVLDATLIHQSITGLYETRIDLSQLGGDGGGGSEAAAKGGTLQLEEEYRLFEPESTQKQEMDIWLKNFPQAWAETGGMGTAHCQAPVLIQLKATATPISIRQYPMPHEAYQGIKPHIRRMLDQGILKPCQSPWNTPLLPVKKPGTEDYRPVQDLREVNKRVEDIHPTVPNPYNLLSTLPPSHPWYTVLDLKDAFFCLRLHSESQLLFAFEWRDPEIGLSGQLTWTRLPQGFKNSPTLFNEALHSDLADFRVRYPALVLLQYVDDLLLAAATRTECLEGTKALLETLGNKGYRASAKKAQICLQEVTYLGYSLKDGQRWLTKARKEAILSIPVPKNSRQVREFLGTAGYCRLWIPGFAELAAPLYPLTRPGTLFQWGTEQQLAFEDIKKALLSSPALGLPDITKPFELFIDENSGFAKGVLVQKLGPWKRPVAYLSKKLDTVASGWPPCLRMVAAIAILVKDAGKLTLGQPLTILTSHPVEALVRQPPNKWLSNARMTHYQAMLLDAERVHFGPTVSLNPATLLPLPSGGNHHDCLQILAETHGTRPDLTDQPLPDADLTWYTDGSSFIRNGEREAGAAVTTESEVIWAAPLPPGTSAQRAELIALTQALKMAEGKKLTVYTDSRYAFATTHVHGEIYRRRGWLTSEGKEIKNKNEILALLEALFLPKRLSIIHCPGHQKGDSPQAKGNRLADDTAKKAATETHSSLTVLPAGKRTADGSEFEKRTADGSEFESPKKKAKVE

SEQ ID NO: 6624 - protein, 2124 aa, synthetic construct
MPAAKRVKLDGGDKKYSIGLDIGTNSVGWAVITDEYKVPSKKFKVLGNTDRHSIKKNLIGALLFDSGETAEATRLKRTARRRYTRRKNRICYLQEIFSNEMAKVDDSFFHRLEESFLVEEDKKHERHPIFGNIVDEVAYHEKYPTIYHLRKKLVDSTDKADLRLIYLALAHMIKFRGHFLIEGDLNPDNSDVDKLFIQLVQTYNQLFEENPINASGVDAKAILSARLSKSRRLENLIAQLPGEKKNGLFGNLIALSLGLTPNFKSNFDLAEDAKLQLSKDTYDDDLDNLLAQIGDQYADLFLAAKNLSDAILLSDILRVNTEITKAPLSASMIKRYDEHHQDLTLLKALVRQQLPEKYKEIFFDQSKNGYAGYIDGGASQEEFYKFIKPILEKMDGTEELLVKLNREDLLRKQRTFDNGSIPHQIHLGELHAILRRQEDFYPFLKDNREKIEKILTFRIPYYVGPLARGNSRFAWMTRKSEETITPWNFEEVVDKGASAQSFIERMTNFDKNLPNEKVLPKHSLLYEYFTVYNELTKVKYVTEGMRKPAFLSGEQKKAIVDLLFKTNRKVTVKQLKEDYFKKIECFDSVEISGVEDRFNASLGTYHDLLKIIKDKDFLDNEENEDILEDIVLTLTLFEDREMIEERLKTYAHLFDDKVMKQLKRRRYTGWGRLSRKLINGIRDKQSGKTILDFLKSDGFANRNFMQLIHDDSLTFKEDIQKAQVSGQGDSLHEHIANLAGSPAIKKGILQTVKVVDELVKVMGRHKPENIVIEMARENQTTQKGQKNSRERMKRIEEGIKELGSQILKEHPVENTQLQNEKLYLYYLQNGRDMYVDQELDINRLSDYDVDHIVPQSFLKDDSIDNKVLTRSDKARGKSDNVPSEEVVKKMKNYWRQLLNAKLITQRKFDNLTKAERGGLSELDKAGFIKRQLVETRQITKHVAQILDSRMNTKYDENDKLIREVKVITLKSKLVSDFRKDFQFYKVREINNYHHAHDAYLNAVVGTALIKKYPKLESEFVYGDYKVYDVRKMIAKSEQEIGKATAKYFFYSNIMNFFKTEITLANGEIRKRPLIETNGETGEIVWDKGRDFATVRKVLSMPQVNIVKKTEVQTGGFSKESILPKRNSDKLIARKKDWDPKKYGGFDSPTVAYSVLVVAKVEKGKSKKLKSVKELLGITIMERSSFEKNPIDFLEAKGYKEVKKDLIIKLPKYSLFELENGRKRMLASAGELQKGNELALPSKYVNFLYLASHYEKLKGSPEDNEQKQLFVEQHKHYLDEIIEQISEFSKRVILADANLDKVLSAYNKHRDKPIREQAENIIHLFTLTNLGAPAAFKYFDTTIDRKRYTSTKEVLDATLIHQSITGLYETRIDLSQLGGDGGGGSEAAAKGGLLGRDLLTKLKAQIQFSTEGPQVTWEDRPAMCLVLNLEEEYRLHEKPVPPSIDPSWLQLFPMVWAEKAGMGLANQVPPVVVELKSDASPVAVRQYPMSKEAREGIRPHIQRFLDLGILVPCQSPWNTPLLPVKKPGTNDYRPVQDLREVNKRVQDIHPTVPNPYNLLSSLPPSHTWYSVLDLKDAFFCLKLHPNSQPLFAFEWRDPEKGNTGQLTWTRLPQGFKNSPTLFNEALHRDLASFRALNPQVVMLQYVDDLLVAAPTYRDCKEGTRRLLQELSKLGYRVSAKKAQLCREEVTYLGYLLKGGKRWLTPARKATVMKIPTPTTPRQVREFLGTAGFCRLWIPGFASLAAPLYPLTRPKVPFTWTEAHQEAFGRIKEALLSAPALALPDLTKPFALYVDEKEGVARGVLTQTLGPWRRPVAYLSKKLDPVASGWPTCLKAIAAVALLLKDADKLTLGQNVLVIAPHNLESIVRQPPDRWMTNARMTHYQSLLLNERVSFAPPAILNPATLLPVESDDTPIHICSEILAEETGTRPDLRDQPLPGVPAWYTDGSSFIMDGRRQAGAAIVDNKRTVWASNLPEGTSAQKAELIALTQALRLAEGKSINIYTDSRYAFATAHVHGAIYKQRGWLTSAGKDIKNKEEILALLEAIHLPKRVAIIHCPGHQRGTDPVATGNRKADEAAKQAAQSTRILTETTKNAGKRTADGSEFEKRTADGSEFESPKKKAKVE

SEQ ID NO: 6625 - protein, 2215 aa, synthetic construct
MPAAKRVKLDGGDKKYSIGLDIGTNSVGWAVITDEYKVPSKKFKVLGNTDRHSIKKNLIGALLFDSGETAEATRLKRTARRRYTRRKNRICYLQEIFSNEMAKVDDSFFHRLEESFLVEEDKKHERHPIFGNIVDEVAYHEKYPTIYHLRKKLVDSTDKADLRLIYLALAHMIKFRGHFLIEGDLNPDNSDVDKLFIQLVQTYNQLFEENPINASGVDAKAILSARLSKSRRLENLIAQLPGEKKNGLFGNLIALSLGLTPNFKSNFDLAEDAKLQLSKDTYDDDLDNLLAQIGDQYADLFLAAKNLSDAILLSDILRVNTEITKAPLSASMIKRYDEHHQDLTLLKALVRQQLPEKYKEIFFDQSKNGYAGYIDGGASQEEFYKFIKPILEKMDGTEELLVKLNREDLLRKQRTFDNGSIPHQIHLGELHAILRRQEDFYPFLKDNREKIEKILTFRIPYYVGPLARGNSRFAWMTRKSEETITPWNFEEVVDKGASAQSFIERMTNFDKNLPNEKVLPKHSLLYEYFTVYNELTKVKYVTEGMRKPAFLSGEQKKAIVDLLFKTNRKVTVKQLKEDYFKKIECFDSVEISGVEDRFNASLGTYHDLLKIIKDKDFLDNEENEDILEDIVLTLTLFEDREMIEERLKTYAHLFDDKVMKQLKRRRYTGWGRLSRKLINGIRDKQSGKTILDFLKSDGFANRNFMQLIHDDSLTFKEDIQKAQVSGQGDSLHEHIANLAGSPAIKKGILQTVKVVDELVKVMGRHKPENIVIEMARENQTTQKGQKNSRERMKRIEEGIKELGSQILKEHPVENTQLQNEKLYLYYLQNGRDMYVDQELDINRLSDYDVDHIVPQSFLKDDSIDNKVLTRSDKARGKSDNVPSEEVVKKMKNYWRQLLNAKLITQRKFDNLTKAERGGLSELDKAGFIKRQLVETRQITKHVAQILDSRMNTKYDENDKLIREVKVITLKSKLVSDFRKDFQFYKVREINNYHHAHDAYLNAVVGTALIKKYPKLESEFVYGDYKVYDVRKMIAKSEQEIGKATAKYFFYSNIMNFFKTEITLANGEIRKRPLIETNGETGEIVWDKGRDFATVRKVLSMPQVNIVKKTEVQTGGFSKESILPKRNSDKLIARKKDWDPKKYGGFDSPTVAYSVLVVAKVEKGKSKKLKSVKELLGITIMERSSFEKNPIDFLEAKGYKEVKKDLIIKLPKYSLFELENGRKRMLASAGELQKGNELALPSKYVNFLYLASHYEKLKGSPEDNEQKQLFVEQHKHYLDEIIEQISEFSKRVILADANLDKVLSAYNKHRDKPIREQAENIIHLFTLTNLGAPAAFKYFDTTIDRKRYTSTKEVLDATLIHQSITGLYETRIDLSQLGGDGGGGSEAAAKGGTLGDQGSRGSDPLPEPRVTLTVEGIPTEFLVNTGAEHSVLTKPMGKMGSKRTVVAGATGSKVYPWTTKRLLKIGQKQVTHSFLVIPECPAPLLGRDLLTKLKAQIQFSTEGPQVTWEDRPAMCLVLNLEEEYRLHEKPVPPSIDPSWLQLFPMVWAEKAGMGLANQVPPVVVELKSDASPVAVRQYPMSKEAREGIRPHIQRFLDLGILVPCQSPWNTPLLPVKKPGTNDYRPVQDLREVNKRVQDIHPTVPNPYNLLSSLPPSHTWYSVLDLKDAFFCLKLHPNSQPLFAFEWRDPEKGNTGQLTWTRLPQGFKNSPTLFNEALHRDLASFRALNPQVVMLQYVDDLLVAAPTYRDCKEGTRRLLQELSKLGYRVSAKKAQLCREEVTYLGYLLKGGKRWLTPARKATVMKIPTPTTPRQVREFLGTAGFCRLWIPGFASLAAPLYPLTRPKVPFTWTEAHQEAFGRIKEALLSAPALALPDLTKPFALYVDEKEGVARGVLTQTLGPWRRPVAYLSKKLDPVASGWPTCLKAIAAVALLLKDADKLTLGQNVLVIAPHNLESIVRQPPDRWMTNARMTHYQSLLLNERVSFAPPAILNPATLLPVESDDTPIHICSEILAEETGTRPDLRDQPLPGVPAWYTDGSSFIMDGRRQAGAAIVDNKRTVWASNLPEGTSAQKAELIALTQALRLAEGKSINIYTDSRYAFATAHVHGAIYKQRGWLTSAGKDIKNKEEILALLEAIHLPKRVAIIHCPGHQRGTDPVATGNRKADEAAKQAAQSTRILTETTKNAGKRTADGSEFEKRTADGSEFESPKKKAKVE

SEQ ID NO: 6626 - protein, 2093 aa, synthetic construct
MPAAKRVKLDGGDKKYSIGLDIGTNSVGWAVITDEYKVPSKKFKVLGNTDRHSIKKNLIGALLFDSGETAEATRLKRTARRRYTRRKNRICYLQEIFSNEMAKVDDSFFHRLEESFLVEEDKKHERHPIFGNIVDEVAYHEKYPTIYHLRKKLVDSTDKADLRLIYLALAHMIKFRGHFLIEGDLNPDNSDVDKLFIQLVQTYNQLFEENPINASGVDAKAILSARLSKSRRLENLIAQLPGEKKNGLFGNLIALSLGLTPNFKSNFDLAEDAKLQLSKDTYDDDLDNLLAQIGDQYADLFLAAKNLSDAILLSDILRVNTEITKAPLSASMIKRYDEHHQDLTLLKALVRQQLPEKYKEIFFDQSKNGYAGYIDGGASQEEFYKFIKPILEKMDGTEELLVKLNREDLLRKQRTFDNGSIPHQIHLGELHAILRRQEDFYPFLKDNREKIEKILTFRIPYYVGPLARGNSRFAWMTRKSEETITPWNFEEVVDKGASAQSFIERMTNFDKNLPNEKVLPKHSLLYEYFTVYNELTKVKYVTEGMRKPAFLSGEQKKAIVDLLFKTNRKVTVKQLKEDYFKKIECFDSVEISGVEDRFNASLGTYHDLLKIIKDKDFLDNEENEDILEDIVLTLTLFEDREMIEERLKTYAHLFDDKVMKQLKRRRYTGWGRLSRKLINGIRDKQSGKTILDFLKSDGFANRNFMQLIHDDSLTFKEDIQKAQVSGQGDSLHEHIANLAGSPAIKKGILQTVKVVDELVKVMGRHKPENIVIEMARENQTTQKGQKNSRERMKRIEEGIKELGSQILKEHPVENTQLQNEKLYLYYLQNGRDMYVDQELDINRLSDYDVDHIVPQSFLKDDSIDNKVLTRSDKARGKSDNVPSEEVVKKMKNYWRQLLNAKLITQRKFDNLTKAERGGLSELDKAGFIKRQLVETRQITKHVAQILDSRMNTKYDENDKLIREVKVITLKSKLVSDFRKDFQFYKVREINNYHHAHDAYLNAVVGTALIKKYPKLESEFVYGDYKVYDVRKMIAKSEQEIGKATAKYFFYSNIMNFFKTEITLANGEIRKRPLIETNGETGEIVWDKGRDFATVRKVLSMPQVNIVKKTEVQTGGFSKESILPKRNSDKLIARKKDWDPKKYGGFDSPTVAYSVLVVAKVEKGKSKKLKSVKELLGITIMERSSFEKNPIDFLEAKGYKEVKKDLIIKLPKYSLFELENGRKRMLASAGELQKGNELALPSKYVNFLYLASHYEKLKGSPEDNEQKQLFVEQHKHYLDEIIEQISEFSKRVILADANLDKVLSAYNKHRDKPIREQAENIIHLFTLTNLGAPAAFKYFDTTIDRKRYTSTKEVLDATLIHQSITGLYETRIDLSQLGGDGGGGSEAAAKGGTLNIEDEYRLHETSKEPDVSLGSTWLSDFPQAWAETGGMGLAVRQAPLIIPLKATSTPVSIKQYPMSQEARLGIKPHIQRLLDQGILVPCQSPWNTPLLPVKKPGTNDYRPVQDLREVNKRVEDIHPTVPNPYNLLSGLPPSHQWYTVLDLKDAFFCLRLHPTSQPLFAFEWRDPEMGISGQLTWTRLPQGFKNSPTLFNEALHRDLAGFRIQHPDLILLQYVDDLLLAATSELDCQQGTRALLQTLGDLGYRASAKKAQICQKQVKYLGYLLKEGQRWLTEARKETVMGQPIPKTPRQLREFLGTAGFCRLWIPGFAEMAAPLYPLTKPGTLFNWGPDQQKAFQEIKQALLTAPALGLPDLTKPFELFVDEKQGYAKGVLTQKLGPWRRPVAYLSKKLDPVAAGWPPCLRMVAAIAVLTKDAGKLTMGQPLVILAPHAVEALVKQPPDRWLSNARMTHYQALLLDTDRVQFGPVVALNPATLLPLPEEGLQHDCLDILAEAHGTRSDLMDQPLPDADHTWYTDGSSFLQEGQRKAGAAVTTETEVIWARALPAGTSAQRAELIALTQALKMAEGKKLNVYTDSRYAFATAHIHGEIYRRRGWLTSEGKEIKNKDEILALLKALFLPKRLSIIHCPGHQKGNSAEARGNRMADQAAREVATRETPETSTLLAGKRTADGSEFEKRTADGSEFESPKKKAKVE

SEQ ID NO: 6627 - protein, 2093 aa, synthetic construct
MPAAKRVKLDGGDKKYSIGLDIGTNSVGWAVITDEYKVPSKKFKVLGNTDRHSIKKNLIGALLFDSGETAEATRLKRTARRRYTRRKNRICYLQEIFSNEMAKVDDSFFHRLEESFLVEEDKKHERHPIFGNIVDEVAYHEKYPTIYHLRKKLVDSTDKADLRLIYLALAHMIKFRGHFLIEGDLNPDNSDVDKLFIQLVQTYNQLFEENPINASGVDAKAILSARLSKSRRLENLIAQLPGEKKNGLFGNLIALSLGLTPNFKSNFDLAEDAKLQLSKDTYDDDLDNLLAQIGDQYADLFLAAKNLSDAILLSDILRVNTEITKAPLSASMIKRYDEHHQDLTLLKALVRQQLPEKYKEIFFDQSKNGYAGYIDGGASQEEFYKFIKPILEKMDGTEELLVKLNREDLLRKQRTFDNGSIPHQIHLGELHAILRRQEDFYPFLKDNREKIEKILTFRIPYYVGPLARGNSRFAWMTRKSEETITPWNFEEVVDKGASAQSFIERMTNFDKNLPNEKVLPKHSLLYEYFTVYNELTKVKYVTEGMRKPAFLSGEQKKAIVDLLFKTNRKVTVKQLKEDYFKKIECFDSVEISGVEDRFNASLGTYHDLLKIIKDKDFLDNEENEDILEDIVLTLTLFEDREMIEERLKTYAHLFDDKVMKQLKRRRYTGWGRLSRKLINGIRDKQSGKTILDFLKSDGFANRNFMQLIHDDSLTFKEDIQKAQVSGQGDSLHEHIANLAGSPAIKKGILQTVKVVDELVKVMGRHKPENIVIEMARENQTTQKGQKNSRERMKRIEEGIKELGSQILKEHPVENTQLQNEKLYLYYLQNGRDMYVDQELDINRLSDYDVDHIVPQSFLKDDSIDNKVLTRSDKARGKSDNVPSEEVVKKMKNYWRQLLNAKLITQRKFDNLTKAERGGLSELDKAGFIKRQLVETRQITKHVAQILDSRMNTKYDENDKLIREVKVITLKSKLVSDFRKDFQFYKVREINNYHHAHDAYLNAVVGTALIKKYPKLESEFVYGDYKVYDVRKMIAKSEQEIGKATAKYFFYSNIMNFFKTEITLANGEIRKRPLIETNGETGEIVWDKGRDFATVRKVLSMPQVNIVKKTEVQTGGFSKESILPKRNSDKLIARKKDWDPKKYGGFDSPTVAYSVLVVAKVEKGKSKKLKSVKELLGITIMERSSFEKNPIDFLEAKGYKEVKKDLIIKLPKYSLFELENGRKRMLASAGELQKGNELALPSKYVNFLYLASHYEKLKGSPEDNEQKQLFVEQHKHYLDEIIEQISEFSKRVILADANLDKVLSAYNKHRDKPIREQAENIIHLFTLTNLGAPAAFKYFDTTIDRKRYTSTKEVLDATLIHQSITGLYETRIDLSQLGGDGGGGSEAAAKGGTLNIEDEYRLHETSKGPDVPLGSTWLSDFPQAWAETGGMGLAVRQAPLIIPLKATSTPVSIKQYPMSQEARLGIKPHIQRLLDQGILVPCQSPWNTPLLPVKKPGTNDYRPVQDLREVNKRVEDIHPTVPNPYNLLSGLPPSHQWYTVLDLKDAFFCLRLHPTSQSLFAFEWRDPEMGISGQLTWTRLPQGFKNSPTLFNEALHRDLADFRIQHPDLILLQYVDDLLLAATSELDCQQGTRALLQTLGDLGYRASAKKAQICQKQVKYLGYLLKEGQRWLTEARKETVMGQPTPKTPRQLREFLGTAGFCRLWIPGFAEMAAPLYPLTKPGTLFEWGPDQQKAYQEIKQALLTAPALGLPDLTKPFELFVDEKQGYAKGVLTQKLGPWRRPVAYLSKKLDPVAAGWPPCLRMVAAIAVLTKDAGKLTMGQPLVILAPHAVEALVKQPPDRWLSNARMTHYQALLLDTDRVQFGPIVALNPATLLPLPEEGLQHDCLDILAEAHGTRPDLTDQPLPDADHTWYTDGSSFLQEGQRKAGAAVTTETEVVWAKALPAGTSAQRAELIALTQALKMAEGKKLNVYTDSRYAFATAHIHGEIYRRRGWLTSEGKEIKNKDEILALLKALFLPKRLSIIHCPGHQKGNRAEARGNRMADQAAREVATRETPETSTLLAGKRTADGSEFEKRTADGSEFESPKKKAKVE

SEQ ID NO: 6628 - protein, 2084 aa, synthetic construct
MPAAKRVKLDGGDKKYSIGLDIGTNSVGWAVITDEYKVPSKKFKVLGNTDRHSIKKNLIGALLFDSGETAEATRLKRTARRRYTRRKNRICYLQEIFSNEMAKVDDSFFHRLEESFLVEEDKKHERHPIFGNIVDEVAYHEKYPTIYHLRKKLVDSTDKADLRLIYLALAHMIKFRGHFLIEGDLNPDNSDVDKLFIQLVQTYNQLFEENPINASGVDAKAILSARLSKSRRLENLIAQLPGEKKNGLFGNLIALSLGLTPNFKSNFDLAEDAKLQLSKDTYDDDLDNLLAQIGDQYADLFLAAKNLSDAILLSDILRVNTEITKAPLSASMIKRYDEHHQDLTLLKALVRQQLPEKYKEIFFDQSKNGYAGYIDGGASQEEFYKFIKPILEKMDGTEELLVKLNREDLLRKQRTFDNGSIPHQIHLGELHAILRRQEDFYPFLKDNREKIEKILTFRIPYYVGPLARGNSRFAWMTRKSEETITPWNFEEVVDKGASAQSFIERMTNFDKNLPNEKVLPKHSLLYEYFTVYNELTKVKYVTEGMRKPAFLSGEQKKAIVDLLFKTNRKVTVKQLKEDYFKKIECFDSVEISGVEDRFNASLGTYHDLLKIIKDKDFLDNEENEDILEDIVLTLTLFEDREMIEERLKTYAHLFDDKVMKQLKRRRYTGWGRLSRKLINGIRDKQSGKTILDFLKSDGFANRNFMQLIHDDSLTFKEDIQKAQVSGQGDSLHEHIANLAGSPAIKKGILQTVKVVDELVKVMGRHKPENIVIEMARENQTTQKGQKNSRERMKRIEEGIKELGSQILKEHPVENTQLQNEKLYLYYLQNGRDMYVDQELDINRLSDYDVDHIVPQSFLKDDSIDNKVLTRSDKARGKSDNVPSEEVVKKMKNYWRQLLNAKLITQRKFDNLTKAERGGLSELDKAGFIKRQLVETRQITKHVAQILDSRMNTKYDENDKLIREVKVITLKSKLVSDFRKDFQFYKVREINNYHHAHDAYLNAVVGTALIKKYPKLESEFVYGDYKVYDVRKMIAKSEQEIGKATAKYFFYSNIMNFFKTEITLANGEIRKRPLIETNGETGEIVWDKGRDFATVRKVLSMPQVNIVKKTEVQTGGFSKESILPKRNSDKLIARKKDWDPKKYGGFDSPTVAYSVLVVAKVEKGKSKKLKSVKELLGITIMERSSFEKNPIDFLEAKGYKEVKKDLIIKLPKYSLFELENGRKRMLASAGELQKGNELALPSKYVNFLYLASHYEKLKGSPEDNEQKQLFVEQHKHYLDEIIEQISEFSKRVILADANLDKVLSAYNKHRDKPIREQAENIIHLFTLTNLGAPAAFKYFDTTIDRKRYTSTKEVLDATLIHQSITGLYETRIDLSQLGGDGGGGSEAAAKGGIPWLMKKPLQLTTLVPLQEYEERLLKQTMLTGSYKEKLQSLFLKYDALWQHWENQVGHRRIKPHHIATGTVNPRPQKQYPINPKAKASIQTVINDLLKQGVLIQQNSIMNTPVYPVPKPDGKWRMVLDYREVNKTIPLIAAQNQHSAGILSSIFRGKYKTTLDLSNGFWAHSITPESYWLTAFTWLGQQYCWTRLPQGFLNSPALFNADVVDLLKEVPNVQVYVDDIYISHDDPREHLEQLEKVFSLLLNAGYVVSLKKSEIAQHEVEFLGFNITKEGRGLTETFKQKLLNITPPRDLKQLQSILGLLNFARNFIPNFSELVKPLYNIIATAPGKYITWTTDNSQQLQNIISMLNSAENLEERNPEVRLIMKVNTSPSAGYIRFYNEFAKRPIMYLNYVYTKAEVKFTNTEKLLTTIHKGLIKALDLGMGQEILVYSPIVSMTKIQKTPLPERKALPIRWITWMSYLEDPRIQFHYDKTLPELQQVPTVTDDIIAKIKHPSEFSMVFYTDGSAIKHPNVNKSHNAGMGIAQVQFKPEFTVINTWSIPLGDHTAQLAEVAAVEFACKKALKIDGPVLIVTDSFYVAESVNKELPYWQSNGFFNNKKKPLKHVSKWKSIADCIQLKPDIIIIHEKGHQPTASTFHTEGNNLADKLATQGSYVVNAGKRTADGSEFEKRTADGSEFESPKKKAKVE

SEQ ID NO: 6629 - protein, 2091 aa, synthetic construct
MPAAKRVKLDGGDKKYSIGLDIGTNSVGWAVITDEYKVPSKKFKVLGNTDRHSIKKNLIGALLFDSGETAEATRLKRTARRRYTRRKNRICYLQEIFSNEMAKVDDSFFHRLEESFLVEEDKKHERHPIFGNIVDEVAYHEKYPTIYHLRKKLVDSTDKADLRLIYLALAHMIKFRGHFLIEGDLNPDNSDVDKLFIQLVQTYNQLFEENPINASGVDAKAILSARLSKSRRLENLIAQLPGEKKNGLFGNLIALSLGLTPNFKSNFDLAEDAKLQLSKDTYDDDLDNLLAQIGDQYADLFLAAKNLSDAILLSDILRVNTEITKAPLSASMIKRYDEHHQDLTLLKALVRQQLPEKYKEIFFDQSKNGYAGYIDGGASQEEFYKFIKPILEKMDGTEELLVKLNREDLLRKQRTFDNGSIPHQIHLGELHAILRRQEDFYPFLKDNREKIEKILTFRIPYYVGPLARGNSRFAWMTRKSEETITPWNFEEVVDKGASAQSFIERMTNFDKNLPNEKVLPKHSLLYEYFTVYNELTKVKYVTEGMRKPAFLSGEQKKAIVDLLFKTNRKVTVKQLKEDYFKKIECFDSVEISGVEDRFNASLGTYHDLLKIIKDKDFLDNEENEDILEDIVLTLTLFEDREMIEERLKTYAHLFDDKVMKQLKRRRYTGWGRLSRKLINGIRDKQSGKTILDFLKSDGFANRNFMQLIHDDSLTFKEDIQKAQVSGQGDSLHEHIANLAGSPAIKKGILQTVKVVDELVKVMGRHKPENIVIEMARENQTTQKGQKNSRERMKRIEEGIKELGSQILKEHPVENTQLQNEKLYLYYLQNGRDMYVDQELDINRLSDYDVDHIVPQSFLKDDSIDNKVLTRSDKARGKSDNVPSEEVVKKMKNYWRQLLNAKLITQRKFDNLTKAERGGLSELDKAGFIKRQLVETRQITKHVAQILDSRMNTKYDENDKLIREVKVITLKSKLVSDFRKDFQFYKVREINNYHHAHDAYLNAVVGTALIKKYPKLESEFVYGDYKVYDVRKMIAKSEQEIGKATAKYFFYSNIMNFFKTEITLANGEIRKRPLIETNGETGEIVWDKGRDFATVRKVLSMPQVNIVKKTEVQTGGFSKESILPKRNSDKLIARKKDWDPKKYGGFDSPTVAYSVLVVAKVEKGKSKKLKSVKELLGITIMERSSFEKNPIDFLEAKGYKEVKKDLIIKLPKYSLFELENGRKRMLASAGELQKGNELALPSKYVNFLYLASHYEKLKGSPEDNEQKQLFVEQHKHYLDEIIEQISEFSKRVILADANLDKVLSAYNKHRDKPIREQAENIIHLFTLTNLGAPAAFKYFDTTIDRKRYTSTKEVLDATLIHQSITGLYETRIDLSQLGGDGGGGSEAAAKGGVLNLEEEYRLHEKPVPSSIDPSWLQLFPTVWAERAGMGLANQVPPVVVELRSGASPVAVRQYPMSKEAREGIRPHIQRFLDLGVLVPCQSPWNTPLLPVKKPGTNDYRPVQDLREINKRVQDIHPTVPNPYNLLSSLPPSHTWYSVLDLKDAFFCLKLHPNSQPLFAFEWRDPEKGNTGQLTWTRLPQGFKNSPTLFNEALHRDLAPFRALNPQVVLLQYVDDLLVAAPTYRDCKEGTQKLLQELSKLGYRVSAKKAQLCQKEVTYLGYLLKEGKRWLTPARKATVMKIPPPTTPRQVREFLGKAGFCRLFIPGFASLAAPLYPLTKPSIPFIWTEEHQKAFDRIKEALLSAPALALPDLTKPFTLYVDERAGVARGVLTQTLGPWRRPVAYLSKKLDPVASGWPTCLKAVAAVALLLKDADKLTLGQNVTVIASHSLESIVRQPPDRWMTNARMTHYQSLLLNERVSFAPPAVLNPATLLPVESEATPVHRCSEILAEETGTRRDLKDQPLPGVPAWYTDGSSFIAEGKRRAGAAIVDGKRTVWASSLPEGTSAQKAELVALTQALRLAEGKDINIYTDSRYAFATAHIHGAIYKQRGWLTSAGKDIKNKEEILALLEAIHLPKRVAIIHCPGHQKGNDPVATGNRRADEAAKQAALSTRVLAETTKPAGKRTADGSEFEKRTADGSEFESPKKKAKVE

SEQ ID NO: 6630 - protein, 2092 aa, synthetic construct
MPAAKRVKLDGGDKKYSIGLDIGTNSVGWAVITDEYKVPSKKFKVLGNTDRHSIKKNLIGALLFDSGETAEATRLKRTARRRYTRRKNRICYLQEIFSNEMAKVDDSFFHRLEESFLVEEDKKHERHPIFGNIVDEVAYHEKYPTIYHLRKKLVDSTDKADLRLIYLALAHMIKFRGHFLIEGDLNPDNSDVDKLFIQLVQTYNQLFEENPINASGVDAKAILSARLSKSRRLENLIAQLPGEKKNGLFGNLIALSLGLTPNFKSNFDLAEDAKLQLSKDTYDDDLDNLLAQIGDQYADLFLAAKNLSDAILLSDILRVNTEITKAPLSASMIKRYDEHHQDLTLLKALVRQQLPEKYKEIFFDQSKNGYAGYIDGGASQEEFYKFIKPILEKMDGTEELLVKLNREDLLRKQRTFDNGSIPHQIHLGELHAILRRQEDFYPFLKDNREKIEKILTFRIPYYVGPLARGNSRFAWMTRKSEETITPWNFEEVVDKGASAQSFIERMTNFDKNLPNEKVLPKHSLLYEYFTVYNELTKVKYVTEGMRKPAFLSGEQKKAIVDLLFKTNRKVTVKQLKEDYFKKIECFDSVEISGVEDRFNASLGTYHDLLKIIKDKDFLDNEENEDILEDIVLTLTLFEDREMIEERLKTYAHLFDDKVMKQLKRRRYTGWGRLSRKLINGIRDKQSGKTILDFLKSDGFANRNFMQLIHDDSLTFKEDIQKAQVSGQGDSLHEHIANLAGSPAIKKGILQTVKVVDELVKVMGRHKPENIVIEMARENQTTQKGQKNSRERMKRIEEGIKELGSQILKEHPVENTQLQNEKLYLYYLQNGRDMYVDQELDINRLSDYDVDHIVPQSFLKDDSIDNKVLTRSDKARGKSDNVPSEEVVKKMKNYWRQLLNAKLITQRKFDNLTKAERGGLSELDKAGFIKRQLVETRQITKHVAQILDSRMNTKYDENDKLIREVKVITLKSKLVSDFRKDFQFYKVREINNYHHAHDAYLNAVVGTALIKKYPKLESEFVYGDYKVYDVRKMIAKSEQEIGKATAKYFFYSNIMNFFKTEITLANGEIRKRPLIETNGETGEIVWDKGRDFATVRKVLSMPQVNIVKKTEVQTGGFSKESILPKRNSDKLIARKKDWDPKKYGGFDSPTVAYSVLVVAKVEKGKSKKLKSVKELLGITIMERSSFEKNPIDFLEAKGYKEVKKDLIIKLPKYSLFELENGRKRMLASAGELQKGNELALPSKYVNFLYLASHYEKLKGSPEDNEQKQLFVEQHKHYLDEIIEQISEFSKRVILADANLDKVLSAYNKHRDKPIREQAENIIHLFTLTNLGAPAAFKYFDTTIDRKRYTSTKEVLDATLIHQSITGLYETRIDLSQLGGDGGEAAAKGGSGGTLQLEEEYRLFEPESTQKQEMDIWLKNFPQAWAETGGMGTAHCQAPVLIQLKATATPISIRQYPMPHEAYQGIKPHIRRMLDQGILKPCQSPWNTPLLPVKKPGTEDYRPVQDLREVNKRVEDIHPTVPNPYNLLSTLPPSHPWYTVLDLKDAFFCLRLHSESQLLFAFEWRDPEIGLSGQLTWTRLPQGFKNSPTLFNEALHSDLADFRVRYPALVLLQYVDDLLLAAATRTECLEGTKALLETLGNKGYRASAKKAQICLQEVTYLGYSLKDGQRWLTKARKEAILSIPVPKNSRQVREFLGKAGYCRLFIPGFAELAAPLYPLTRPGTLFQWGTEQQLAFEDIKKALLSSPALGLPDITKPFELFIDENSGFAKGVLVQKLGPWKRPVAYLSKKLDTVASGWPPCLRMVAAIAILVKDAGKLTLGQPLTILTSHPVEALVRQPPNKWLSNARMTHYQAMLLDAERVHFGPTVSLNPATLLPLPSGGNHHDCLQILAETHGTRPDLTDQPLPDADLTWYTDGSSFIRNGEREAGAAVTTESEVIWAAPLPPGTSAQRAELIALTQALKMAEGKKLTVYTDSRYAFATTHVHGEIYRRRGWLTSEGKEIKNKNEILALLEALFLPKRLSIIHCPGHQKGDSPQAKGNRLADDTAKKAATETHSSLTVLPAGKRTADGSEFEKRTADGSEFESPKKKAKVE

SEQ ID NO: 6631 - protein, 2091 aa, synthetic construct
MPAAKRVKLDGGDKKYSIGLDIGTNSVGWAVITDEYKVPSKKFKVLGNTDRHSIKKNLIGALLFDSGETAEATRLKRTARRRYTRRKNRICYLQEIFSNEMAKVDDSFFHRLEESFLVEEDKKHERHPIFGNIVDEVAYHEKYPTIYHLRKKLVDSTDKADLRLIYLALAHMIKFRGHFLIEGDLNPDNSDVDKLFIQLVQTYNQLFEENPINASGVDAKAILSARLSKSRRLENLIAQLPGEKKNGLFGNLIALSLGLTPNFKSNFDLAEDAKLQLSKDTYDDDLDNLLAQIGDQYADLFLAAKNLSDAILLSDILRVNTEITKAPLSASMIKRYDEHHQDLTLLKALVRQQLPEKYKEIFFDQSKNGYAGYIDGGASQEEFYKFIKPILEKMDGTEELLVKLNREDLLRKQRTFDNGSIPHQIHLGELHAILRRQEDFYPFLKDNREKIEKILTFRIPYYVGPLARGNSRFAWMTRKSEETITPWNFEEVVDKGASAQSFIERMTNFDKNLPNEKVLPKHSLLYEYFTVYNELTKVKYVTEGMRKPAFLSGEQKKAIVDLLFKTNRKVTVKQLKEDYFKKIECFDSVEISGVEDRFNASLGTYHDLLKIIKDKDFLDNEENEDILEDIVLTLTLFEDREMIEERLKTYAHLFDDKVMKQLKRRRYTGWGRLSRKLINGIRDKQSGKTILDFLKSDGFANRNFMQLIHDDSLTFKEDIQKAQVSGQGDSLHEHIANLAGSPAIKKGILQTVKVVDELVKVMGRHKPENIVIEMARENQTTQKGQKNSRERMKRIEEGIKELGSQILKEHPVENTQLQNEKLYLYYLQNGRDMYVDQELDINRLSDYDVDHIVPQSFLKDDSIDNKVLTRSDKARGKSDNVPSEEVVKKMKNYWRQLLNAKLITQRKFDNLTKAERGGLSELDKAGFIKRQLVETRQITKHVAQILDSRMNTKYDENDKLIREVKVITLKSKLVSDFRKDFQFYKVREINNYHHAHDAYLNAVVGTALIKKYPKLESEFVYGDYKVYDVRKMIAKSEQEIGKATAKYFFYSNIMNFFKTEITLANGEIRKRPLIETNGETGEIVWDKGRDFATVRKVLSMPQVNIVKKTEVQTGGFSKESILPKRNSDKLIARKKDWDPKKYGGFDSPTVAYSVLVVAKVEKGKSKKLKSVKELLGITIMERSSFEKNPIDFLEAKGYKEVKKDLIIKLPKYSLFELENGRKRMLASAGELQKGNELALPSKYVNFLYLASHYEKLKGSPEDNEQKQLFVEQHKHYLDEIIEQISEFSKRVILADANLDKVLSAYNKHRDKPIREQAENIIHLFTLTNLGAPAAFKYFDTTIDRKRYTSTKEVLDATLIHQSITGLYETRIDLSQLGGDGGEAAAKGGSGGVLNLEEEYRLHEKPVPSSIDPSWLQLFPTVWAERAGMGLANQVPPVVVELRSGASPVAVRQYPMSKEAREGIRPHIQKFLDLGVLVPCRSPWNTPLLPVKKPGTNDYRPVQDLREINKRVQDIHPTVPNPYNLLSSLPPSYTWYSVLDLKDAFFCLRLHPNSQPLFAFEWKDPEKGNTGQLTWTRLPQGFKNSPTLFNEALHRDLAPFRALNPQVVLLQYVDDLLVAAPTYEDCKKGTQKLLQELSKLGYRVSAKKAQLCQREVTYLGYLLKEGKRWLTPARKATVMKIPVPTTPRQVREFLGKAGFCRLFIPGFASLAAPLYPLTKPSIPFIWTEEHQQAFDHIKKALLSAPALALPDLTKPFTLYIDERAGVARGVLTQTLGPWRRPVAYLSKKLDPVASGWPTCLKAVAAVALLLKDADKLTLGQNVTVIASHSLESIVRQPPDRWMTNARMTHYQSLLLNERVSFAPPAVLNPATLLPVESEATPVHRCSEILAEETGTRRDLEDQPLPGVPTWYTDGSSFITEGKRRAGAPIVDGKRTVWASSLPEGTSAQKAELVALTQALRLAEGKNINIYTDSRYAFATAHIHGAIYKQRGWLTSAGKDIKNKEEILALLEAIHLPRRVAIIHCPGHQRGSNPVATGNRRADEAAKQAALSTRVLAGTTKPAGKRTADGSEFEKRTADGSEFESPKKKAKVE

SEQ ID NO: 6632 - protein, 2093 aa, synthetic construct
MPAAKRVKLDGGDKKYSIGLDIGTNSVGWAVITDEYKVPSKKFKVLGNTDRHSIKKNLIGALLFDSGETAEATRLKRTARRRYTRRKNRICYLQEIFSNEMAKVDDSFFHRLEESFLVEEDKKHERHPIFGNIVDEVAYHEKYPTIYHLRKKLVDSTDKADLRLIYLALAHMIKFRGHFLIEGDLNPDNSDVDKLFIQLVQTYNQLFEENPINASGVDAKAILSARLSKSRRLENLIAQLPGEKKNGLFGNLIALSLGLTPNFKSNFDLAEDAKLQLSKDTYDDDLDNLLAQIGDQYADLFLAAKNLSDAILLSDILRVNTEITKAPLSASMIKRYDEHHQDLTLLKALVRQQLPEKYKEIFFDQSKNGYAGYIDGGASQEEFYKFIKPILEKMDGTEELLVKLNREDLLRKQRTFDNGSIPHQIHLGELHAILRRQEDFYPFLKDNREKIEKILTFRIPYYVGPLARGNSRFAWMTRKSEETITPWNFEEVVDKGASAQSFIERMTNFDKNLPNEKVLPKHSLLYEYFTVYNELTKVKYVTEGMRKPAFLSGEQKKAIVDLLFKTNRKVTVKQLKEDYFKKIECFDSVEISGVEDRFNASLGTYHDLLKIIKDKDFLDNEENEDILEDIVLTLTLFEDREMIEERLKTYAHLFDDKVMKQLKRRRYTGWGRLSRKLINGIRDKQSGKTILDFLKSDGFANRNFMQLIHDDSLTFKEDIQKAQVSGQGDSLHEHIANLAGSPAIKKGILQTVKVVDELVKVMGRHKPENIVIEMARENQTTQKGQKNSRERMKRIEEGIKELGSQILKEHPVENTQLQNEKLYLYYLQNGRDMYVDQELDINRLSDYDVDHIVPQSFLKDDSIDNKVLTRSDKARGKSDNVPSEEVVKKMKNYWRQLLNAKLITQRKFDNLTKAERGGLSELDKAGFIKRQLVETRQITKHVAQILDSRMNTKYDENDKLIREVKVITLKSKLVSDFRKDFQFYKVREINNYHHAHDAYLNAVVGTALIKKYPKLESEFVYGDYKVYDVRKMIAKSEQEIGKATAKYFFYSNIMNFFKTEITLANGEIRKRPLIETNGETGEIVWDKGRDFATVRKVLSMPQVNIVKKTEVQTGGFSKESILPKRNSDKLIARKKDWDPKKYGGFDSPTVAYSVLVVAKVEKGKSKKLKSVKELLGITIMERSSFEKNPIDFLEAKGYKEVKKDLIIKLPKYSLFELENGRKRMLASAGELQKGNELALPSKYVNFLYLASHYEKLKGSPEDNEQKQLFVEQHKHYLDEIIEQISEFSKRVILADANLDKVLSAYNKHRDKPIREQAENIIHLFTLTNLGAPAAFKYFDTTIDRKRYTSTKEVLDATLIHQSITGLYETRIDLSQLGGDGGEAAAKGGSGGTLGIEDEYRLHETSTEPDVSLGSTWLSDFPQAWAETGGMGLAVRQAPLIIPLKATSTPVSIQQYPMSHEARLGIKPHIQRLLDQGILVPCQSPWNTPLLPVKKPGTNDYRPVQDLREVNKRVEDIHPTVPNPYNLLSGLPPSHQWYTVLDLKDAFFCLRLHPTSQPLFAFEWRDPGMGISGQLTWTRLPQGFKNSPTLFNEALHRDLADFRIQHPDLILLQYVDDILLAATSELDCQQGTRALLQTLGDLGYRASAKKAQICQKQVKYLGYLLREGQRWLTEARKETVMGQPVPKTPRQLREFLGTAGFCRLWIPGFAEMAAPLYPLTKPGTLFSWGPDQQKAYQEIKQALLTAPALGLPDLTKPFELFVDEKQGYAKGVLTQKLGPWRRPVAYLSKKLDPVAAGWPPCLRMVAAIAVLTKDAGKLTMGQPLVILAPHAVEALVKQPPDRWLSNARMTHYQAMLLDTDRVQFGPVVALNPATLLPLPEEGAPHDCLEILAETHGTRPDLTDQPIPDADHTWYTDGSSFLQEGQRKAGAAVTTETEVIWAGALPAGTSAQRAELIALTQALKMAEGKRLNVYTDSRYAFATAHIHGEIYRRRGWLTSEGREIKNKSEILALLKALFLPKRLSIIHCLGHQKGDSAEARGNRLADQAAREAAIKTPPDTSTLLAGKRTADGSEFEKRTADGSEFESPKKKAKVE

SEQ ID NO: 6633 - protein, 2093 aa, synthetic construct
MPAAKRVKLDGGDKKYSIGLDIGTNSVGWAVITDEYKVPSKKFKVLGNTDRHSIKKNLIGALLFDSGETAEATRLKRTARRRYTRRKNRICYLQEIFSNEMAKVDDSFFHRLEESFLVEEDKKHERHPIFGNIVDEVAYHEKYPTIYHLRKKLVDSTDKADLRLIYLALAHMIKFRGHFLIEGDLNPDNSDVDKLFIQLVQTYNQLFEENPINASGVDAKAILSARLSKSRRLENLIAQLPGEKKNGLFGNLIALSLGLTPNFKSNFDLAEDAKLQLSKDTYDDDLDNLLAQIGDQYADLFLAAKNLSDAILLSDILRVNTEITKAPLSASMIKRYDEHHQDLTLLKALVRQQLPEKYKEIFFDQSKNGYAGYIDGGASQEEFYKFIKPILEKMDGTEELLVKLNREDLLRKQRTFDNGSIPHQIHLGELHAILRRQEDFYPFLKDNREKIEKILTFRIPYYVGPLARGNSRFAWMTRKSEETITPWNFEEVVDKGASAQSFIERMTNFDKNLPNEKVLPKHSLLYEYFTVYNELTKVKYVTEGMRKPAFLSGEQKKAIVDLLFKTNRKVTVKQLKEDYFKKIECFDSVEISGVEDRFNASLGTYHDLLKIIKDKDFLDNEENEDILEDIVLTLTLFEDREMIEERLKTYAHLFDDKVMKQLKRRRYTGWGRLSRKLINGIRDKQSGKTILDFLKSDGFANRNFMQLIHDDSLTFKEDIQKAQVSGQGDSLHEHIANLAGSPAIKKGILQTVKVVDELVKVMGRHKPENIVIEMARENQTTQKGQKNSRERMKRIEEGIKELGSQILKEHPVENTQLQNEKLYLYYLQNGRDMYVDQELDINRLSDYDVDHIVPQSFLKDDSIDNKVLTRSDKARGKSDNVPSEEVVKKMKNYWRQLLNAKLITQRKFDNLTKAERGGLSELDKAGFIKRQLVETRQITKHVAQILDSRMNTKYDENDKLIREVKVITLKSKLVSDFRKDFQFYKVREINNYHHAHDAYLNAVVGTALIKKYPKLESEFVYGDYKVYDVRKMIAKSEQEIGKATAKYFFYSNIMNFFKTEITLANGEIRKRPLIETNGETGEIVWDKGRDFATVRKVLSMPQVNIVKKTEVQTGGFSKESILPKRNSDKLIARKKDWDPKKYGGFDSPTVAYSVLVVAKVEKGKSKKLKSVKELLGITIMERSSFEKNPIDFLEAKGYKEVKKDLIIKLPKYSLFELENGRKRMLASAGELQKGNELALPSKYVNFLYLASHYEKLKGSPEDNEQKQLFVEQHKHYLDEIIEQISEFSKRVILADANLDKVLSAYNKHRDKPIREQAENIIHLFTLTNLGAPAAFKYFDTTIDRKRYTSTKEVLDATLIHQSITGLYETRIDLSQLGGDGGEAAAKGGSGGTLGIEDEYRLHETSTEPDVSLGSTWLSDFPQAWAETGGMGLAVRQAPLIIPLKATSTPVSIQQYPMSHEARLGIKPHIQRLLDQGILVPCQSPWNTPLLPVKKPGTNDYRPVQDLREVNKRVEDIHPTVPNPYNLLSGLPPSHQWYTVLDLKDAFFCLRLHPTSQPLFAFEWRDPGMGISGQLTWTRLPQGFKNSPTLFDEALHRDLADFRIQHPDLILLQYVDDILLAATSELDCQQGTRALLQTLGDLGYRASAKKAQICQKQVKYLGYLLREGQRWLTEARKETVMGQPVPKTPRQLREFLGTAGFCRLWIPGFAEMAAPLYPLTKTGTLFSWGPDQQKAYQEIKQALLTAPALGLPDLTKPFELFVDEKQGYAKGVLTQKLGPWRRPVAYLSKKLDPVAAGWPPCLRMVAAIAVLTKDAGKLTMGQPLVILAPHAVEALVKQPPDRWLSNARMTHYQAMLLDTDRVQFGPVVALNPATLLPLPEEGAPHDCLEILAETHGTRPDLTDQPIPDADHTWYTDGSSFLQEGQRKAGAAVTTETEVIWAGALPAGTSAQRAELIALTQALKMAEGKRLNVYTDSRYAFATAHIHGEIYRRRGLLTSEGREIKNKSEILALLKALFLPKRLSIIHCLGHQKGDSAEARGNRLADQAAREAAIKTPPDTSTLLAGKRTADGSEFEKRTADGSEFESPKKKAKVE

SEQ ID NO: 6634 - protein, 2093 aa, synthetic construct; identical to SEQ ID NO: 6632

SEQ ID NO: 6635 - protein, 2087 aa, synthetic construct
MPAAKRVKLDGGDKKYSIGLDIGTNSVGWAVITDEYKVPSKKFKVLGNTDRHSIKKNLIGALLFDSGETAEATRLKRTARRRYTRRKNRICYLQEIFSNEMAKVDDSFFHRLEESFLVEEDKKHERHPIFGNIVDEVAYHEKYPTIYHLRKKLVDSTDKADLRLIYLALAHMIKFRGHFLIEGDLNPDNSDVDKLFIQLVQTYNQLFEENPINASGVDAKAILSARLSKSRRLENLIAQLPGEKKNGLFGNLIALSLGLTPNFKSNFDLAEDAKLQLSKDTYDDDLDNLLAQIGDQYADLFLAAKNLSDAILLSDILRVNTEITKAPLSASMIKRYDEHHQDLTLLKALVRQQLPEKYKEIFFDQSKNGYAGYIDGGASQEEFYKFIKPILEKMDGTEELLVKLNREDLLRKQRTFDNGSIPHQIHLGELHAILRRQEDFYPFLKDNREKIEKILTFRIPYYVGPLARGNSRFAWMTRKSEETITPWNFEEVVDKGASAQSFIERMTNFDKNLPNEKVLPKHSLLYEYFTVYNELTKVKYVTEGMRKPAFLSGEQKKAIVDLLFKTNRKVTVKQLKEDYFKKIECFDSVEISGVEDRFNASLGTYHDLLKIIKDKDFLDNEENEDILEDIVLTLTLFEDREMIEERLKTYAHLFDDKVMKQLKRRRYTGWGRLSRKLINGIRDKQSGKTILDFLKSDGFANRNFMQLIHDDSLTFKEDIQKAQVSGQGDSLHEHIANLAGSPAIKKGILQTVKVVDELVKVMGRHKPENIVIEMARENQTTQKGQKNSRERMKRIEEGIKELGSQILKEHPVENTQLQNEKLYLYYLQNGRDMYVDQELDINRLSDYDVDHIVPQSFLKDDSIDNKVLTRSDKARGKSDNVPSEEVVKKMKNYWRQLLNAKLITQRKFDNLTKAERGGLSELDKAGFIKRQLVETRQITKHVAQILDSRMNTKYDENDKLIREVKVITLKSKLVSDFRKDFQFYKVREINNYHHAHDAYLNAVVGTALIKKYPKLESEFVYGDYKVYDVRKMIAKSEQEIGKATAKYFFYSNIMNFFKTEITLANGEIRKRPLIETNGETGEIVWDKGRDFATVRKVLSMPQVNIVKKTEVQTGGFSKESILPKRNSDKLIARKKDWDPKKYGGFDSPTVAYSVLVVAKVEKGKSKKLKSVKELLGITIMERSSFEKNPIDFLEAKGYKEVKKDLIIKLPKYSLFELENGRKRMLASAGELQKGNELALPSKYVNFLYLASHYEKLKGSPEDNEQKQLFVEQHKHYLDEIIEQISEFSKRVILADANLDKVLSAYNKHRDKPIREQAENIIHLFTLTNLGAPAAFKYFDTTIDRKRYTSTKEVLDATLIHQSITGLYETRIDLSQLGGDGGEAAAKGGSGGTLQLDDEYRLYSPLVKPDQNIQFWLEQFPQAWAETAGMGLAKQVPPQVIQLKASATPVSVRQYPLSKEAQEGIRPHVQRLIQQGILVPVQSPWNTPLLPVRKPGTNDYRPVQDLREVNKRVQDIHPTVPNPYNLLCALPPQRSWYTVLDLKDAFFCLRLHPTSQPLFAFEWRDPGTGRTGQLTWTRLPQGFKNSPTIFDEALHRDLANFRIQHPQVTLLQYVDDLLLAGATKQDCLEGTKALLLELSDLGYRASAKKAQICRREVTYLGYSLRDGQRWLTEARKKTVVQIPAPTTAKQVREFLGTAGFCRLWIPGFATLAAPLYPLTKEKGEFSWAPEHQKAFDAIKKALLSAPALALPDVTKPFTLYVDERKGVARGVLTQTLGPWRRPVAYLSKKLDPVASGWPVCLKAIAAVAILVKDADKLTLGQNITVIAPHALENIVRQPPDRWMTNARMTHYQSLLLTERVTFAPPAALNPATLLPEETDEPVTHDCHQLLIEETGVRKDLTDIPLTGEVLTWFTDGSSYVVEGKRMAGAAVVDGTRTIWASSLPEGTSAQKAELMALTQALRLAEGKSINIYTDSRYAFATAHVHGAIYKQRGLLTSAGREIKNKEEILSLLEALHLPKRLAIIHCPGHQKAKDPISRGNQMADRVAKQAAQGVNLLAGKRTADGSEFEKRTADGSEFESPKKKAKVE

SEQ ID NO: 6636 - protein, 2087 aa, synthetic construct; identical to SEQ ID NO: 6635

SEQ ID NO: 6637 - protein, 2084 aa, synthetic construct
MPAAKRVKLDGGDKKYSIGLDIGTNSVGWAVITDEYKVPSKKFKVLGNTDRHSIKKNLIGALLFDSGETAEATRLKRTARRRYTRRKNRICYLQEIFSNEMAKVDDSFFHRLEESFLVEEDKKHERHPIFGNIVDEVAYHEKYPTIYHLRKKLVDSTDKADLRLIYLALAHMIKFRGHFLIEGDLNPDNSDVDKLFIQLVQTYNQLFEENPINASGVDAKAILSARLSKSRRLENLIAQLPGEKKNGLFGNLIALSLGLTPNFKSNFDLAEDAKLQLSKDTYDDDLDNLLAQIGDQYADLFLAAKNLSDAILLSDILRVNTEITKAPLSASMIKRYDEHHQDLTLLKALVRQQLPEKYKEIFFDQSKNGYAGYIDGGASQEEFYKFIKPILEKMDGTEELLVKLNREDLLRKQRTFDNGSIPHQIHLGELHAILRRQEDFYPFLKDNREKIEKILTFRIPYYVGPLARGNSRFAWMTRKSEETITPWNFEEVVDKGASAQSFIERMTNFDKNLPNEKVLPKHSLLYEYFTVYNELTKVKYVTEGMRKPAFLSGEQKKAIVDLLFKTNRKVTVKQLKEDYFKKIECFDSVEISGVEDRFNASLGTYHDLLKIIKDKDFLDNEENEDILEDIVLTLTLFEDREMIEERLKTYAHLFDDKVMKQLKRRRYTGWGRLSRKLINGIRDKQSGKTILDFLKSDGFANRNFMQLIHDDSLTFKEDIQKAQVSGQGDSLHEHIANLAGSPAIKKGILQTVKVVDELVKVMGRHKPENIVIEMARENQTTQKGQKNSRERMKRIEEGIKELGSQILKEHPVENTQLQNEKLYLYYLQNGRDMYVDQELDINRLSDYDVDHIVPQSFLKDDSIDNKVLTRSDKARGKSDNVPSEEVVKKMKNYWRQLLNAKLITQRKFDNLTKAERGGLSELDKAGFIKRQLVETRQITKHVAQILDSRMNTKYDENDKLIREVKVITLKSKLVSDFRKDFQFYKVREINNYHHAHDAYLNAVVGTALIKKYPKLESEFVYGDYKVYDVRKMIAKSEQEIGKATAKYFFYSNIMNFFKTEITLANGEIRKRPLIETNGETGEIVWDKGRDFATVRKVLSMPQVNIVKKTEVQTGGFSKESILPKRNSDKLIARKKDWDPKKYGGFDSPTVAYSVLVVAKVEKGKSKKLKSVKELLGITIMERSSFEKNPIDFLEAKGYKEVKKDLIIKLPKYSLFELENGRKRMLASAGELQKGNELALPSKYVNFLYLASHYEKLKGSPEDNEQKQLFVEQHKHYLDEIIEQISEFSKRVILADANLDKVLSAYNKHRDKPIREQAENIIHLFTLTNLGAPAAFKYFDTTIDRKRYTSTKEVLDATLIHQSITGLYETRIDLSQLGGDGGEAAAKGGSGGIPWLMKKPLQLTTLVPLQEYEERLLKQTMLTGSYKEKLQSLFLKYDALWQHWENQVGHRRIKPHHIATGTVNPRPQKQYPINPKAKASIQTVINDLLKQGVLIQQNSIMNTPVYPVPKPDGKWRMVLDYREVNKTIPLIAAQNQHSAGILSSIFRGKYKTTLDLSNGFWAHSITPESYWLTAFTWLGQQYCWTRLPQGFLNSPALFNADVVDLLKEVPNVQVYVDDIYISHDDPREHLEQLEKVFSLLLNAGYVVSLKKSEIAQHEVEFLGFNITKEGRGLTETFKQKLLNITPPRDLKQLQSILGLLNFARNFIPNFSELVKPLYNIIATAPGKYITWTTDNSQQLQNIISMLNSAENLEERNPEVRLIMKVNTSPSAGYIRFYNEFAKRPIMYLNYVYTKAEVKFTNTEKLLTTIHKGLIKALDLGMGQEILVYSPIVSMTKIQKTPLPERKALPIRWITWMSYLEDPRIQFHYDKTLPELQQVPTVTDDIIAKIKHPSEFSMVFYTDGSAIKHPNVNKSHNAGMGIAQVQFKPEFTVINTWSIPLGDHTAQLAEVAAVEFACKKALKIDGPVLIVTDSFYVAESVNKELPYWQSNGFFNNKKKPLKHVSKWKSIADCIQLKPDIIIIHEKGHQPTASTFHTEGNNLADKLATQGSYVVNAGKRTADGSEFEKRTADGSEFESPKKKAKVE

SEQ ID NO: 6638 - protein, 2084 aa, synthetic construct
MPAAKRVKLDGGDKKYSIGLDIGTNSVGWAVITDEYKVPSKKFKVLGNTDRHSIKKNLIGALLFDSGETAEATRLKRTARRRYTRRKNRICYLQEIFSNEMAKVDDSFFHRLEESFLVEEDKKHERHPIFGNIVDEVAYHEKYPTIYHLRKKLVDSTDKADLRLIYLALAHMIKFRGHFLIEGDLNPDNSDVDKLFIQLVQTYNQLFEENPINASGVDAKAILSARLSKSRRLENLIAQLPGEKKNGLFGNLIALSLGLTPNFKSNFDLAEDAKLQLSKDTYDDDLDNLLAQIGDQYADLFLAAKNLSDAILLSDILRVNTEITKAPLSASMIKRYDEHHQDLTLLKALVRQQLPEKYKEIFFDQSKNGYAGYIDGGASQEEFYKFIKPILEKMDGTEELLVKLNREDLLRKQRTFDNGSIPHQIHLGELHAILRRQEDFYPFLKDNREKIEKILTFRIPYYVGPLARGNSRFAWMTRKSEETITPWNFEEVVDKGASAQSFIERMTNFDKNLPNEKVLPKHSLLYEYFTVYNELTKVKYVTEGMRKPAFLSGEQKKAIVDLLFKTNRKVTVKQLKEDYFKKIECFDSVEISGVEDRFNASLGTYHDLLKIIKDKDFLDNEENEDILEDIVLTLTLFEDREMIEERLKTYAHLFDDKVMKQLKRRRYTGWGRLSRKLINGIRDKQSGKTILDFLKSDGFANRNFMQLIHDDSLTFKEDIQKAQVSGQGDSLHEHIANLAGSPAIKKGILQTVKVVDELVKVMGRHKPENIVIEMARENQTTQKGQKNSRERMKRIEEGIKELGSQILKEHPVENTQLQNEKLYLYYLQNGRDMYVDQELDINRLSDYDVDHIVPQSFLKDDSIDNKVLTRSDKARGKSDNVPSEEVVKKMKNYWRQLLNAKLITQRKFDNLTKAERGGLSELDKAGFIKRQLVETRQITKHVAQILDSRMNTKYDENDKLIREVKVITLKSKLVSDFRKDFQFYKVREINNYHHAHDAYLNAVVGTALIKKYPKLESEFVYGDYKVYDVRKMIAKSEQEIGKATAKYFFYSNIMNFFKTEITLANGEIRKRPLIETNGETGEIVWDKGRDFATVRKVLSMPQVNIVKKTEVQTGGFSKESILPKRNSDKLIARKKDWDPKKYGGFDSPTVAYSVLVVAKVEKGKSKKLKSVKELLGITIMERSSFEKNPIDFLEAKGYKEVKKDLIIKLPKYSLFELENGRKRMLASAGELQKGNELALPSKYVNFLYLASHYEKLKGSPEDNEQKQLFVEQHKHYLDEIIEQISEFSKRVILADANLDKVLSAYNKHRDKPIREQAENIIHLFTLTNLGAPAAFKYFDTTIDRKRYTSTKEVLDATLIHQSITGLYETRIDLSQLGGDGGEAAAKGGSGGIPWLMKKPLQLTTLVPLQEYEERLLKQTMLTGSYKEKLQSLFLKYDALWQHWENQVGHRRIKPHHIATGTVNPRPQKQYPINPKAKASIQTVINDLLKQGVLIQQNSIMNTPVYPVPKPDGKWRMVLDYREVNKTIPLIAAQNQHSAGILSSIFRGKYKTTLDLSNGFWAHSITPESYWLTAFTWLGQQYCWTRLPQGFLNSPALFNADVVDLLKEVPNVQVYVDDIYISHDDPREHLEQLEKVFSLLLNAGYVVSLKKSEIAQHEVEFLGFNITKEGRGLTETFKQKLLNITPPRDLKQLQSILGKLNFARNFIPNFSELVKPLYNIIATAPGKYITWTTDNSQQLQNIISMLNSAENLEERNPEVRLIMKVNTSPSAGYIRFYNEFAKRPIMYLNYVYTKAEVKFTNTEKLLTTIHKGLIKALDLGMGQEILVYSPIVSMTKIQKTPLPERKALPIRWITWMSYLEDPRIQFHYDKTLPELQQVPTVTDDIIAKIKHPSEFSMVFYTDGSAIKHPNVNKSHNAGMGIAQVQFKPEFTVINTWSIPLGDHTAQLAEVAAVEFACKKALKIDGPVLIVTDSFYVAESVNKELPYWQSNGFFNNKKKPLKHVSKWKSIADCIQLKPDIIIIHEKGHQPTASTFHTEGNNLADKLATQGSYVVNAGKRTADGSEFEKRTADGSEFESPKKKAKVE

SEQ ID NO: 6639 - protein, 2093 aa, synthetic construct
MPAAKRVKLDGGDKKYSIGLDIGTNSVGWAVITDEYKVPSKKFKVLGNTDRHSIKKNLIGALLFDSGETAEATRLKRTARRRYTRRKNRICYLQEIFSNEMAKVDDSFFHRLEESFLVEEDKKHERHPIFGNIVDEVAYHEKYPTIYHLRKKLVDSTDKADLRLIYLALAHMIKFRGHFLIEGDLNPDNSDVDKLFIQLVQTYNQLFEENPINASGVDAKAILSARLSKSRRLENLIAQLPGEKKNGLFGNLIALSLGLTPNFKSNFDLAEDAKLQLSKDTYDDDLDNLLAQIGDQYADLFLAAKNLSDAILLSDILRVNTEITKAPLSASMIKRYDEHHQDLTLLKALVRQQLPEKYKEIFFDQSKNGYAGYIDGGASQEEFYKFIKPILEKMDGTEELLVKLNREDLLRKQRTFDNGSIPHQIHLGELHAILRRQEDFYPFLKDNREKIEKILTFRIPYYVGPLARGNSRFAWMTRKSEETITPWNFEEVVDKGASAQSFIERMTNFDKNLPNEKVLPKHSLLYEYFTVYNELTKVKYVTEGMRKPAFLSGEQKKAIVDLLFKTNRKVTVKQLKEDYFKKIECFDSVEISGVEDRFNASLGTYHDLLKIIKDKDFLDNEENEDILEDIVLTLTLFEDREMIEERLKTYAHLFDDKVMKQLKRRRYTGWGRLSRKLINGIRDKQSGKTILDFLKSDGFANRNFMQLIHDDSLTFKEDIQKAQVSGQGDSLHEHIANLAGSPAIKKGILQTVKVVDELVKVMGRHKPENIVIEMARENQTTQKGQKNSRERMKRIEEGIKELGSQILKEHPVENTQLQNEKLYLYYLQNGRDMYVDQELDINRLSDYDVDHIVPQSFLKDDSIDNKVLTRSDKARGKSDNVPSEEVVKKMKNYWRQLLNAKLITQRKFDNLTKAERGGLSELDKAGFIKRQLVETRQITKHVAQILDSRMNTKYDENDKLIREVKVITLKSKLVSDFRKDFQFYKVREINNYHHAHDAYLNAVVGTALIKKYPKLESEFVYGDYKVYDVRKMIAKSEQEIGKATAKYFFYSNIMNFFKTEITLANGEIRKRPLIETNGETGEIVWDKGRDFATVRKVLSMPQVNIVKKTEVQTGGFSKESILPKRNSDKLIARKKDWDPKKYGGFDSPTVAYSVLVVAKVEKGKSKKLKSVKELLGITIMERSSFEKNPIDFLEAKGYKEVKKDLIIKLPKYSLFELENGRKRMLASAGELQKGNELALPSKYVNFLYLASHYEKLKGSPEDNEQKQLFVEQHKHYLDEIIEQISEFSKRVILADANLDKVLSAYNKHRDKPIREQAENIIHLFTLTNLGAPAAFKYFDTTIDRKRYTSTKEVLDATLIHQSITGLYETRIDLSQLGGDGGEAAAKGGSGGTLNIEDEYRLHETSKEPDVPLGSTWLSDFPQAWAETGGMGLAVRQAPLIIPLKATSTPVSIKQYPMSQEARLGIKPHIQRLLDQGILVPCQSPWNTPLLPVKKPGTNDYRPVQDLREVNKRVEDIHPTVPNPYNLLSGLPPSHQWYTVLDLKDAFFCLRLHPTSQPLFAFEWRDPEMGISGQLTWTRLPQGFKNSPTLFNEALHRDLADFRIQHPDLILLQYVDDLLLAATSEQDCQRGTRALLQTLGNLGYRASAKKAQICQKQVKYLGYLLKEGQRWLTEARKETVMGQPTPKTPRQLREFLGTAGFCRLWIPGFAEMAAPLYPLTKPGTLFNWGPDQQKAYQEIKQALLTAPALGLPDLTKPFELFVDEKQGYAKGVLTQKLGPWRRPVAYLSKKLDPVAAGWPPCLRMVAAIAVLTKDAGKLTMGQPLVILAPHAVEALVKQPPDRWLSNARMTHYQAMLLDTDRVQFGPVVALNPATLLPLPEKEAPHDCLEILAETHGTRPDLTDQPIPDADYTWYTDGSSFLQEGQRRAGAAVTTETEVIWARALPAGTSAQRAELIALTQALKMAEGKKLNVYTDSRYAFATAHVHGEIYRRRGWLTSEGREIKNKNEILALLKALFLPKRLSIIHCPGHQKGNSAEARGNRMADQAAREAAMKAVLETSTLLAGKRTADGSEFEKRTADGSEFESPKKKAKVE

SEQ ID NO: 6640 - protein, 2097 aa, synthetic construct
MPAAKRVKLDGGDKKYSIGLDIGTNSVGWAVITDEYKVPSKKFKVLGNTDRHSIKKNLIGALLFDSGETAEATRLKRTARRRYTRRKNRICYLQEIFSNEMAKVDDSFFHRLEESFLVEEDKKHERHPIFGNIVDEVAYHEKYPTIYHLRKKLVDSTDKADLRLIYLALAHMIKFRGHFLIEGDLNPDNSDVDKLFIQLVQTYNQLFEENPINASGVDAKAILSARLSKSRRLENLIAQLPGEKKNGLFGNLIALSLGLTPNFKSNFDLAEDAKLQLSKDTYDDDLDNLLAQIGDQYADLFLAAKNLSDAILLSDILRVNTEITKAPLSASMIKRYDEHHQDLTLLKALVRQQLPEKYKEIFFDQSKNGYAGYIDGGASQEEFYKFIKPILEKMDGTEELLVKLNREDLLRKQRTFDNGSIPHQIHLGELHAILRRQEDFYPFLKDNREKIEKILTFRIPYYVGPLARGNSRFAWMTRKSEETITPWNFEEVVDKGASAQSFIERMTNFDKNLPNEKVLPKHSLLYEYFTVYNELTKVKYVTEGMRKPAFLSGEQKKAIVDLLFKTNRKVTVKQLKEDYFKKIECFDSVEISGVEDRFNASLGTYHDLLKIIKDKDFLDNEENEDILEDIVLTLTLFEDREMIEERLKTYAHLFDDKVMKQLKRRRYTGWGRLSRKLINGIRDKQSGKTILDFLKSDGFANRNFMQLIHDDSLTFKEDIQKAQVSGQGDSLHEHIANLAGSPAIKKGILQTVKVVDELVKVMGRHKPENIVIEMARENQTTQKGQKNSRERMKRIEEGIKELGSQILKEHPVENTQLQNEKLYLYYLQNGRDMYVDQELDINRLSDYDVDHIVPQSFLKDDSIDNKVLTRSDKARGKSDNVPSEEVVKKMKNYWRQLLNAKLITQRKFDNLTKAERGGLSELDKAGFIKRQLVETRQITKHVAQILDSRMNTKYDENDKLIREVKVITLKSKLVSDFRKDFQFYKVREINNYHHAHDAYLNAVVGTALIKKYPKLESEFVYGDYKVYDVRKMIAKSEQEIGKATAKYFFYSNIMNFFKTEITLANGEIRKRPLIETNGETGEIVWDKGRDFATVRKVLSMPQVNIVKKTEVQTGGFSKESILPKRNSDKLIARKKDWDPKKYGGFDSPTVAYSVLVVAKVEKGKSKKLKSVKELLGITIMERSSFEKNPIDFLEAKGYKEVKKDLIIKLPKYSLFELENGRKRMLASAGELQKGNELALPSKYVNFLYLASHYEKLKGSPEDNEQKQLFVEQHKHYLDEIIEQISEFSKRVILADANLDKVLSAYNKHRDKPIREQAENIIHLFTLTNLGAPAAFKYFDTTIDRKRYTSTKEVLDATLIHQSITGLYETRIDLSQLGGDGGGGSPAPGGTVSLQDEHRLFDIPVTTSLPDVWLQDFPQAWAETGGLGRAKCQAPIIIDLKPTAVPVSIKQYPMSLEAHMGIRQHIIKFLELGVLRPCRSPWNTPLLPVKKPGTQDYRPVQDLREINKRTVDIHPTVPNPYNLLSTLKPDYSWYTVLDLKDAFFCLPLAPQSQELFAFEWKDPERGISGQLTWTRLPQGFKNSPTLFNEALHRDLTDFRTQHPEVTLLQYVDDLLLAAPTKKACTQGTRHLLQELGEKGYRASAKKAQICQTKVTYLGYILSEGKRWLTPGRIETVARIPPPRNPREVREFLGTAGFCRLWIPGFAELAAPLYALTKPSTPFTWQTEHQLAFEALKKALLSAPALGLPDTSKPFTLFLDERQGIAKGVLTQKLGPWKRPVAYLSKKLDPVAAGWPPCLRIMAATAMLVKDSAKLTLGQPLTVITPHTLEAIVRQPPDRWITNARLTHYQALLLDTDRVQFGPPVTLNPATLLPVPENQPSPHDCRQVLAETHGTREDLKDQELPDADHTWYTDGSSYLDSGTRRAGAAVVDGHNTIWAQSLPPGTSAQKAELIALTKALELSKGKKANIYTDSRYAFATAHTHGSIYERRGWLTSEGKEIKNKAEIIALLKALFLPQEVAIIHCPGHQKGQDPVAVGNRQADRVARQAAMAEVLTLATEPDNTSHITAGKRTADGSEFEKRTADGSEFESPKKKAKVE

SEQ ID NO: 6641 - protein, 2168 aa, synthetic construct
MPAAKRVKLDGGDKKYSIGLDIGTNSVGWAVITDEYKVPSKKFKVLGNTDRHSIKKNLIGALLFDSGETAEATRLKRTARRRYTRRKNRICYLQEIFSNEMAKVDDSFFHRLEESFLVEEDKKHERHPIFGNIVDEVAYHEKYPTIYHLRKKLVDSTDKADLRLIYLALAHMIKFRGHFLIEGDLNPDNSDVDKLFIQLVQTYNQLFEENPINASGVDAKAILSARLSKSRRLENLIAQLPGEKKNGLFGNLIALSLGLTPNFKSNFDLAEDAKLQLSKDTYDDDLDNLLAQIGDQYADLFLAAKNLSDAILLSDILRVNTEITKAPLSASMIKRYDEHHQDLTLLKALVRQQLPEKYKEIFFDQSKNGYAGYIDGGASQEEFYKFIKPILEKMDGTEELLVKLNREDLLRKQRTFDNGSIPHQIHLGELHAILRRQEDFYPFLKDNREKIEKILTFRIPYYVGPLARGNSRFAWMTRKSEETITPWNFEEVVDKGASAQSFIERMTNFDKNLPNEKVLPKHSLLYEYFTVYNELTKVKYVTEGMRKPAFLSGEQKKAIVDLLFKTNRKVTVKQLKEDYFKKIECFDSVEISGVEDRFNASLGTYHDLLKIIKDKDFLDNEENEDILEDIVLTLTLFEDREMIEERLKTYAHLFDDKVMKQLKRRRYTGWGRLSRKLINGIRDKQSGKTILDFLKSDGFANRNFMQLIHDDSLTFKEDIQKAQVSGQGDSLHEHIANLAGSPAIKKGILQTVKVVDELVKVMGRHKPENIVIEMARENQTTQKGQKNSRERMKRIEEGIKELGSQILKEHPVENTQLQNEKLYLYYLQNGRDMYVDQELDINRLSDYDVDHIVPQSFLKDDSIDNKVLTRSDKARGKSDNVPSEEVVKKMKNYWRQLLNAKLITQRKFDNLTKAERGGLSELDKAGFIKRQLVETRQITKHVAQILDSRMNTKYDENDKLIREVKVITLKSKLVSDFRKDFQFYKVREINNYHHAHDAYLNAVVGTALIKKYPKLESEFVYGDYKVYDVRKMIAKSEQEIGKATAKYFFYSNIMNFFKTEITLANGEIRKRPLIETNGETGEIVWDKGRDFATVRKVLSMPQVNIVKKTEVQTGGFSKESILPKRNSDKLIARKKDWDPKKYGGFDSPTVAYSVLVVAKVEKGKSKKLKSVKELLGITIMERSSFEKNPIDFLEAKGYKEVKKDLIIKLPKYSLFELENGRKRMLASAGELQKGNELALPSKYVNFLYLASHYEKLKGSPEDNEQKQLFVEQHKHYLDEIIEQISEFSKRVILADANLDKVLSAYNKHRDKPIREQAENIIHLFTLTNLGAPAAFKYFDTTIDRKRYTSTKEVLDATLIHQSITGLYETRIDLSQLGGDGGGGSPAPGGMDLLKPLTVERKGVKIKGYWNSQADITCVPKDLLQGEEPVRQQNVTTIHGTQEGDVYYVNLKIDGRRINTEVIGTTLDYAIITPGDVPWILKKPLELTIKLDLEEQQGTLLNNSILSKKGKEELKQLFEKYSALWQSWENQVGHRRIRPHKIATGTVKPTPQKQYHINPKAKPDIQIVINDLLKQGVLIQKESTMNTPVYPVPKPNGRWRMVLDYRAVNKVTPLIAVQNQHSYGILGSLFKGRYKTTIDLSNGFWAHPIVPEDYWITAFTWQGKQYCWTVLPQGFLNSPGLFNGDVVDLLQGIPNVEVYVDDVYISHDSEKEHLEYLDILFNRLKEAGYIISLKKSNIANSIVDFLGFQITNEGRGLTDTFKEKLENITAPTTLKQLQSILGLLNFARNFIPDFTELIAPLYALIPKSPKNYVPWQIEHSTTLETLITKLNGAEYLQGRKGDKTLIMKVNASYTTGYIRYYNEGEKKPISYVSIVFSKTELKFTELEKLLTTVHKGLLKALDLSMGQNIHVYSPIVSMQNIQKTPQTAKKALASRWLSWLSYLEDPRIRFFYDPQMPALKDLPAVDTGKDNKKHPSNFQHIFYTDGSAITSPTKEGHLNAGMGIVYFINKDGNLQKQQEWSISLGNHTAQFAEIAAFEFALKKCLPLGGNILVVTDSNYVAKAYNEELDVWASNGFVNNRKKPLKHISKWKSVADLKRLRPDVVVTHEPGHQKLDSSPHAYGNNLADQLATQASFKVHAGKRTADGSEFEKRTADGSEFESPKKKAKVE

SEQ ID NO: 6642 - protein, 2090 aa, synthetic construct
MPAAKRVKLDGGDKKYSIGLDIGTNSVGWAVITDEYKVPSKKFKVLGNTDRHSIKKNLIGALLFDSGETAEATRLKRTARRRYTRRKNRICYLQEIFSNEMAKVDDSFFHRLEESFLVEEDKKHERHPIFGNIVDEVAYHEKYPTIYHLRKKLVDSTDKADLRLIYLALAHMIKFRGHFLIEGDLNPDNSDVDKLFIQLVQTYNQLFEENPINASGVDAKAILSARLSKSRRLENLIAQLPGEKKNGLFGNLIALSLGLTPNFKSNFDLAEDAKLQLSKDTYDDDLDNLLAQIGDQYADLFLAAKNLSDAILLSDILRVNTEITKAPLSASMIKRYDEHHQDLTLLKALVRQQLPEKYKEIFFDQSKNGYAGYIDGGASQEEFYKFIKPILEKMDGTEELLVKLNREDLLRKQRTFDNGSIPHQIHLGELHAILRRQEDFYPFLKDNREKIEKILTFRIPYYVGPLARGNSRFAWMTRKSEETITPWNFEEVVDKGASAQSFIERMTNFDKNLPNEKVLPKHSLLYEYFTVYNELTKVKYVTEGMRKPAFLSGEQKKAIVDLLFKTNRKVTVKQLKEDYFKKIECFDSVEISGVEDRFNASLGTYHDLLKIIKDKDFLDNEENEDILEDIVLTLTLFEDREMIEERLKTYAHLFDDKVMKQLKRRRYTGWGRLSRKLINGIRDKQSGKTILDFLKSDGFANRNFMQLIHDDSLTFKEDIQKAQVSGQGDSLHEHIANLAGSPAIKKGILQTVKVVDELVKVMGRHKPENIVIEMARENQTTQKGQKNSRERMKRIEEGIKELGSQILKEHPVENTQLQNEKLYLYYLQNGRDMYVDQELDINRLSDYDVDHIVPQSFLKDDSIDNKVLTRSDKARGKSDNVPSEEVVKKMKNYWRQLLNAKLITQRKFDNLTKAERGGLSELDKAGFIKRQLVETRQITKHVAQILDSRMNTKYDENDKLIREVKVITLKSKLVSDFRKDFQFYKVREINNYHHAHDAYLNAVVGTALIKKYPKLESEFVYGDYKVYDVRKMIAKSEQEIGKATAKYFFYSNIMNFFKTEITLANGEIRKRPLIETNGETGEIVWDKGRDFATVRKVLSMPQVNIVKKTEVQTGGFSKESILPKRNSDKLIARKKDWDPKKYGGFDSPTVAYSVLVVAKVEKGKSKKLKSVKELLGITIMERSSFEKNPIDFLEAKGYKEVKKDLIIKLPKYSLFELENGRKRMLASAGELQKGNELALPSKYVNFLYLASHYEKLKGSPEDNEQKQLFVEQHKHYLDEIIEQISEFSKRVILADANLDKVLSAYNKHRDKPIREQAENIIHLFTLTNLGAPAAFKYFDTTIDRKRYTSTKEVLDATLIHQSITGLYETRIDLSQLGGDGGGGSPAPGGTLQLEEEYRLFEPESTQKQEMDIWLKNFPQAWAETGGMGTAHCQAPVLIQLKATATPISIRQYPMPHEAYQGIKPHIRRMLDQGILKPCQSPWNTPLLPVKKPGTEDYRPVQDLREVNKRVEDIHPTVPNPYNLLSTLPPSHPWYTVLDLKDAFFCLRLHSESQLLFAFEWRDPEIGLSGQLTWTRLPQGFKNSPTLFNEALHSDLADFRVRYPALVLLQYVDDLLLAAATRTECLEGTKALLETLGNKGYRASAKKAQICLQEVTYLGYSLKDGQRWLTKARKEAILSIPVPKNSRQVREFLGKAGYCRLFIPGFAELAAPLYPLTRPGTLFQWGTEQQLAFEDIKKALLSSPALGLPDITKPFELFIDENSGFAKGVLVQKLGPWKRPVAYLSKKLDTVASGWPPCLRMVAAIAILVKDAGKLTLGQPLTILTSHPVEALVRQPPNKWLSNARMTHYQAMLLDAERVHFGPTVSLNPATLLPLPSGGNHHDCLQILAETHGTRPDLTDQPLPDADLTWYTDGSSFIRNGEREAGAAVTTESEVIWAAPLPPGTSAQRAELIALTQALKMAEGKKLTVYTDSRYAFATTHVHGEIYRRRGWLTSEGKEIKNKNEILALLEALFLPKRLSIIHCPGHQKGDSPQAKGNRLADDTAKKAATETHSSLTVLPAGKRTADGSEFEKRTADGSEFESPKKKAKVE

SEQ ID NO: 6643 - protein, 2171 aa, synthetic construct
MPAAKRVKLDGGDKKYSIGLDIGTNSVGWAVITDEYKVPSKKFKVLGNTDRHSIKKNLIGALLFDSGETAEATRLKRTARRRYTRRKNRICYLQEIFSNEMAKVDDSFFHRLEESFLVEEDKKHERHPIFGNIVDEVAYHEKYPTIYHLRKKLVDSTDKADLRLIYLALAHMIKFRGHFLIEGDLNPDNSDVDKLFIQLVQTYNQLFEENPINASGVDAKAILSARLSKSRRLENLIAQLPGEKKNGLFGNLIALSLGLTPNFKSNFDLAEDAKLQLSKDTYDDDLDNLLAQIGDQYADLFLAAKNLSDAILLSDILRVNTEITKAPLSASMIKRYDEHHQDLTLLKALVRQQLPEKYKEIFFDQSKNGYAGYIDGGASQEEFYKFIKPILEKMDGTEELLVKLNREDLLRKQRTFDNGSIPHQIHLGELHAILRRQEDFYPFLKDNREKIEKILTFRIPYYVGPLARGNSRFAWMTRKSEETITPWNFEEVVDKGASAQSFIERMTNFDKNLPNEKVLPKHSLLYEYFTVYNELTKVKYVTEGMRKPAFLSGEQKKAIVDLLFKTNRKVTVKQLKEDYFKKIECFDSVEISGVEDRFNASLGTYHDLLKIIKDKDFLDNEENEDILEDIVLTLTLFEDREMIEERLKTYAHLFDDKVMKQLKRRRYTGWGRLSRKLINGIRDKQSGKTILDFLKSDGFANRNFMQLIHDDSLTFKEDIQKAQVSGQGDSLHEHIANLAGSPAIKKGILQTVKVVDELVKVMGRHKPENIVIEMARENQTTQKGQKNSRERMKRIEEGIKELGSQILKEHPVENTQLQNEKLYLYYLQNGRDMYVDQELDINRLSDYDVDHIVPQSFLKDDSIDNKVLTRSDKARGKSDNVPSEEVVKKMKNYWRQLLNAKLITQRKFDNLTKAERGGLSELDKAGFIKRQLVETRQITKHVAQILDSRMNTKYDENDKLIREVKVITLKSKLVSDFRKDFQFYKVREINNYHHAHDAYLNAVVGTALIKKYPKLESEFVYGDYKVYDVRKMIAKSEQEIGKATAKYFFYSNIMNFFKTEITLANGEIRKRPLIETNGETGEIVWDKGRDFATVRKVLSMPQVNIVKKTEVQTGGFSKESILPKRNSDKLIARKKDWDPKKYGGFDSPTVAYSVLVVAKVEKGKSKKLKSVKELLGITIMERSSFEKNPIDFLEAKGYKEVKKDLIIKLPKYSLFELENGRKRMLASAGELQKGNELALPSKYVNFLYLASHYEKLKGSPEDNEQKQLFVEQHKHYLDEIIEQISEFSKRVILADANLDKVLSAYNKHRDKPIREQAENIIHLFTLTNLGAPAAFKYFDTTIDRKRYTSTKEVLDATLIHQSITGLYETRIDLSQLGGDGGGGSPAPGGMNPLQLLQPLPAEIKGTKLLAHWNSGATITCIPESFLEDEQPIKKTLIKTIHGEKQQNVYYVTFKVKGRKVEAEVIASPYEYILLSPTDVPWLTQQPLQLTILVPLQEYQEKILSKTALPEDQKQQLKTLFVKYDNLWQHWENQVGHRKIRPHNIATGDYPPRPQKQYPINPKAKPSIQIVIDDLLKQGVLTPQNSTMNTPVYPVPKPDGRWRMVLDYREVNKTIPLTAAQNQHSAGILATIVRQKYKTTLDLANGFWAHPITPESYWLTAFTWQGKQYCWTRLPQGFLNSPALFNADVVDLLKEIPNVQVYVDDIYLSHDDPKEHVQQLEKVFQILLQAGYVVSLKKSEIGQKTVEFLGFNITKEGRGLTDTFKTKLLNITPPKDLKQLQSILGKLNFARNFIPNFAELVQPLYNLIAPAKGKYIEWSEENTKQLNMVIEALNTASNLEERLPEQRLVIKVNTSPSAGYVRYYNETGKKPIMYLNYVFSKAELKFSMLEKLLTTMHKALIKAMDLAMGQEILVYSPIVSMTKIQKTPLPERKALPIRWITWMTYLEDPRIQFHYDKTLPELKHIPDVYTSSQSPVKHPSQYEGVFYTDGSAIKSPDPTKSNNAGMGIVHATYKPEYQVLNQWSIPLGNHTAQMAEIAAVEFACKKALKIPGPVLVITDSFYVAESANKELPYWKSNGFVNNKKKPLKHISKWKSIAECLSMKPDITIQHEKGISLQIPVFILKGNALADKLATQGSYVVNAGKRTADGSEFEKRTADGSEFESPKKKAKVE

SEQ ID NO: 6644 - protein, 2089 aa, synthetic construct
MPAAKRVKLDGGDKKYSIGLDIGTNSVGWAVITDEYKVPSKKFKVLGNTDRHSIKKNLIGALLFDSGETAEATRLKRTARRRYTRRKNRICYLQEIFSNEMAKVDDSFFHRLEESFLVEEDKKHERHPIFGNIVDEVAYHEKYPTIYHLRKKLVDSTDKADLRLIYLALAHMIKFRGHFLIEGDLNPDNSDVDKLFIQLVQTYNQLFEENPINASGVDAKAILSARLSKSRRLENLIAQLPGEKKNGLFGNLIALSLGLTPNFKSNFDLAEDAKLQLSKDTYDDDLDNLLAQIGDQYADLFLAAKNLSDAILLSDILRVNTEITKAPLSASMIKRYDEHHQDLTLLKALVRQQLPEKYKEIFFDQSKNGYAGYIDGGASQEEFYKFIKPILEKMDGTEELLVKLNREDLLRKQRTFDNGSIPHQIHLGELHAILRRQEDFYPFLKDNREKIEKILTFRIPYYVGPLARGNSRFAWMTRKSEETITPWNFEEVVDKGASAQSFIERMTNFDKNLPNEKVLPKHSLLYEYFTVYNELTKVKYVTEGMRKPAFLSGEQKKAIVDLLFKTNRKVTVKQLKEDYFKKIECFDSVEISGVEDRFNASLGTYHDLLKIIKDKDFLDNEENEDILEDIVLTLTLFEDREMIEERLKTYAHLFDDKVMKQLKRRRYTGWGRLSRKLINGIRDKQSGKTILDFLKSDGFANRNFMQLIHDDSLTFKEDIQKAQVSGQGDSLHEHIANLAGSPAIKKGILQTVKVVDELVKVMGRHKPENIVIEMARENQTTQKGQKNSRERMKRIEEGIKELGSQILKEHPVENTQLQNEKLYLYYLQNGRDMYVDQELDINRLSDYDVDHIVPQSFLKDDSIDNKVLTRSDKARGKSDNVPSEEVVKKMKNYWRQLLNAKLITQRKFDNLTKAERGGLSELDKAGFIKRQLVETRQITKHVAQILDSRMNTKYDENDKLIREVKVITLKSKLVSDFRKDFQFYKVREINNYHHAHDAYLNAVVGTALIKKYPKLESEFVYGDYKVYDVRKMIAKSEQEIGKATAKYFFYSNIMNFFKTEITLANGEIRKRPLIETNGETGEIVWDKGRDFATVRKVLSMPQVNIVKKTEVQTGGFSKESILPKRNSDKLIARKKDWDPKKYGGFDSPTVAYSVLVVAKVEKGKSKKLKSVKELLGITIMERSSFEKNPIDFLEAKGYKEVKKDLIIKLPKYSLFELENGRKRMLASAGELQKGNELALPSKYVNFLYLASHYEKLKGSPEDNEQKQLFVEQHKHYLDEIIEQISEFSKRVILADANLDKVLSAYNKHRDKPIREQAENIIHLFTLTNLGAPAAFKYFDTTIDRKRYTSTKEVLDATLIHQSITGLYETRIDLSQLGGDGGGGSPAPGGVLNLEEEYRLHEKPVPSSIDPSWLQLFPTVWAERAGMGLANQVPPVVVELRSGASPVAVRQYPMSKEAREGIRPHIQKFLDLGVLVPCRSPWNTPLLPVKKPGTNDYRPVQDLREINKRVQDIHPTVPNPYNLLSSLPPSYTWYSVLDLKDAFFCLRLHPNSQPLFAFEWKDPEKGNTGQLTWTRLPQGFKNSPTLFNEALHRDLAPFRALNPQVVLLQYVDDLLVAAPTYEDCKKGTQKLLQELSKLGYRVSAKKAQLCQREVTYLGYLLKEGKRWLTPARKATVMKIPVPTTPRQVREFLGTAGFCRLWIPGFASLAAPLYPLTKPSIPFIWTEEHQQAFDHIKKALLSAPALALPDLTKPFTLYIDERAGVARGVLTQTLGPWRRPVAYLSKKLDPVASGWPTCLKAVAAVALLLKDADKLTLGQNVTVIASHSLESIVRQPPDRWMTNARMTHYQSLLLNERVSFAPPAVLNPATLLPVESEATPVHRCSEILAEETGTRRDLEDQPLPGVPTWYTDGSSFITEGKRRAGAPIVDGKRTVWASSLPEGTSAQKAELVALTQALRLAEGKNINIYTDSRYAFATAHIHGAIYKQRGWLTSAGKDIKNKEEILALLEAIHLPRRVAIIHCPGHQRGSNPVATGNRRADEAAKQAALSTRVLAGTTKPAGKRTADGSEFEKRTADGSEFESPKKKAKVE

SEQ ID NO: 6645 - protein, 2213 aa, synthetic construct
MPAAKRVKLDGGDKKYSIGLDIGTNSVGWAVITDEYKVPSKKFKVLGNTDRHSIKKNLIGALLFDSGETAEATRLKRTARRRYTRRKNRICYLQEIFSNEMAKVDDSFFHRLEESFLVEEDKKHERHPIFGNIVDEVAYHEKYPTIYHLRKKLVDSTDKADLRLIYLALAHMIKFRGHFLIEGDLNPDNSDVDKLFIQLVQTYNQLFEENPINASGVDAKAILSARLSKSRRLENLIAQLPGEKKNGLFGNLIALSLGLTPNFKSNFDLAEDAKLQLSKDTYDDDLDNLLAQIGDQYADLFLAAKNLSDAILLSDILRVNTEITKAPLSASMIKRYDEHHQDLTLLKALVRQQLPEKYKEIFFDQSKNGYAGYIDGGASQEEFYKFIKPILEKMDGTEELLVKLNREDLLRKQRTFDNGSIPHQIHLGELHAILRRQEDFYPFLKDNREKIEKILTFRIPYYVGPLARGNSRFAWMTRKSEETITPWNFEEVVDKGASAQSFIERMTNFDKNLPNEKVLPKHSLLYEYFTVYNELTKVKYVTEGMRKPAFLSGEQKKAIVDLLFKTNRKVTVKQLKEDYFKKIECFDSVEISGVEDRFNASLGTYHDLLKIIKDKDFLDNEENEDILEDIVLTLTLFEDREMIEERLKTYAHLFDDKVMKQLKRRRYTGWGRLSRKLINGIRDKQSGKTILDFLKSDGFANRNFMQLIHDDSLTFKEDIQKAQVSGQGDSLHEHIANLAGSPAIKKGILQTVKVVDELVKVMGRHKPENIVIEMARENQTTQKGQKNSRERMKRIEEGIKELGSQILKEHPVENTQLQNEKLYLYYLQNGRDMYVDQELDINRLSDYDVDHIVPQSFLKDDSIDNKVLTRSDKARGKSDNVPSEEVVKKMKNYWRQLLNAKLITQRKFDNLTKAERGGLSELDKAGFIKRQLVETRQITKHVAQILDSRMNTKYDENDKLIREVKVITLKSKLVSDFRKDFQFYKVREINNYHHAHDAYLNAVVGTALIKKYPKLESEFVYGDYKVYDVRKMIAKSEQEIGKATAKYFFYSNIMNFFKTEITLANGEIRKRPLIETNGETGEIVWDKGRDFATVRKVLSMPQVNIVKKTEVQTGGFSKESILPKRNSDKLIARKKDWDPKKYGGFDSPTVAYSVLVVAKVEKGKSKKLKSVKELLGITIMERSSFEKNPIDFLEAKGYKEVKKDLIIKLPKYSLFELENGRKRMLASAGELQKGNELALPSKYVNFLYLASHYEKLKGSPEDNEQKQLFVEQHKHYLDEIIEQISEFSKRVILADANLDKVLSAYNKHRDKPIREQAENIIHLFTLTNLGAPAAFKYFDTTIDRKRYTSTKEVLDATLIHQSITGLYETRIDLSQLGGDGGGGSPAPGGTLGDQGSRGSDPLPEPRVTLTVEGIPTEFLVNTGAEHSVLTKPMGKMGSKRTVVAGATGSKVYPWTTKRLLKIGQKQVTHSFLVIPECPAPLLGRDLLTKLKAQIQFSTEGPQVTWEDRPAMCLVLNLEEEYRLHEKPVPPSIDPSWLQLFPMVWAEKAGMGLANQVPPVVVELKSDASPVAVRQYPMSKEAREGIRPHIQRFLDLGILVPCQSPWNTPLLPVKKPGTNDYRPVQDLREVNKRVQDIHPTVPNPYNLLSSLPPSHTWYSVLDLKDAFFCLKLHPNSQPLFAFEWRDPEKGNTGQLTWTRLPQGFKNSPTLFNEALHRDLASFRALNPQVVMLQYVDDLLVAAPTYRDCKEGTRRLLQELSKLGYRVSAKKAQLCREEVTYLGYLLKGGKRWLTPARKATVMKIPTPTTPRQVREFLGTAGFCRLWIPGFASLAAPLYPLTRPKVPFTWTEAHQEAFGRIKEALLSAPALALPDLTKPFALYVDEKEGVARGVLTQTLGPWRRPVAYLSKKLDPVASGWPTCLKAIAAVALLLKDADKLTLGQNVLVIAPHNLESIVRQPPDRWMTNARMTHYQSLLLNERVSFAPPAILNPATLLPVESDDTPIHICSEILAEETGTRPDLRDQPLPGVPAWYTDGSSFIMDGRRQAGAAIVDNKRTVWASNLPEGTSAQKAELIALTQALRLAEGKSINIYTDSRYAFATAHVHGAIYKQRGWLTSAGKDIKNKEEILALLEAIHLPKRVAIIHCPGHQRGTDPVATGNRKADEAAKQAAQSTRILTETTKNAGKRTADGSEFEKRTADGSEFESPKKKAKVE

SEQ ID NO: 6646 - protein, 2213 aa, synthetic construct
MPAAKRVKLDGGDKKYSIGLDIGTNSVGWAVITDEYKVPSKKFKVLGNTDRHSIKKNLIGALLFDSGETAEATRLKRTARRRYTRRKNRICYLQEIFSNEMAKVDDSFFHRLEESFLVEEDKKHERHPIFGNIVDEVAYHEKYPTIYHLRKKLVDSTDKADLRLIYLALAHMIKFRGHFLIEGDLNPDNSDVDKLFIQLVQTYNQLFEENPINASGVDAKAILSARLSKSRRLENLIAQLPGEKKNGLFGNLIALSLGLTPNFKSNFDLAEDAKLQLSKDTYDDDLDNLLAQIGDQYADLFLAAKNLSDAILLSDILRVNTEITKAPLSASMIKRYDEHHQDLTLLKALVRQQLPEKYKEIFFDQSKNGYAGYIDGGASQEEFYKFIKPILEKMDGTEELLVKLNREDLLRKQRTFDNGSIPHQIHLGELHAILRRQEDFYPFLKDNREKIEKILTFRIPYYVGPLARGNSRFAWMTRKSEETITPWNFEEVVDKGASAQSFIERMTNFDKNLPNEKVLPKHSLLYEYFTVYNELTKVKYVTEGMRKPAFLSGEQKKAIVDLLFKTNRKVTVKQLKEDYFKKIECFDSVEISGVEDRFNASLGTYHDLLKIIKDKDFLDNEENEDILEDIVLTLTLFEDREMIEERLKTYAHLFDDKVMKQLKRRRYTGWGRLSRKLINGIRDKQSGKTILDFLKSDGFANRNFMQLIHDDSLTFKEDIQKAQVSGQGDSLHEHIANLAGSPAIKKGILQTVKVVDELVKVMGRHKPENIVIEMARENQTTQKGQKNSRERMKRIEEGIKELGSQILKEHPVENTQLQNEKLYLYYLQNGRDMYVDQELDINRLSDYDVDHIVPQSFLKDDSIDNKVLTRSDKARGKSDNVPSEEVVKKMKNYWRQLLNAKLITQRKFDNLTKAERGGLSELDKAGFIKRQLVETRQITKHVAQILDSRMNTKYDENDKLIREVKVITLKSKLVSDFRKDFQFYKVREINNYHHAHDAYLNAVVGTALIKKYPKLESEFVYGDYKVYDVRKMIAKSEQEIGKATAKYFFYSNIMNFFKTEITLANGEIRKRPLIETNGETGEIVWDKGRDFATVRKVLSMPQVNIVKKTEVQTGGFSKESILPKRNSDKLIARKKDWDPKKYGGFDSPTVAYSVLVVAKVEKGKSKKLKSVKELLGITIMERSSFEKNPIDFLEAKGYKEVKKDLIIKLPKYSLFELENGRKRMLASAGELQKGNELALPSKYVNFLYLASHYEKLKGSPEDNEQKQLFVEQHKHYLDEIIEQISEFSKRVILADANLDKVLSAYNKHRDKPIREQAENIIHLFTLTNLGAPAAFKYFDTTIDRKRYTSTKEVLDATLIHQSITGLYETRIDLSQLGGDGGGGSPAPGGTLGDQGSRGSDPLPEPRVTLTVEGIPTEFLVNTGAEHSVLTKPMGKMGSKRTVVAGATGSKVYPWTTKRLLKIGQKQVTHSFLVIPECPAPLLGRDLLTKLKAQIQFSTEGPQVTWEDRPAMCLVLNLEEEYRLHEKPVPPSIDPSWLQLFPMVWAEKAGMGLANQVPPVVVELKSDASPVAVRQYPMSKEAREGIRPHIQRFLDLGILVPCQSPWNTPLLPVKKPGTNDYRPVQDLREVNKRVQDIHPTVPNPYNLLSSLPPSHTWYSVLDLKDAFFCLKLHPNSQPLFAFEWRDPEKGNTGQLTWTRLPQGFKNSPTLFNEALHRDLASFRALNPQVVMLQYVDDLLVAAPTYRDCKEGTRRLLQELSKLGYRVSAKKAQLCREEVTYLGYLLKGGKRWLTPARKATVMKIPTPTTPRQVREFLGKAGFCRLFIPGFASLAAPLYPLTRPKVPFTWTEAHQEAFGRIKEALLSAPALALPDLTKPFALYVDEKEGVARGVLTQTLGPWRRPVAYLSKKLDPVASGWPTCLKAIAAVALLLKDADKLTLGQNVLVIAPHNLESIVRQPPDRWMTNARMTHYQSLLLNERVSFAPPAILNPATLLPVESDDTPIHICSEILAEETGTRPDLRDQPLPGVPAWYTDGSSFIMDGRRQAGAAIVDNKRTVWASNLPEGTSAQKAELIALTQALRLAEGKSINIYTDSRYAFATAHVHGAIYKQRGWLTSAGKDIKNKEEILALLEAIHLPKRVAIIHCPGHQRGTDPVATGNRKADEAAKQAAQSTRILTETTKNAGKRTADGSEFEKRTADGSEFESPKKKAKVE

SEQ ID NO: 6647 - protein, 2091 aa, synthetic construct
MPAAKRVKLDGGDKKYSIGLDIGTNSVGWAVITDEYKVPSKKFKVLGNTDRHSIKKNLIGALLFDSGETAEATRLKRTARRRYTRRKNRICYLQEIFSNEMAKVDDSFFHRLEESFLVEEDKKHERHPIFGNIVDEVAYHEKYPTIYHLRKKLVDSTDKADLRLIYLALAHMIKFRGHFLIEGDLNPDNSDVDKLFIQLVQTYNQLFEENPINASGVDAKAILSARLSKSRRLENLIAQLPGEKKNGLFGNLIALSLGLTPNFKSNFDLAEDAKLQLSKDTYDDDLDNLLAQIGDQYADLFLAAKNLSDAILLSDILRVNTEITKAPLSASMIKRYDEHHQDLTLLKALVRQQLPEKYKEIFFDQSKNGYAGYIDGGASQEEFYKFIKPILEKMDGTEELLVKLNREDLLRKQRTFDNGSIPHQIHLGELHAILRRQEDFYPFLKDNREKIEKILTFRIPYYVGPLARGNSRFAWMTRKSEETITPWNFEEVVDKGASAQSFIERMTNFDKNLPNEKVLPKHSLLYEYFTVYNELTKVKYVTEGMRKPAFLSGEQKKAIVDLLFKTNRKVTVKQLKEDYFKKIECFDSVEISGVEDRFNASLGTYHDLLKIIKDKDFLDNEENEDILEDIVLTLTLFEDREMIEERLKTYAHLFDDKVMKQLKRRRYTGWGRLSRKLINGIRDKQSGKTILDFLKSDGFANRNFMQLIHDDSLTFKEDIQKAQVSGQGDSLHEHIANLAGSPAIKKGILQTVKVVDELVKVMGRHKPENIVIEMARENQTTQKGQKNSRERMKRIEEGIKELGSQILKEHPVENTQLQNEKLYLYYLQNGRDMYVDQELDINRLSDYDVDHIVPQSFLKDDSIDNKVLTRSDKARGKSDNVPSEEVVKKMKNYWRQLLNAKLITQRKFDNLTKAERGGLSELDKAGFIKRQLVETRQITKHVAQILDSRMNTKYDENDKLIREVKVITLKSKLVSDFRKDFQFYKVREINNYHHAHDAYLNAVVGTALIKKYPKLESEFVYGDYKVYDVRKMIAKSEQEIGKATAKYFFYSNIMNFFKTEITLANGEIRKRPLIETNGETGEIVWDKGRDFATVRKVLSMPQVNIVKKTEVQTGGFSKESILPKRNSDKLIARKKDWDPKKYGGFDSPTVAYSVLVVAKVEKGKSKKLKSVKELLGITIMERSSFEKNPIDFLEAKGYKEVKKDLIIKLPKYSLFELENGRKRMLASAGELQKGNELALPSKYVNFLYLASHYEKLKGSPEDNEQKQLFVEQHKHYLDEIIEQISEFSKRVILADANLDKVLSAYNKHRDKPIREQAENIIHLFTLTNLGAPAAFKYFDTTIDRKRYTSTKEVLDATLIHQSITGLYETRIDLSQLGGDGGGGSPAPGGTLNIEDEYRLHETSKEPDVSLGSTWLSDFPQAWAETGGMGLAVRQAPLIIPLKATSTPVSIKQYPMSQEARLGIKPHIQRLLDQGILVPCQSPWNTPLLPVKKPGTNDYRPVQDLREVNKRVEDIHPTVPNPYNLLSGLPPSHQWYTVLDLKDAFFCLRLHPTSQPLFAFEWRDPEMGISGQLTWTRLPQGFKNSPTLFNEALHRDLAGFRIQHPDLILLQYVDDLLLAATSELDCQQGTRALLQTLGDLGYRASAKKAQICQKQVKYLGYLLKEGQRWLTEARKETVMGQPIPKTPRQLREFLGTAGFCRLWIPGFAEMAAPLYPLTKPGTLFNWGPDQQKAFQEIKQALLTAPALGLPDLTKPFELFVDEKQGYAKGVLTQKLGPWRRPVAYLSKKLDPVAAGWPPCLRMVAAIAVLTKDAGKLTMGQPLVILAPHAVEALVKQPPDRWLSNARMTHYQALLLDTDRVQFGPVVALNPATLLPLPEEGLQHDCLDILAEAHGTRSDLMDQPLPDADHTWYTDGSSFLQEGQRKAGAAVTTETEVIWARALPAGTSAQRAELIALTQALKMAEGKKLNVYTDSRYAFATAHIHGEIYRRRGWLTSEGKEIKNKDEILALLKALFLPKRLSIIHCPGHQKGNSAEARGNRMADQAAREVATRETPETSTLLAGKRTADGSEFEKRTADGSEFESPKKKAKVE

SEQ ID NO: 6648 - protein, 2091 aa, synthetic construct
MPAAKRVKLDGGDKKYSIGLDIGTNSVGWAVITDEYKVPSKKFKVLGNTDRHSIKKNLIGALLFDSGETAEATRLKRTARRRYTRRKNRICYLQEIFSNEMAKVDDSFFHRLEESFLVEEDKKHERHPIFGNIVDEVAYHEKYPTIYHLRKKLVDSTDKADLRLIYLALAHMIKFRGHFLIEGDLNPDNSDVDKLFIQLVQTYNQLFEENPINASGVDAKAILSARLSKSRRLENLIAQLPGEKKNGLFGNLIALSLGLTPNFKSNFDLAEDAKLQLSKDTYDDDLDNLLAQIGDQYADLFLAAKNLSDAILLSDILRVNTEITKAPLSASMIKRYDEHHQDLTLLKALVRQQLPEKYKEIFFDQSKNGYAGYIDGGASQEEFYKFIKPILEKMDGTEELLVKLNREDLLRKQRTFDNGSIPHQIHLGELHAILRRQEDFYPFLKDNREKIEKILTFRIPYYVGPLARGNSRFAWMTRKSEETITPWNFEEVVDKGASAQSFIERMTNFDKNLPNEKVLPKHSLLYEYFTVYNELTKVKYVTEGMRKPAFLSGEQKKAIVDLLFKTNRKVTVKQLKEDYFKKIECFDSVEISGVEDRFNASLGTYHDLLKIIKDKDFLDNEENEDILEDIVLTLTLFEDREMIEERLKTYAHLFDDKVMKQLKRRRYTGWGRLSRKLINGIRDKQSGKTILDFLKSDGFANRNFMQLIHDDSLTFKEDIQKAQVSGQGDSLHEHIANLAGSPAIKKGILQTVKVVDELVKVMGRHKPENIVIEMARENQTTQKGQKNSRERMKRIEEGIKELGSQILKEHPVENTQLQNEKLYLYYLQNGRDMYVDQELDINRLSDYDVDHIVPQSFLKDDSIDNKVLTRSDKARGKSDNVPSEEVVKKMKNYWRQLLNAKLITQRKFDNLTKAERGGLSELDKAGFIKRQLVETRQITKHVAQILDSRMNTKYDENDKLIREVKVITLKSKLVSDFRKDFQFYKVREINNYHHAHDAYLNAVVGTALIKKYPKLESEFVYGDYKVYDVRKMIAKSEQEIGKATAKYFFYSNIMNFFKTEITLANGEIRKRPLIETNGETGEIVWDKGRDFATVRKVLSMPQVNIVKKTEVQTGGFSKESILPKRNSDKLIARKKDWDPKKYGGFDSPTVAYSVLVVAKVEKGKSKKLKSVKELLGITIMERSSFEKNPIDFLEAKGYKEVKKDLIIKLPKYSLFELENGRKRMLASAGELQKGNELALPSKYVNFLYLASHYEKLKGSPEDNEQKQLFVEQHKHYLDEIIEQISEFSKRVILADANLDKVLSAYNKHRDKPIREQAENIIHLFTLTNLGAPAAFKYFDTTIDRKRYTSTKEVLDATLIHQSITGLYETRIDLSQLGGDGGGGSPAPGGTLNIEDEYRLHETSKGPDVPLGSTWLSDFPQAWAETGGMGLAVRQAPLIIPLKATSTPVSIKQYPMSQEARLGIKPHIQRLLDQGILVPCQSPWNTPLLPVKKPGTNDYRPVQDLREVNKRVEDIHPTVPNPYNLLSGLPPSHQWYTVLDLKDAFFCLRLHPTSQSLFAFEWRDPEMGISGQLTWTRLPQGFKNSPTLFNEALHRDLADFRIQHPDLILLQYVDDLLLAATSELDCQQGTRALLQTLGDLGYRASAKKAQICQKQVKYLGYLLKEGQRWLTEARKETVMGQPTPKTPRQLREFLGKAGFCRLFIPGFAEMAAPLYPLTKPGTLFEWGPDQQKAYQEIKQALLTAPALGLPDLTKPFELFVDEKQGYAKGVLTQKLGPWRRPVAYLSKKLDPVAAGWPPCLRMVAAIAVLTKDAGKLTMGQPLVILAPHAVEALVKQPPDRWLSNARMTHYQALLLDTDRVQFGPIVALNPATLLPLPEEGLQHDCLDILAEAHGTRPDLTDQPLPDADHTWYTDGSSFLQEGQRKAGAAVTTETEVVWAKALPAGTSAQRAELIALTQALKMAEGKKLNVYTDSRYAFATAHIHGEIYRRRGWLTSEGKEIKNKDEILALLKALFLPKRLSIIHCPGHQKGNRAEARGNRMADQAAREVATRETPETSTLLAGKRTADGSEFEKRTADGSEFESPKKKAKVE

SEQ ID NO: 6649 - protein, 2082 aa, synthetic construct
MPAAKRVKLDGGDKKYSIGLDIGTNSVGWAVITDEYKVPSKKFKVLGNTDRHSIKKNLIGALLFDSGETAEATRLKRTARRRYTRRKNRICYLQEIFSNEMAKVDDSFFHRLEESFLVEEDKKHERHPIFGNIVDEVAYHEKYPTIYHLRKKLVDSTDKADLRLIYLALAHMIKFRGHFLIEGDLNPDNSDVDKLFIQLVQTYNQLFEENPINASGVDAKAILSARLSKSRRLENLIAQLPGEKKNGLFGNLIALSLGLTPNFKSNFDLAEDAKLQLSKDTYDDDLDNLLAQIGDQYADLFLAAKNLSDAILLSDILRVNTEITKAPLSASMIKRYDEHHQDLTLLKALVRQQLPEKYKEIFFDQSKNGYAGYIDGGASQEEFYKFIKPILEKMDGTEELLVKLNREDLLRKQRTFDNGSIPHQIHLGELHAILRRQEDFYPFLKDNREKIEKILTFRIPYYVGPLARGNSRFAWMTRKSEETITPWNFEEVVDKGASAQSFIERMTNFDKNLPNEKVLPKHSLLYEYFTVYNELTKVKYVTEGMRKPAFLSGEQKKAIVDLLFKTNRKVTVKQLKEDYFKKIECFDSVEISGVEDRFNASLGTYHDLLKIIKDKDFLDNEENEDILEDIVLTLTLFEDREMIEERLKTYAHLFDDKVMKQLKRRRYTGWGRLSRKLINGIRDKQSGKTILDFLKSDGFANRNFMQLIHDDSLTFKEDIQKAQVSGQGDSLHEHIANLAGSPAIKKGILQTVKVVDELVKVMGRHKPENIVIEMARENQTTQKGQKNSRERMKRIEEGIKELGSQILKEHPVENTQLQNEKLYLYYLQNGRDMYVDQELDINRLSDYDVDHIVPQSFLKDDSIDNKVLTRSDKARGKSDNVPSEEVVKKMKNYWRQLLNAKLITQRKFDNLTKAERGGLSELDKAGFIKRQLVETRQITKHVAQILDSRMNTKYDENDKLIREVKVITLKSKLVSDFRKDFQFYKVREINNYHHAHDAYLNAVVGTALIKKYPKLESEFVYGDYKVYDVRKMIAKSEQEIGKATAKYFFYSNIMNFFKTEITLANGEIRKRPLIETNGETGEIVWDKGRDFATVRKVLSMPQVNIVKKTEVQTGGFSKESILPKRNSDKLIARKKDWDPKKYGGFDSPTVAYSVLVVAKVEKGKSKKLKSVKELLGITIMERSSFEKNPIDFLEAKGYKEVKKDLIIKLPKYSLFELENGRKRMLASAGELQKGNELALPSKYVNFLYLASHYEKLKGSPEDNEQKQLFVEQHKHYLDEIIEQISEFSKRVILADANLDKVLSAYNKHRDKPIREQAENIIHLFTLTNLGAPAAFKYFDTTIDRKRYTSTKEVLDATLIHQSITGLYETRIDLSQLGGDGGGGSPAPGGIPWLMKKPLQLTTLVPLQEYEERLLKQTMLTGSYKEKLQSLFLKYDALWQHWENQVGHRRIKPHHIATGTVNPRPQKQYPINPKAKASIQTVINDLLKQGVLIQQNSIMNTPVYPVPKPDGKWRMVLDYREVNKTIPLIAAQNQHSAGILSSIFRGKYKTTLDLSNGFWAHSITPESYWLTAFTWLGQQYCWTRLPQGFLNSPALFNADVVDLLKEVPNVQVYVDDIYISHDDPREHLEQLEKVFSLLLNAGYVVSLKKSEIAQHEVEFLGFNITKEGRGLTETFKQKLLNITPPRDLKQLQSILGKLNFARNFIPNFSELVKPLYNIIATAPGKYITWTTDNSQQLQNIISMLNSAENLEERNPEVRLIMKVNTSPSAGYIRFYNEFAKRPIMYLNYVYTKAEVKFTNTEKLLTTIHKGLIKALDLGMGQEILVYSPIVSMTKIQKTPLPERKALPIRWITWMSYLEDPRIQFHYDKTLPELQQVPTVTDDIIAKIKHPSEFSMVFYTDGSAIKHPNVNKSHNAGMGIAQVQFKPEFTVINTWSIPLGDHTAQLAEVAAVEFACKKALKIDGPVLIVTDSFYVAESVNKELPYWQSNGFFNNKKKPLKHVSKWKSIADCIQLKPDIIIIHEKGHQPTASTFHTEGNNLADKLATQGSYVVNAGKRTADGSEFEKRTADGSEFESPKKKAKVE

SEQ ID NO: 6650 - protein, 2089 aa, synthetic construct
MPAAKRVKLDGGDKKYSIGLDIGTNSVGWAVITDEYKVPSKKFKVLGNTDRHSIKKNLIGALLFDSGETAEATRLKRTARRRYTRRKNRICYLQEIFSNEMAKVDDSFFHRLEESFLVEEDKKHERHPIFGNIVDEVAYHEKYPTIYHLRKKLVDSTDKADLRLIYLALAHMIKFRGHFLIEGDLNPDNSDVDKLFIQLVQTYNQLFEENPINASGVDAKAILSARLSKSRRLENLIAQLPGEKKNGLFGNLIALSLGLTPNFKSNFDLAEDAKLQLSKDTYDDDLDNLLAQIGDQYADLFLAAKNLSDAILLSDILRVNTEITKAPLSASMIKRYDEHHQDLTLLKALVRQQLPEKYKEIFFDQSKNGYAGYIDGGASQEEFYKFIKPILEKMDGTEELLVKLNREDLLRKQRTFDNGSIPHQIHLGELHAILRRQEDFYPFLKDNREKIEKILTFRIPYYVGPLARGNSRFAWMTRKSEETITPWNFEEVVDKGASAQSFIERMTNFDKNLPNEKVLPKHSLLYEYFTVYNELTKVKYVTEGMRKPAFLSGEQKKAIVDLLFKTNRKVTVKQLKEDYFKKIECFDSVEISGVEDRFNASLGTYHDLLKIIKDKDFLDNEENEDILEDIVLTLTLFEDREMIEERLKTYAHLFDDKVMKQLKRRRYTGWGRLSRKLINGIRDKQSGKTILDFLKSDGFANRNFMQLIHDDSLTFKEDIQKAQVSGQGDSLHEHIANLAGSPAIKKGILQTVKVVDELVKVMGRHKPENIVIEMARENQTTQKGQKNSRERMKRIEEGIKELGSQILKEHPVENTQLQNEKLYLYYLQNGRDMYVDQELDINRLSDYDVDHIVPQSFLKDDSIDNKVLTRSDKARGKSDNVPSEEVVKKMKNYWRQLLNAKLITQRKFDNLTKAERGGLSELDKAGFIKRQLVETRQITKHVAQILDSRMNTKYDENDKLIREVKVITLKSKLVSDFRKDFQFYKVREINNYHHAHDAYLNAVVGTALIKKYPKLESEFVYGDYKVYDVRKMIAKSEQEIGKATAKYFFYSNIMNFFKTEITLANGEIRKRPLIETNGETGEIVWDKGRDFATVRKVLSMPQVNIVKKTEVQTGGFSKESILPKRNSDKLIARKKDWDPKKYGGFDSPTVAYSVLVVAKVEKGKSKKLKSVKELLGITIMERSSFEKNPIDFLEAKGYKEVKKDLIIKLPKYSLFELENGRKRMLASAGELQKGNELALPSKYVNFLYLASHYEKLKGSPEDNEQKQLFVEQHKHYLDEIIEQISEFSKRVILADANLDKVLSAYNKHRDKPIREQAENIIHLFTLTNLGAPAAFKYFDTTIDRKRYTSTKEVLDATLIHQSITGLYETRIDLSQLGGDGGGGSPAPGGVLNLEEEYRLHEKPVPSSIDPSWLQLFPTVWAERAGMGLANQVPPVVVELRSGASPVAVRQYPMSKEAREGIRPHIQRFLDLGVLVPCQSPWNTPLLPVKKPGTNDYRPVQDLREINKRVQDIHPTVPNPYNLLSSLPPSHTWYSVLDLKDAFFCLKLHPNSQPLFAFEWRDPEKGNTGQLTWTRLPQGFKNSPTLFNEALHRDLAPFRALNPQVVLLQYVDDLLVAAPTYRDCKEGTQKLLQELSKLGYRVSAKKAQLCQKEVTYLGYLLKEGKRWLTPARKATVMKIPPPTTPRQVREFLGKAGFCRLFIPGFASLAAPLYPLTKPSIPFIWTEEHQKAFDRIKEALLSAPALALPDLTKPFTLYVDERAGVARGVLTQTLGPWRRPVAYLSKKLDPVASGWPTCLKAVAAVALLLKDADKLTLGQNVTVIASHSLESIVRQPPDRWMTNARMTHYQSLLLNERVSFAPPAVLNPATLLPVESEATPVHRCSEILAEETGTRRDLKDQPLPGVPAWYTDGSSFIAEGKRRAGAAIVDGKRTVWASSLPEGTSAQKAELVALTQALRLAEGKDINIYTDSRYAFATAHIHGAIYKQRGWLTSAGKDIKNKEEILALLEAIHLPKRVAIIHCPGHQKGNDPVATGNRRADEAAKQAALSTRVLAETTKPAGKRTADGSEFEKRTADGSEFESPKKKAKVE

SEQ ID NO: 6651 - protein, 2093 aa, synthetic construct
MPAAKRVKLDGGDKKYSIGLDIGTNSVGWAVITDEYKVPSKKFKVLGNTDRHSIKKNLIGALLFDSGETAEATRLKRTARRRYTRRKNRICYLQEIFSNEMAKVDDSFFHRLEESFLVEEDKKHERHPIFGNIVDEVAYHEKYPTIYHLRKKLVDSTDKADLRLIYLALAHMIKFRGHFLIEGDLNPDNSDVDKLFIQLVQTYNQLFEENPINASGVDAKAILSARLSKSRRLENLIAQLPGEKKNGLFGNLIALSLGLTPNFKSNFDLAEDAKLQLSKDTYDDDLDNLLAQIGDQYADLFLAAKNLSDAILLSDILRVNTEITKAPLSASMIKRYDEHHQDLTLLKALVRQQLPEKYKEIFFDQSKNGYAGYIDGGASQEEFYKFIKPILEKMDGTEELLVKLNREDLLRKQRTFDNGSIPHQIHLGELHAILRRQEDFYPFLKDNREKIEKILTFRIPYYVGPLARGNSRFAWMTRKSEETITPWNFEEVVDKGASAQSFIERMTNFDKNLPNEKVLPKHSLLYEYFTVYNELTKVKYVTEGMRKPAFLSGEQKKAIVDLLFKTNRKVTVKQLKEDYFKKIECFDSVEISGVEDRFNASLGTYHDLLKIIKDKDFLDNEENEDILEDIVLTLTLFEDREMIEERLKTYAHLFDDKVMKQLKRRRYTGWGRLSRKLINGIRDKQSGKTILDFLKSDGFANRNFMQLIHDDSLTFKEDIQKAQVSGQGDSLHEHIANLAGSPAIKKGILQTVKVVDELVKVMGRHKPENIVIEMARENQTTQKGQKNSRERMKRIEEGIKELGSQILKEHPVENTQLQNEKLYLYYLQNGRDMYVDQELDINRLSDYDVDHIVPQSFLKDDSIDNKVLTRSDKARGKSDNVPSEEVVKKMKNYWRQLLNAKLITQRKFDNLTKAERGGLSELDKAGFIKRQLVETRQITKHVAQILDSRMNTKYDENDKLIREVKVITLKSKLVSDFRKDFQFYKVREINNYHHAHDAYLNAVVGTALIKKYPKLESEFVYGDYKVYDVRKMIAKSEQEIGKATAKYFFYSNIMNFFKTEITLANGEIRKRPLIETNGETGEIVWDKGRDFATVRKVLSMPQVNIVKKTEVQTGGFSKESILPKRNSDKLIARKKDWDPKKYGGFDSPTVAYSVLVVAKVEKGKSKKLKSVKELLGITIMERSSFEKNPIDFLEAKGYKEVKKDLIIKLPKYSLFELENGRKRMLASAGELQKGNELALPSKYVNFLYLASHYEKLKGSPEDNEQKQLFVEQHKHYLDEIIEQISEFSKRVILADANLDKVLSAYNKHRDKPIREQAENIIHLFTLTNLGAPAAFKYFDTTIDRKRYTSTKEVLDATLIHQSITGLYETRIDLSQLGGDGGPAPGGSGGTAPLEEEYRLFLEAPIQNVTLLEQWKREIPKVWAEINPPGLASTQAPIHVQLLSTALPVRVRQYPITLEAKRSLRETIRKFRAAGILRPVHSPWNTPLLPVRKSGTSEYRMVQDLREVNKRVETIHPTVPNPYTLLSLLPPDRIWYSVLDLKDAFFCIPLAPESQLIFAFEWADAEEGESGQLTWTRLPQGFKNSPTLFNEALNRDLQGFRLDHPSVSLLQYVDDLLIAADTQAACLSATRDLLMTLAELGYRVSGKKAQLCQEEVTYLGFKIHKGSRSLSNSRTQAILQIPVPKTKRQVREFLGTIGYCRLWIPGFAELAQPLYAATRPGNDPLVWGEKEEEAFQSLKLALTQPPALALPSLDKPFQLFVEETSGAAKGVLTQALGPWKRPVAYLSKRLDPVAAGWPRCLRAIAAAALLTREASKLTFGQDIEITSSHNLESLLRSPPDKWLTNARITQYQVLLLDPPRVRFKQTAALNPATLLPETDDTLPIHHCLDTLDSLTSTRPDLTDQPLAQAEATLFTDGSSYIRDGKRYAGAAVVTLDSVIWAEPLPIGTSAQKAELIALTKALEWSKDKSVNIYTDSRYAFATLHVHGMIYRERGWLTAGGKAIKNAPEILALLTAVWLPKRVAVMHCKGHQKDDAPTSTGNRRADEVAREVAIRPLSTQATISAGKRTADGSEFEKRTADGSEFESPKKKAKVE

SEQ ID NO: 6652 - protein, 2093 aa, synthetic construct
MPAAKRVKLDGGDKKYSIGLDIGTNSVGWAVITDEYKVPSKKFKVLGNTDRHSIKKNLIGALLFDSGETAEATRLKRTARRRYTRRKNRICYLQEIFSNEMAKVDDSFFHRLEESFLVEEDKKHERHPIFGNIVDEVAYHEKYPTIYHLRKKLVDSTDKADLRLIYLALAHMIKFRGHFLIEGDLNPDNSDVDKLFIQLVQTYNQLFEENPINASGVDAKAILSARLSKSRRLENLIAQLPGEKKNGLFGNLIALSLGLTPNFKSNFDLAEDAKLQLSKDTYDDDLDNLLAQIGDQYADLFLAAKNLSDAILLSDILRVNTEITKAPLSASMIKRYDEHHQDLTLLKALVRQQLPEKYKEIFFDQSKNGYAGYIDGGASQEEFYKFIKPILEKMDGTEELLVKLNREDLLRKQRTFDNGSIPHQIHLGELHAILRRQEDFYPFLKDNREKIEKILTFRIPYYVGPLARGNSRFAWMTRKSEETITPWNFEEVVDKGASAQSFIERMTNFDKNLPNEKVLPKHSLLYEYFTVYNELTKVKYVTEGMRKPAFLSGEQKKAIVDLLFKTNRKVTVKQLKEDYFKKIECFDSVEISGVEDRFNASLGTYHDLLKIIKDKDFLDNEENEDILEDIVLTLTLFEDREMIEERLKTYAHLFDDKVMKQLKRRRYTGWGRLSRKLINGIRDKQSGKTILDFLKSDGFANRNFMQLIHDDSLTFKEDIQKAQVSGQGDSLHEHIANLAGSPAIKKGILQTVKVVDELVKVMGRHKPENIVIEMARENQTTQKGQKNSRERMKRIEEGIKELGSQILKEHPVENTQLQNEKLYLYYLQNGRDMYVDQELDINRLSDYDVDHIVPQSFLKDDSIDNKVLTRSDKARGKSDNVPSEEVVKKMKNYWRQLLNAKLITQRKFDNLTKAERGGLSELDKAGFIKRQLVETRQITKHVAQILDSRMNTKYDENDKLIREVKVITLKSKLVSDFRKDFQFYKVREINNYHHAHDAYLNAVVGTALIKKYPKLESEFVYGDYKVYDVRKMIAKSEQEIGKATAKYFFYSNIMNFFKTEITLANGEIRKRPLIETNGETGEIVWDKGRDFATVRKVLSMPQVNIVKKTEVQTGGFSKESILPKRNSDKLIARKKDWDPKKYGGFDSPTVAYSVLVVAKVEKGKSKKLKSVKELLGITIMERSSFEKNPIDFLEAKGYKEVKKDLIIKLPKYSLFELENGRKRMLASAGELQKGNELALPSKYVNFLYLASHYEKLKGSPEDNEQKQLFVEQHKHYLDEIIEQISEFSKRVILADANLDKVLSAYNKHRDKPIREQAENIIHLFTLTNLGAPAAFKYFDTTIDRKRYTSTKEVLDATLIHQSITGLYETRIDLSQLGGDGGPAPGGSGGTAPLEEEYRLFLEAPIQNVTLLEQWKREIPKVWAEINPPGLASTQAPIHVQLLSTALPVRVRQYPITLEAKRSLRETIRKFRAAGILRPVHSPWNTPLLPVRKSGTSEYRMVQDLREVNKRVETIHPTVPNPYTLLSLLPPDRIWYSVLDLKDAFFCIPLAPESQLIFAFEWADAEEGESGQLTWTRLPQGFKNSPTLFNEALNRDLQGFRLDHPSVSLLQYVDDLLIAADTQAACLSATRDLLMTLAELGYRVSGKKAQLCQEEVTYLGFKIHKGSRSLSNSRTQAILQIPVPKTKRQVREFLGKIGYCRLFIPGFAELAQPLYAATRPGNDPLVWGEKEEEAFQSLKLALTQPPALALPSLDKPFQLFVEETSGAAKGVLTQALGPWKRPVAYLSKRLDPVAAGWPRCLRAIAAAALLTREASKLTFGQDIEITSSHNLESLLRSPPDKWLTNARITQYQVLLLDPPRVRFKQTAALNPATLLPETDDTLPIHHCLDTLDSLTSTRPDLTDQPLAQAEATLFTDGSSYIRDGKRYAGAAVVTLDSVIWAEPLPIGTSAQKAELIALTKALEWSKDKSVNIYTDSRYAFATLHVHGMIYRERGWLTAGGKAIKNAPEILALLTAVWLPKRVAVMHCKGHQKDDAPTSTGNRRADEVAREVAIRPLSTQATISAGKRTADGSEFEKRTADGSEFESPKKKAKVE

SEQ ID NO: 6653 - protein, 2089 aa, synthetic construct
MPAAKRVKLDGGDKKYSIGLDIGTNSVGWAVITDEYKVPSKKFKVLGNTDRHSIKKNLIGALLFDSGETAEATRLKRTARRRYTRRKNRICYLQEIFSNEMAKVDDSFFHRLEESFLVEEDKKHERHPIFGNIVDEVAYHEKYPTIYHLRKKLVDSTDKADLRLIYLALAHMIKFRGHFLIEGDLNPDNSDVDKLFIQLVQTYNQLFEENPINASGVDAKAILSARLSKSRRLENLIAQLPGEKKNGLFGNLIALSLGLTPNFKSNFDLAEDAKLQLSKDTYDDDLDNLLAQIGDQYADLFLAAKNLSDAILLSDILRVNTEITKAPLSASMIKRYDEHHQDLTLLKALVRQQLPEKYKEIFFDQSKNGYAGYIDGGASQEEFYKFIKPILEKMDGTEELLVKLNREDLLRKQRTFDNGSIPHQIHLGELHAILRRQEDFYPFLKDNREKIEKILTFRIPYYVGPLARGNSRFAWMTRKSEETITPWNFEEVVDKGASAQSFIERMTNFDKNLPNEKVLPKHSLLYEYFTVYNELTKVKYVTEGMRKPAFLSGEQKKAIVDLLFKTNRKVTVKQLKEDYFKKIECFDSVEISGVEDRFNASLGTYHDLLKIIKDKDFLDNEENEDILEDIVLTLTLFEDREMIEERLKTYAHLFDDKVMKQLKRRRYTGWGRLSRKLINGIRDKQSGKTILDFLKSDGFANRNFMQLIHDDSLTFKEDIQKAQVSGQGDSLHEHIANLAGSPAIKKGILQTVKVVDELVKVMGRHKPENIVIEMARENQTTQKGQKNSRERMKRIEEGIKELGSQILKEHPVENTQLQNEKLYLYYLQNGRDMYVDQELDINRLSDYDVDHIVPQSFLKDDSIDNKVLTRSDKARGKSDNVPSEEVVKKMKNYWRQLLNAKLITQRKFDNLTKAERGGLSELDKAGFIKRQLVETRQITKHVAQILDSRMNTKYDENDKLIREVKVITLKSKLVSDFRKDFQFYKVREINNYHHAHDAYLNAVVGTALIKKYPKLESEFVYGDYKVYDVRKMIAKSEQEIGKATAKYFFYSNIMNFFKTEITLANGEIRKRPLIETNGETGEIVWDKGRDFATVRKVLSMPQVNIVKKTEVQTGGFSKESILPKRNSDKLIARKKDWDPKKYGGFDSPTVAYSVLVVAKVEKGKSKKLKSVKELLGITIMERSSFEKNPIDFLEAKGYKEVKKDLIIKLPKYSLFELENGRKRMLASAGELQKGNELALPSKYVNFLYLASHYEKLKGSPEDNEQKQLFVEQHKHYLDEIIEQISEFSKRVILADANLDKVLSAYNKHRDKPIREQAENIIHLFTLTNLGAPAAFKYFDTTIDRKRYTSTKEVLDATLIHQSITGLYETRIDLSQLGGDGGPAPGGSGGVLNLEEEYRLHEKPVPSSIDPSWLQLFPTVWAERAGMGLANQVPPVVVELRSGASPVAVRQYPMSKEAREGIRPHIQKFLDLGVLVPCRSPWNTPLLPVKKPGTNDYRPVQDLREINKRVQDIHPTVPNPYNLLSSLPPSYTWYSVLDLKDAFFCLRLHPNSQPLFAFEWKDPEKGNTGQLTWTRLPQGFKNSPTLFDEALHRDLAPFRALNPQVVLLQYVDDLLVAAPTYEDCKKGTQKLLQELSKLGYRVSAKKAQLCQREVTYLGYLLKEGKRWLTPARKATVMKIPVPTTPRQVREFLGTAGFCRLWIPGFASLAAPLYPLTKESIPFIWTEEHQQAFDHIKKALLSAPALALPDLTKPFTLYIDERAGVARGVLTQTLGPWRRPVAYLSKKLDPVASGWPTCLKAVAAVALLLKDADKLTLGQNVTVIASHSLESIVRQPPDRWMTNARMTHYQSLLLNERVSFAPPAVLNPATLLPVESEATPVHRCSEILAEETGTRRDLEDQPLPGVPTWYTDGSSFITEGKRRAGAPIVDGKRTVWASSLPEGTSAQKAELVALTQALRLAEGKNINIYTDSRYAFATAHIHGAIYKQRGLLTSAGKDIKNKEEILALLEAIHLPRRVAIIHCPGHQRGSNPVATGNRRADEAAKQAALSTRVLAGTTKPAGKRTADGSEFEKRTADGSEFESPKKKAKVE

SEQ ID NO: 6654 - protein, 2213 aa, synthetic construct
MPAAKRVKLDGGDKKYSIGLDIGTNSVGWAVITDEYKVPSKKFKVLGNTDRHSIKKNLIGALLFDSGETAEATRLKRTARRRYTRRKNRICYLQEIFSNEMAKVDDSFFHRLEESFLVEEDKKHERHPIFGNIVDEVAYHEKYPTIYHLRKKLVDSTDKADLRLIYLALAHMIKFRGHFLIEGDLNPDNSDVDKLFIQLVQTYNQLFEENPINASGVDAKAILSARLSKSRRLENLIAQLPGEKKNGLFGNLIALSLGLTPNFKSNFDLAEDAKLQLSKDTYDDDLDNLLAQIGDQYADLFLAAKNLSDAILLSDILRVNTEITKAPLSASMIKRYDEHHQDLTLLKALVRQQLPEKYKEIFFDQSKNGYAGYIDGGASQEEFYKFIKPILEKMDGTEELLVKLNREDLLRKQRTFDNGSIPHQIHLGELHAILRRQEDFYPFLKDNREKIEKILTFRIPYYVGPLARGNSRFAWMTRKSEETITPWNFEEVVDKGASAQSFIERMTNFDKNLPNEKVLPKHSLLYEYFTVYNELTKVKYVTEGMRKPAFLSGEQKKAIVDLLFKTNRKVTVKQLKEDYFKKIECFDSVEISGVEDRFNASLGTYHDLLKIIKDKDFLDNEENEDILEDIVLTLTLFEDREMIEERLKTYAHLFDDKVMKQLKRRRYTGWGRLSRKLINGIRDKQSGKTILDFLKSDGFANRNFMQLIHDDSLTFKEDIQKAQVSGQGDSLHEHIANLAGSPAIKKGILQTVKVVDELVKVMGRHKPENIVIEMARENQTTQKGQKNSRERMKRIEEGIKELGSQILKEHPVENTQLQNEKLYLYYLQNGRDMYVDQELDINRLSDYDVDHIVPQSFLKDDSIDNKVLTRSDKARGKSDNVPSEEVVKKMKNYWRQLLNAKLITQRKFDNLTKAERGGLSELDKAGFIKRQLVETRQITKHVAQILDSRMNTKYDENDKLIREVKVITLKSKLVSDFRKDFQFYKVREINNYHHAHDAYLNAVVGTALIKKYPKLESEFVYGDYKVYDVRKMIAKSEQEIGKATAKYFFYSNIMNFFKTEITLANGEIRKRPLIETNGETGEIVWDKGRDFATVRKVLSMPQVNIVKKTEVQTGGFSKESILPKRNSDKLIARKKDWDPKKYGGFDSPTVAYSVLVVAKVEKGKSKKLKSVKELLGITIMERSSFEKNPIDFLEAKGYKEVKKDLIIKLPKYSLFELENGRKRMLASAGELQKGNELALPSKYVNFLYLASHYEKLKGSPEDNEQKQLFVEQHKHYLDEIIEQISEFSKRVILADANLDKVLSAYNKHRDKPIREQAENIIHLFTLTNLGAPAAFKYFDTTIDRKRYTSTKEVLDATLIHQSITGLYETRIDLSQLGGDGGPAPGGSGGTLGDQGSRGSDPLPEPRVTLTVEGIPTEFLVNTGAEHSVLTKPMGKMGSKRTVVAGATGSKVYPWTTKRLLKIGQKQVTHSFLVIPECPAPLLGRDLLTKLKAQIQFSTEGPQVTWEDRPAMCLVLNLEEEYRLHEKPVPPSIDPSWLQLFPMVWAEKAGMGLANQVPPVVVELKSDASPVAVRQYPMSKEAREGIRPHIQRFLDLGILVPCQSPWNTPLLPVKKPGTNDYRPVQDLREVNKRVQDIHPTVPNPYNLLSSLPPSHTWYSVLDLKDAFFCLKLHPNSQPLFAFEWRDPEKGNTGQLTWTRLPQGFKNSPTLFNEALHRDLASFRALNPQVVMLQYVDDLLVAAPTYRDCKEGTRRLLQELSKLGYRVSAKKAQLCREEVTYLGYLLKGGKRWLTPARKATVMKIPTPTTPRQVREFLGTAGFCRLWIPGFASLAAPLYPLTRPKVPFTWTEAHQEAFGRIKEALLSAPALALPDLTKPFALYVDEKEGVARGVLTQTLGPWRRPVAYLSKKLDPVASGWPTCLKAIAAVALLLKDADKLTLGQNVLVIAPHNLESIVRQPPDRWMTNARMTHYQSLLLNERVSFAPPAILNPATLLPVESDDTPIHICSEILAEETGTRPDLRDQPLPGVPAWYTDGSSFIMDGRRQAGAAIVDNKRTVWASNLPEGTSAQKAELIALTQALRLAEGKSINIYTDSRYAFATAHVHGAIYKQRGWLTSAGKDIKNKEEILALLEAIHLPKRVAIIHCPGHQRGTDPVATGNRKADEAAKQAAQSTRILTETTKNAGKRTADGSEFEKRTADGSEFESPKKKAKVE

SEQ ID NO: 6655 - protein, 2091 aa, synthetic construct
MPAAKRVKLDGGDKKYSIGLDIGTNSVGWAVITDEYKVPSKKFKVLGNTDRHSIKKNLIGALLFDSGETAEATRLKRTARRRYTRRKNRICYLQEIFSNEMAKVDDSFFHRLEESFLVEEDKKHERHPIFGNIVDEVAYHEKYPTIYHLRKKLVDSTDKADLRLIYLALAHMIKFRGHFLIEGDLNPDNSDVDKLFIQLVQTYNQLFEENPINASGVDAKAILSARLSKSRRLENLIAQLPGEKKNGLFGNLIALSLGLTPNFKSNFDLAEDAKLQLSKDTYDDDLDNLLAQIGDQYADLFLAAKNLSDAILLSDILRVNTEITKAPLSASMIKRYDEHHQDLTLLKALVRQQLPEKYKEIFFDQSKNGYAGYIDGGASQEEFYKFIKPILEKMDGTEELLVKLNREDLLRKQRTFDNGSIPHQIHLGELHAILRRQEDFYPFLKDNREKIEKILTFRIPYYVGPLARGNSRFAWMTRKSEETITPWNFEEVVDKGASAQSFIERMTNFDKNLPNEKVLPKHSLLYEYFTVYNELTKVKYVTEGMRKPAFLSGEQKKAIVDLLFKTNRKVTVKQLKEDYFKKIECFDSVEISGVEDRFNASLGTYHDLLKIIKDKDFLDNEENEDILEDIVLTLTLFEDREMIEERLKTYAHLFDDKVMKQLKRRRYTGWGRLSRKLINGIRDKQSGKTILDFLKSDGFANRNFMQLIHDDSLTFKEDIQKAQVSGQGDSLHEHIANLAGSPAIKKGILQTVKVVDELVKVMGRHKPENIVIEMARENQTTQKGQKNSRERMKRIEEGIKELGSQILKEHPVENTQLQNEKLYLYYLQNGRDMYVDQELDINRLSDYDVDHIVPQSFLKDDSIDNKVLTRSDKARGKSDNVPSEEVVKKMKNYWRQLLNAKLITQRKFDNLTKAERGGLSELDKAGFIKRQLVETRQITKHVAQILDSRMNTKYDENDKLIREVKVITLKSKLVSDFRKDFQFYKVREINNYHHAHDAYLNAVVGTALIKKYPKLESEFVYGDYKVYDVRKMIAKSEQEIGKATAKYFFYSNIMNFFKTEITLANGEIRKRPLIETNGETGEIVWDKGRDFATVRKVLSMPQVNIVKKTEVQTGGFSKESILPKRNSDKLIARKKDWDPKKYGGFDSPTVAYSVLVVAKVEKGKSKKLKSVKELLGITIMERSSFEKNPIDFLEAKGYKEVKKDLIIKLPKYSLFELENGRKRMLASAGELQKGNELALPSKYVNFLYLASHYEKLKGSPEDNEQKQLFVEQHKHYLDEIIEQISEFSKRVILADANLDKVLSAYNKHRDKPIREQAENIIHLFTLTNLGAPAAFKYFDTTIDRKRYTSTKEVLDATLIHQSITGLYETRIDLSQLGGDGGPAPGGSGGTLNLEDEYRLYETSAEPEVSPGSTWLSDFPQAWAETGGMGLAVRQAPLIIPLKATSTPVSIKQYPMSQEAKLGIKPHIQRLLDQGILVPCQSPWNTPLLPVKKPGTNDYRPVQDLREVNKRVEDIHPTVPNPYNLLSGLPPSHRWYTVLDLKDAFFCLRLHPTSQPLFAFEWRDPGMGISGQLTWTRLPQGFKNSPTLFNEALHRDLADFRIQHPDLILLQYVDDILLAATSELDCQQGTRALLLTLGNLGYRASAKKAQLCQKQVKYLGYLLKEGQRWLTEARKETVMGQPTPKTPRQLREFLGKAGFCRLFIPGFAEMAAPLYPLTKPGTLFNWGPDQQKAYQEIKQALLTAPALGLPDLTKPFELFVDEKQGYAKGVLTQKLGPWRRPVAYLSKKLDPVAAGWPPCLRMVAAIAVLRKDAGKLTMGQPLVILAPHAVEALVKQPPDRWLSNARMTHYQAMLLDTDRVQFGPVVALNPATLLPLPEEGAPHDCLEILAETHGTRPDLTDQPIPDADHTWYTDGSSFLQEGQRKAGAAVTTETEVIWARALPAGTSAQRAELIALTQALKMAEGKRLNVYTDSRYAFATAHIHGEIYRRRGWLTSEGREIKNKSEILALLKALFLPKRLSIIHCLGHQKGDSAEARGNRLADQAAREAAIKTPPDTSTLLAGKRTADGSEFEKRTADGSEFESPKKKAKVE

SEQ ID NO: 6656 - protein, 2082 aa, synthetic construct
MPAAKRVKLDGGDKKYSIGLDIGTNSVGWAVITDEYKVPSKKFKVLGNTDRHSIKKNLIGALLFDSGETAEATRLKRTARRRYTRRKNRICYLQEIFSNEMAKVDDSFFHRLEESFLVEEDKKHERHPIFGNIVDEVAYHEKYPTIYHLRKKLVDSTDKADLRLIYLALAHMIKFRGHFLIEGDLNPDNSDVDKLFIQLVQTYNQLFEENPINASGVDAKAILSARLSKSRRLENLIAQLPGEKKNGLFGNLIALSLGLTPNFKSNFDLAEDAKLQLSKDTYDDDLDNLLAQIGDQYADLFLAAKNLSDAILLSDILRVNTEITKAPLSASMIKRYDEHHQDLTLLKALVRQQLPEKYKEIFFDQSKNGYAGYIDGGASQEEFYKFIKPILEKMDGTEELLVKLNREDLLRKQRTFDNGSIPHQIHLGELHAILRRQEDFYPFLKDNREKIEKILTFRIPYYVGPLARGNSRFAWMTRKSEETITPWNFEEVVDKGASAQSFIERMTNFDKNLPNEKVLPKHSLLYEYFTVYNELTKVKYVTEGMRKPAFLSGEQKKAIVDLLFKTNRKVTVKQLKEDYFKKIECFDSVEISGVEDRFNASLGTYHDLLKIIKDKDFLDNEENEDILEDIVLTLTLFEDREMIEERLKTYAHLFDDKVMKQLKRRRYTGWGRLSRKLINGIRDKQSGKTILDFLKSDGFANRNFMQLIHDDSLTFKEDIQKAQVSGQGDSLHEHIANLAGSPAIKKGILQTVKVVDELVKVMGRHKPENIVIEMARENQTTQKGQKNSRERMKRIEEGIKELGSQILKEHPVENTQLQNEKLYLYYLQNGRDMYVDQELDINRLSDYDVDHIVPQSFLKDDSIDNKVLTRSDKARGKSDNVPSEEVVKKMKNYWRQLLNAKLITQRKFDNLTKAERGGLSELDKAGFIKRQLVETRQITKHVAQILDSRMNTKYDENDKLIREVKVITLKSKLVSDFRKDFQFYKVREINNYHHAHDAYLNAVVGTALIKKYPKLESEFVYGDYKVYDVRKMIAKSEQEIGKATAKYFFYSNIMNFFKTEITLANGEIRKRPLIETNGETGEIVWDKGRDFATVRKVLSMPQVNIVKKTEVQTGGFSKESILPKRNSDKLIARKKDWDPKKYGGFDSPTVAYSVLVVAKVEKGKSKKLKSVKELLGITIMERSSFEKNPIDFLEAKGYKEVKKDLIIKLPKYSLFELENGRKRMLASAGELQKGNELALPSKYVNFLYLASHYEKLKGSPEDNEQKQLFVEQHKHYLDEIIEQISEFSKRVILADANLDKVLSAYNKHRDKPIREQAENIIHLFTLTNLGAPAAFKYFDTTIDRKRYTSTKEVLDATLIHQSITGLYETRIDLSQLGGDGGPAPGGSGGIPWLMKKPLQLTTLVPLQEYEERLLKQTMLTGSYKEKLQSLFLKYDALWQHWENQVGHRRIKPHHIATGTVNPRPQKQYPINPKAKASIQTVINDLLKQGVLIQQNSIMNTPVYPVPKPDGKWRMVLDYREVNKTIPLIAAQNQHSAGILSSIFRGKYKTTLDLSNGFWAHSITPESYWLTAFTWLGQQYCWTRLPQGFLNSPALFNADVVDLLKEVPNVQVYVDDIYISHDDPREHLEQLEKVFSLLLNAGYVVSLKKSEIAQHEVEFLGFNITKEGRGLTETFKQKLLNITPPRDLKQLQSILGKLNFARNFIPNFSELVKPLYNIIATAPGKYITWTTDNSQQLQNIISMLNSAENLEERNPEVRLIMKVNTSPSAGYIRFYNEFAKRPIMYLNYVYTKAEVKFTNTEKLLTTIHKGLIKALDLGMGQEILVYSPIVSMTKIQKTPLPERKALPIRWITWMSYLEDPRIQFHYDKTLPELQQVPTVTDDIIAKIKHPSEFSMVFYTDGSAIKHPNVNKSHNAGMGIAQVQFKPEFTVINTWSIPLGDHTAQLAEVAAVEFACKKALKIDGPVLIVTDSFYVAESVNKELPYWQSNGFFNNKKKPLKHVSKWKSIADCIQLKPDIIIIHEKGHQPTASTFHTEGNNLADKLATQGSYVVNAGKRTADGSEFEKRTADGSEFESPKKKAKVE

SEQ ID NO: 6657 - protein, 2089 aa, synthetic construct
MPAAKRVKLDGGDKKYSIGLDIGTNSVGWAVITDEYKVPSKKFKVLGNTDRHSIKKNLIGALLFDSGETAEATRLKRTARRRYTRRKNRICYLQEIFSNEMAKVDDSFFHRLEESFLVEEDKKHERHPIFGNIVDEVAYHEKYPTIYHLRKKLVDSTDKADLRLIYLALAHMIKFRGHFLIEGDLNPDNSDVDKLFIQLVQTYNQLFEENPINASGVDAKAILSARLSKSRRLENLIAQLPGEKKNGLFGNLIALSLGLTPNFKSNFDLAEDAKLQLSKDTYDDDLDNLLAQIGDQYADLFLAAKNLSDAILLSDILRVNTEITKAPLSASMIKRYDEHHQDLTLLKALVRQQLPEKYKEIFFDQSKNGYAGYIDGGASQEEFYKFIKPILEKMDGTEELLVKLNREDLLRKQRTFDNGSIPHQIHLGELHAILRRQEDFYPFLKDNREKIEKILTFRIPYYVGPLARGNSRFAWMTRKSEETITPWNFEEVVDKGASAQSFIERMTNFDKNLPNEKVLPKHSLLYEYFTVYNELTKVKYVTEGMRKPAFLSGEQKKAIVDLLFKTNRKVTVKQLKEDYFKKIECFDSVEISGVEDRFNASLGTYHDLLKIIKDKDFLDNEENEDILEDIVLTLTLFEDREMIEERLKTYAHLFDDKVMKQLKRRRYTGWGRLSRKLINGIRDKQSGKTILDFLKSDGFANRNFMQLIHDDSLTFKEDIQKAQVSGQGDSLHEHIANLAGSPAIKKGILQTVKVVDELVKVMGRHKPENIVIEMARENQTTQKGQKNSRERMKRIEEGIKELGSQILKEHPVENTQLQNEKLYLYYLQNGRDMYVDQELDINRLSDYDVDHIVPQSFLKDDSIDNKVLTRSDKARGKSDNVPSEEVVKKMKNYWRQLLNAKLITQRKFDNLTKAERGGLSELDKAGFIKRQLVETRQITKHVAQILDSRMNTKYDENDKLIREVKVITLKSKLVSDFRKDFQFYKVREINNYHHAHDAYLNAVVGTALIKKYPKLESEFVYGDYKVYDVRKMIAKSEQEIGKATAKYFFYSNIMNFFKTEITLANGEIRKRPLIETNGETGEIVWDKGRDFATVRKVLSMPQVNIVKKTEVQTGGFSKESILPKRNSDKLIARKKDWDPKKYGGFDSPTVAYSVLVVAKVEKGKSKKLKSVKELLGITIMERSSFEKNPIDFLEAKGYKEVKKDLIIKLPKYSLFELENGRKRMLASAGELQKGNELALPSKYVNFLYLASHYEKLKGSPEDNEQKQLFVEQHKHYLDEIIEQISEFSKRVILADANLDKVLSAYNKHRDKPIREQAENIIHLFTLTNLGAPAAFKYFDTTIDRKRYTSTKEVLDATLIHQSITGLYETRIDLSQLGGDGGPAPGGSGGVLNLEEEYRLHEKPVPSSIDPSWLQLFPTVWAERAGMGLANQVPPVVVELRSGASPVAVRQYPMSKEAREGIRPHIQRFLDLGVLVPCQSPWNTPLLPVKKPGTNDYRPVQDLREINKRVQDIHPTVPNPYNLLSSLPPSHTWYSVLDLKDAFFCLKLHPNSQPLFAFEWRDPEKGNTGQLTWTRLPQGFKNSPTLFNEALHRDLAPFRALNPQVVLLQYVDDLLVAAPTYRDCKEGTQKLLQELSKLGYRVSAKKAQLCQKEVTYLGYLLKEGKRWLTPARKATVMKIPPPTTPRQVREFLGTAGFCRLWIPGFASLAAPLYPLTKPSIPFIWTEEHQKAFDRIKEALLSAPALALPDLTKPFTLYVDERAGVARGVLTQTLGPWRRPVAYLSKKLDPVASGWPTCLKAVAAVALLLKDADKLTLGQNVTVIASHSLESIVRQPPDRWMTNARMTHYQSLLLNERVSFAPPAVLNPATLLPVESEATPVHRCSEILAEETGTRRDLKDQPLPGVPAWYTDGSSFIAEGKRRAGAAIVDGKRTVWASSLPEGTSAQKAELVALTQALRLAEGKDINIYTDSRYAFATAHIHGAIYKQRGWLTSAGKDIKNKEEILALLEAIHLPKRVAIIHCPGHQKGNDPVATGNRRADEAAKQAALSTRVLAETTKPAGKRTADGSEFEKRTADGSEFESPKKKAKVE

SEQ ID NO: 6658 - protein, 2091 aa, synthetic construct
MPAAKRVKLDGGDKKYSIGLDIGTNSVGWAVITDEYKVPSKKFKVLGNTDRHSIKKNLIGALLFDSGETAEATRLKRTARRRYTRRKNRICYLQEIFSNEMAKVDDSFFHRLEESFLVEEDKKHERHPIFGNIVDEVAYHEKYPTIYHLRKKLVDSTDKADLRLIYLALAHMIKFRGHFLIEGDLNPDNSDVDKLFIQLVQTYNQLFEENPINASGVDAKAILSARLSKSRRLENLIAQLPGEKKNGLFGNLIALSLGLTPNFKSNFDLAEDAKLQLSKDTYDDDLDNLLAQIGDQYADLFLAAKNLSDAILLSDILRVNTEITKAPLSASMIKRYDEHHQDLTLLKALVRQQLPEKYKEIFFDQSKNGYAGYIDGGASQEEFYKFIKPILEKMDGTEELLVKLNREDLLRKQRTFDNGSIPHQIHLGELHAILRRQEDFYPFLKDNREKIEKILTFRIPYYVGPLARGNSRFAWMTRKSEETITPWNFEEVVDKGASAQSFIERMTNFDKNLPNEKVLPKHSLLYEYFTVYNELTKVKYVTEGMRKPAFLSGEQKKAIVDLLFKTNRKVTVKQLKEDYFKKIECFDSVEISGVEDRFNASLGTYHDLLKIIKDKDFLDNEENEDILEDIVLTLTLFEDREMIEERLKTYAHLFDDKVMKQLKRRRYTGWGRLSRKLINGIRDKQSGKTILDFLKSDGFANRNFMQLIHDDSLTFKEDIQKAQVSGQGDSLHEHIANLAGSPAIKKGILQTVKVVDELVKVMGRHKPENIVIEMARENQTTQKGQKNSRERMKRIEEGIKELGSQILKEHPVENTQLQNEKLYLYYLQNGRDMYVDQELDINRLSDYDVDHIVPQSFLKDDSIDNKVLTRSDKARGKSDNVPSEEVVKKMKNYWRQLLNAKLITQRKFDNLTKAERGGLSELDKAGFIKRQLVETRQITKHVAQILDSRMNTKYDENDKLIREVKVITLKSKLVSDFRKDFQFYKVREINNYHHAHDAYLNAVVGTALIKKYPKLESEFVYGDYKVYDVRKMIAKSEQEIGKATAKYFFYSNIMNFFKTEITLANGEIRKRPLIETNGETGEIVWDKGRDFATVRKVLSMPQVNIVKKTEVQTGGFSKESILPKRNSDKLIARKKDWDPKKYGGFDSPTVAYSVLVVAKVEKGKSKKLKSVKELLGITIMERSSFEKNPIDFLEAKGYKEVKKDLIIKLPKYSLFELENGRKRMLASAGELQKGNELALPSKYVNFLYLASHYEKLKGSPEDNEQKQLFVEQHKHYLDEIIEQISEFSKRVILADANLDKVLSAYNKHRDKPIREQAENIIHLFTLTNLGAPAAFKYFDTTIDRKRYTSTKEVLDATLIHQSITGLYETRIDLSQLGGDGGPAPGGSGGTLNIEDEYRLHETSKEPDVPLGSTWLSDFPQAWAETGGMGLAVRQAPLIIPLKATSTPVSIKQYPMSQEARLGIKPHIQRLLDQGILVPCQSPWNTPLLPVKKPGTNDYRPVQDLREVNKRVEDIHPTVPNPYNLLSGLPPSHQWYTVLDLKDAFFCLRLHPTSQPLFAFEWRDPEMGISGQLTWTRLPQGFKNSPTLFNEALHRDLADFRIQHPDLILLQYVDDLLLAATSEQDCQRGTRALLQTLGNLGYRASAKKAQICQKQVKYLGYLLKEGQRWLTEARKETVMGQPTPKTPRQLREFLGTAGFCRLWIPGFAEMAAPLYPLTKPGTLFNWGPDQQKAYQEIKQALLTAPALGLPDLTKPFELFVDEKQGYAKGVLTQKLGPWRRPVAYLSKKLDPVAAGWPPCLRMVAAIAVLTKDAGKLTMGQPLVILAPHAVEALVKQPPDRWLSNARMTHYQAMLLDTDRVQFGPVVALNPATLLPLPEKEAPHDCLEILAETHGTRPDLTDQPIPDADYTWYTDGSSFLQEGQRRAGAAVTTETEVIWARALPAGTSAQRAELIALTQALKMAEGKKLNVYTDSRYAFATAHVHGEIYRRRGWLTSEGREIKNKNEILALLKALFLPKRLSIIHCPGHQKGNSAEARGNRMADQAAREAAMKAVLETSTLLAGKRTADGSEFEKRTADGSEFESPKKKAKVE

SEQ ID NO: 6659 - protein, 2093 aa, synthetic construct
MPAAKRVKLDGGDKKYSIGLDIGTNSVGWAVITDEYKVPSKKFKVLGNTDRHSIKKNLIGALLFDSGETAEATRLKRTARRRYTRRKNRICYLQEIFSNEMAKVDDSFFHRLEESFLVEEDKKHERHPIFGNIVDEVAYHEKYPTIYHLRKKLVDSTDKADLRLIYLALAHMIKFRGHFLIEGDLNPDNSDVDKLFIQLVQTYNQLFEENPINASGVDAKAILSARLSKSRRLENLIAQLPGEKKNGLFGNLIALSLGLTPNFKSNFDLAEDAKLQLSKDTYDDDLDNLLAQIGDQYADLFLAAKNLSDAILLSDILRVNTEITKAPLSASMIKRYDEHHQDLTLLKALVRQQLPEKYKEIFFDQSKNGYAGYIDGGASQEEFYKFIKPILEKMDGTEELLVKLNREDLLRKQRTFDNGSIPHQIHLGELHAILRRQEDFYPFLKDNREKIEKILTFRIPYYVGPLARGNSRFAWMTRKSEETITPWNFEEVVDKGASAQSFIERMTNFDKNLPNEKVLPKHSLLYEYFTVYNELTKVKYVTEGMRKPAFLSGEQKKAIVDLLFKTNRKVTVKQLKEDYFKKIECFDSVEISGVEDRFNASLGTYHDLLKIIKDKDFLDNEENEDILEDIVLTLTLFEDREMIEERLKTYAHLFDDKVMKQLKRRRYTGWGRLSRKLINGIRDKQSGKTILDFLKSDGFANRNFMQLIHDDSLTFKEDIQKAQVSGQGDSLHEHIANLAGSPAIKKGILQTVKVVDELVKVMGRHKPENIVIEMARENQTTQKGQKNSRERMKRIEEGIKELGSQILKEHPVENTQLQNEKLYLYYLQNGRDMYVDQELDINRLSDYDVDHIVPQSFLKDDSIDNKVLTRSDKARGKSDNVPSEEVVKKMKNYWRQLLNAKLITQRKFDNLTKAERGGLSELDKAGFIKRQLVETRQITKHVAQILDSRMNTKYDENDKLIREVKVITLKSKLVSDFRKDFQFYKVREINNYHHAHDAYLNAVVGTALIKKYPKLESEFVYGDYKVYDVRKMIAKSEQEIGKATAKYFFYSNIMNFFKTEITLANGEIRKRPLIETNGETGEIVWDKGRDFATVRKVLSMPQVNIVKKTEVQTGGFSKESILPKRNSDKLIARKKDWDPKKYGGFDSPTVAYSVLVVAKVEKGKSKKLKSVKELLGITIMERSSFEKNPIDFLEAKGYKEVKKDLIIKLPKYSLFELENGRKRMLASAGELQKGNELALPSKYVNFLYLASHYEKLKGSPEDNEQKQLFVEQHKHYLDEIIEQISEFSKRVILADANLDKVLSAYNKHRDKPIREQAENIIHLFTLTNLGAPAAFKYFDTTIDRKRYTSTKEVLDATLIHQSITGLYETRIDLSQLGGDGGGGGGSSGGTAPLEEEYRLFLEAPIQNVTLLEQWKREIPKVWAEINPPGLASTQAPIHVQLLSTALPVRVRQYPITLEAKRSLRETIRKFRAAGILRPVHSPWNTPLLPVRKSGTSEYRMVQDLREVNKRVETIHPTVPNPYTLLSLLPPDRIWYSVLDLKDAFFCIPLAPESQLIFAFEWADAEEGESGQLTWTRLPQGFKNSPTLFNEALNRDLQGFRLDHPSVSLLQYVDDLLIAADTQAACLSATRDLLMTLAELGYRVSGKKAQLCQEEVTYLGFKIHKGSRSLSNSRTQAILQIPVPKTKRQVREFLGTIGYCRLWIPGFAELAQPLYAATRPGNDPLVWGEKEEEAFQSLKLALTQPPALALPSLDKPFQLFVEETSGAAKGVLTQALGPWKRPVAYLSKRLDPVAAGWPRCLRAIAAAALLTREASKLTFGQDIEITSSHNLESLLRSPPDKWLTNARITQYQVLLLDPPRVRFKQTAALNPATLLPETDDTLPIHHCLDTLDSLTSTRPDLTDQPLAQAEATLFTDGSSYIRDGKRYAGAAVVTLDSVIWAEPLPIGTSAQKAELIALTKALEWSKDKSVNIYTDSRYAFATLHVHGMIYRERGWLTAGGKAIKNAPEILALLTAVWLPKRVAVMHCKGHQKDDAPTSTGNRRADEVAREVAIRPLSTQATISAGKRTADGSEFEKRTADGSEFESPKKKAKVE

SEQ ID NO: 6660 - protein, 2082 aa, synthetic construct
MPAAKRVKLDGGDKKYSIGLDIGTNSVGWAVITDEYKVPSKKFKVLGNTDRHSIKKNLIGALLFDSGETAEATRLKRTARRRYTRRKNRICYLQEIFSNEMAKVDDSFFHRLEESFLVEEDKKHERHPIFGNIVDEVAYHEKYPTIYHLRKKLVDSTDKADLRLIYLALAHMIKFRGHFLIEGDLNPDNSDVDKLFIQLVQTYNQLFEENPINASGVDAKAILSARLSKSRRLENLIAQLPGEKKNGLFGNLIALSLGLTPNFKSNFDLAEDAKLQLSKDTYDDDLDNLLAQIGDQYADLFLAAKNLSDAILLSDILRVNTEITKAPLSASMIKRYDEHHQDLTLLKALVRQQLPEKYKEIFFDQSKNGYAGYIDGGASQEEFYKFIKPILEKMDGTEELLVKLNREDLLRKQRTFDNGSIPHQIHLGELHAILRRQEDFYPFLKDNREKIEKILTFRIPYYVGPLARGNSRFAWMTRKSEETITPWNFEEVVDKGASAQSFIERMTNFDKNLPNEKVLPKHSLLYEYFTVYNELTKVKYVTEGMRKPAFLSGEQKKAIVDLLFKTNRKVTVKQLKEDYFKKIECFDSVEISGVEDRFNASLGTYHDLLKIIKDKDFLDNEENEDILEDIVLTLTLFEDREMIEERLKTYAHLFDDKVMKQLKRRRYTGWGRLSRKLINGIRDKQSGKTILDFLKSDGFANRNFMQLIHDDSLTFKEDIQKAQVSGQGDSLHEHIANLAGSPAIKKGILQTVKVVDELVKVMGRHKPENIVIEMARENQTTQKGQKNSRERMKRIEEGIKELGSQILKEHPVENTQLQNEKLYLYYLQNGRDMYVDQELDINRLSDYDVDHIVPQSFLKDDSIDNKVLTRSDKARGKSDNVPSEEVVKKMKNYWRQLLNAKLITQRKFDNLTKAERGGLSELDKAGFIKRQLVETRQITKHVAQILDSRMNTKYDENDKLIREVKVITLKSKLVSDFRKDFQFYKVREINNYHHAHDAYLNAVVGTALIKKYPKLESEFVYGDYKVYDVRKMIAKSEQEIGKATAKYFFYSNIMNFFKTEITLANGEIRKRPLIETNGETGEIVWDKGRDFATVRKVLSMPQVNIVKKTEVQTGGFSKESILPKRNSDKLIARKKDWDPKKYGGFDSPTVAYSVLVVAKVEKGKSKKLKSVKELLGITIMERSSFEKNPIDFLEAKGYKEVKKDLIIKLPKYSLFELENGRKRMLASAGELQKGNELALPSKYVNFLYLASHYEKLKGSPEDNEQKQLFVEQHKHYLDEIIEQISEFSKRVILADANLDKVLSAYNKHRDKPIREQAENIIHLFTLTNLGAPAAFKYFDTTIDRKRYTSTKEVLDATLIHQSITGLYETRIDLSQLGGDGGGGGGSSGGVPWILKKPLELTIKLDLEEQQGTLLNNSILSKKGKEELKQLFEKYSALWQSWENQVGHRRIRPHKIATGTVKPTPQKQYHINPKAKPDIQIVINDLLKQGVLIQKESTMNTPVYPVPKPNGRWRMVLDYRAVNKVTPLIAVQNQHSYGILGSLFKGRYKTTIDLSNGFWAHPIVPEDYWITAFTWQGKQYCWTVLPQGFLNSPGLFTGDVVDLLQGIPNVEVYVDDVYISHDSEKEHLEYLDILFNRLKEAGYIISLKKSNIANSIVDFLGFQITNEGRGLTDTFKEKLENITAPTTLKQLQSILGLLNFARNFIPDFTELIAPLYALIPKSTKNYVPWQIEHSTTLETLITKLNGAEYLQGRKGDKTLIMKVNASYTTGYIRYYNEGEKKPISYVSIVFSKTELKFTELEKLLTTVHKGLLKALDLSMGQNIHVYSPIVSMQNIQKTPQTAKKALASRWLSWLSYLEDPRIRFFYDPQMPALKDLPAVDTGKDNKKHPSNFQHIFYTDGSAITSPTKEGHLNAGMGIVYFINKDGNLQKQQEWSISLGNHTAQFAEIAAFEFALKKCLPLGGNILVVTDSNYVAKAYNEELDVWASNGFVNNRKKPLKHISKWKSVADLKRLRPDVVVTHEPGHQKLDSSPHAYGNNLADQLATQASFKVHAGKRTADGSEFEKRTADGSEFESPKKKAKVE

SEQ ID NO: 6661 - protein, 2091 aa, synthetic construct
MPAAKRVKLDGGDKKYSIGLDIGTNSVGWAVITDEYKVPSKKFKVLGNTDRHSIKKNLIGALLFDSGETAEATRLKRTARRRYTRRKNRICYLQEIFSNEMAKVDDSFFHRLEESFLVEEDKKHERHPIFGNIVDEVAYHEKYPTIYHLRKKLVDSTDKADLRLIYLALAHMIKFRGHFLIEGDLNPDNSDVDKLFIQLVQTYNQLFEENPINASGVDAKAILSARLSKSRRLENLIAQLPGEKKNGLFGNLIALSLGLTPNFKSNFDLAEDAKLQLSKDTYDDDLDNLLAQIGDQYADLFLAAKNLSDAILLSDILRVNTEITKAPLSASMIKRYDEHHQDLTLLKALVRQQLPEKYKEIFFDQSKNGYAGYIDGGASQEEFYKFIKPILEKMDGTEELLVKLNREDLLRKQRTFDNGSIPHQIHLGELHAILRRQEDFYPFLKDNREKIEKILTFRIPYYVGPLARGNSRFAWMTRKSEETITPWNFEEVVDKGASAQSFIERMTNFDKNLPNEKVLPKHSLLYEYFTVYNELTKVKYVTEGMRKPAFLSGEQKKAIVDLLFKTNRKVTVKQLKEDYFKKIECFDSVEISGVEDRFNASLGTYHDLLKIIKDKDFLDNEENEDILEDIVLTLTLFEDREMIEERLKTYAHLFDDKVMKQLKRRRYTGWGRLSRKLINGIRDKQSGKTILDFLKSDGFANRNFMQLIHDDSLTFKEDIQKAQVSGQGDSLHEHIANLAGSPAIKKGILQTVKVVDELVKVMGRHKPENIVIEMARENQTTQKGQKNSRERMKRIEEGIKELGSQILKEHPVENTQLQNEKLYLYYLQNGRDMYVDQELDINRLSDYDVDHIVPQSFLKDDSIDNKVLTRSDKARGKSDNVPSEEVVKKMKNYWRQLLNAKLITQRKFDNLTKAERGGLSELDKAGFIKRQLVETRQITKHVAQILDSRMNTKYDENDKLIREVKVITLKSKLVSDFRKDFQFYKVREINNYHHAHDAYLNAVVGTALIKKYPKLESEFVYGDYKVYDVRKMIAKSEQEIGKATAKYFFYSNIMNFFKTEITLANGEIRKRPLIETNGETGEIVWDKGRDFATVRKVLSMPQVNIVKKTEVQTGGFSKESILPKRNSDKLIARKKDWDPKKYGGFDSPTVAYSVLVVAKVEKGKSKKLKSVKELLGITIMERSSFEKNPIDFLEAKGYKEVKKDLIIKLPKYSLFELENGRKRMLASAGELQKGNELALPSKYVNFLYLASHYEKLKGSPEDNEQKQLFVEQHKHYLDEIIEQISEFSKRVILADANLDKVLSAYNKHRDKPIREQAENIIHLFTLTNLGAPAAFKYFDTTIDRKRYTSTKEVLDATLIHQSITGLYETRIDLSQLGGDGGGGGGSSGGTLGIEDEYRLHETSTEPDVSLGSTWLSDFPQAWAETGGMGLAVRQAPLIIPLKATSTPVSIQQYPMSHEARLGIKPHIQRLLDQGILVPCQSPWNTPLLPVKKPGTNDYRPVQDLREVNKRVEDIHPTVPNPYNLLSGLPPSHQWYTVLDLKDAFFCLRLHPTSQPLFAFEWRDPGMGISGQLTWTRLPQGFKNSPTLFDEALHRDLADFRIQHPDLILLQYVDDILLAATSELDCQQGTRALLQTLGDLGYRASAKKAQICQKQVKYLGYLLREGQRWLTEARKETVMGQPVPKTPRQLREFLGTAGFCRLWIPGFAEMAAPLYPLTKTGTLFSWGPDQQKAYQEIKQALLTAPALGLPDLTKPFELFVDEKQGYAKGVLTQKLGPWRRPVAYLSKKLDPVAAGWPPCLRMVAAIAVLTKDAGKLTMGQPLVILAPHAVEALVKQPPDRWLSNARMTHYQAMLLDTDRVQFGPVVALNPATLLPLPEEGAPHDCLEILAETHGTRPDLTDQPIPDADHTWYTDGSSFLQEGQRKAGAAVTTETEVIWAGALPAGTSAQRAELIALTQALKMAEGKRLNVYTDSRYAFATAHIHGEIYRRRGLLTSEGREIKNKSEILALLKALFLPKRLSIIHCLGHQKGDSAEARGNRLADQAAREAAIKTPPDTSTLLAGKRTADGSEFEKRTADGSEFESPKKKAKVE

SEQ ID NO: 6662 - protein, 2091 aa, synthetic construct
MPAAKRVKLDGGDKKYSIGLDIGTNSVGWAVITDEYKVPSKKFKVLGNTDRHSIKKNLIGALLFDSGETAEATRLKRTARRRYTRRKNRICYLQEIFSNEMAKVDDSFFHRLEESFLVEEDKKHERHPIFGNIVDEVAYHEKYPTIYHLRKKLVDSTDKADLRLIYLALAHMIKFRGHFLIEGDLNPDNSDVDKLFIQLVQTYNQLFEENPINASGVDAKAILSARLSKSRRLENLIAQLPGEKKNGLFGNLIALSLGLTPNFKSNFDLAEDAKLQLSKDTYDDDLDNLLAQIGDQYADLFLAAKNLSDAILLSDILRVNTEITKAPLSASMIKRYDEHHQDLTLLKALVRQQLPEKYKEIFFDQSKNGYAGYIDGGASQEEFYKFIKPILEKMDGTEELLVKLNREDLLRKQRTFDNGSIPHQIHLGELHAILRRQEDFYPFLKDNREKIEKILTFRIPYYVGPLARGNSRFAWMTRKSEETITPWNFEEVVDKGASAQSFIERMTNFDKNLPNEKVLPKHSLLYEYFTVYNELTKVKYVTEGMRKPAFLSGEQKKAIVDLLFKTNRKVTVKQLKEDYFKKIECFDSVEISGVEDRFNASLGTYHDLLKIIKDKDFLDNEENEDILEDIVLTLTLFEDREMIEERLKTYAHLFDDKVMKQLKRRRYTGWGRLSRKLINGIRDKQSGKTILDFLKSDGFANRNFMQLIHDDSLTFKEDIQKAQVSGQGDSLHEHIANLAGSPAIKKGILQTVKVVDELVKVMGRHKPENIVIEMARENQTTQKGQKNSRERMKRIEEGIKELGSQILKEHPVENTQLQNEKLYLYYLQNGRDMYVDQELDINRLSDYDVDHIVPQSFLKDDSIDNKVLTRSDKARGKSDNVPSEEVVKKMKNYWRQLLNAKLITQRKFDNLTKAERGGLSELDKAGFIKRQLVETRQITKHVAQILDSRMNTKYDENDKLIREVKVITLKSKLVSDFRKDFQFYKVREINNYHHAHDAYLNAVVGTALIKKYPKLESEFVYGDYKVYDVRKMIAKSEQEIGKATAKYFFYSNIMNFFKTEITLANGEIRKRPLIETNGETGEIVWDKGRDFATVRKVLSMPQVNIVKKTEVQTGGFSKESILPKRNSDKLIARKKDWDPKKYGGFDSPTVAYSVLVVAKVEKGKSKKLKSVKELLGITIMERSSFEKNPIDFLEAKGYKEVKKDLIIKLPKYSLFELENGRKRMLASAGELQKGNELALPSKYVNFLYLASHYEKLKGSPEDNEQKQLFVEQHKHYLDEIIEQISEFSKRVILADANLDKVLSAYNKHRDKPIREQAENIIHLFTLTNLGAPAAFKYFDTTIDRKRYTSTKEVLDATLIHQSITGLYETRIDLSQLGGDGGGGGGSSGGTLNIEDEYRLHETSKEPDVSLGSTWLSDFPQAWAETGGMGLAVRQAPLIIPLKATSTPVSIKQYPMSQEARLGIKPHIQRLLDQGILVPCQSPWNTPLLPVKKPGTNDYRPVQDLREVNKRVEDIHPTVPNPYNLLSGLPPSHQWYTVLDLKDAFFCLRLHPTSQPLFAFEWRDPEMGISGQLTWTRLPQGFKNSPTLFNEALHRDLAGFRIQHPDLILLQYVDDLLLAATSELDCQQGTRALLQTLGDLGYRASAKKAQICQKQVKYLGYLLKEGQRWLTEARKETVMGQPIPKTPRQLREFLGTAGFCRLWIPGFAEMAAPLYPLTKPGTLFNWGPDQQKAFQEIKQALLTAPALGLPDLTKPFELFVDEKQGYAKGVLTQKLGPWRRPVAYLSKKLDPVAAGWPPCLRMVAAIAVLTKDAGKLTMGQPLVILAPHAVEALVKQPPDRWLSNARMTHYQALLLDTDRVQFGPVVALNPATLLPLPEEGLQHDCLDILAEAHGTRSDLMDQPLPDADHTWYTDGSSFLQEGQRKAGAAVTTETEVIWARALPAGTSAQRAELIALTQALKMAEGKKLNVYTDSRYAFATAHIHGEIYRRRGWLTSEGKEIKNKDEILALLKALFLPKRLSIIHCPGHQKGNSAEARGNRMADQAAREVATRETPETSTLLAGKRTADGSEFEKRTADGSEFESPKKKAKVE

SEQ ID NO: 6663 - protein, 2091 aa, synthetic construct
MPAAKRVKLDGGDKKYSIGLDIGTNSVGWAVITDEYKVPSKKFKVLGNTDRHSIKKNLIGALLFDSGETAEATRLKRTARRRYTRRKNRICYLQEIFSNEMAKVDDSFFHRLEESFLVEEDKKHERHPIFGNIVDEVAYHEKYPTIYHLRKKLVDSTDKADLRLIYLALAHMIKFRGHFLIEGDLNPDNSDVDKLFIQLVQTYNQLFEENPINASGVDAKAILSARLSKSRRLENLIAQLPGEKKNGLFGNLIALSLGLTPNFKSNFDLAEDAKLQLSKDTYDDDLDNLLAQIGDQYADLFLAAKNLSDAILLSDILRVNTEITKAPLSASMIKRYDEHHQDLTLLKALVRQQLPEKYKEIFFDQSKNGYAGYIDGGASQEEFYKFIKPILEKMDGTEELLVKLNREDLLRKQRTFDNGSIPHQIHLGELHAILRRQEDFYPFLKDNREKIEKILTFRIPYYVGPLARGNSRFAWMTRKSEETITPWNFEEVVDKGASAQSFIERMTNFDKNLPNEKVLPKHSLLYEYFTVYNELTKVKYVTEGMRKPAFLSGEQKKAIVDLLFKTNRKVTVKQLKEDYFKKIECFDSVEISGVEDRFNASLGTYHDLLKIIKDKDFLDNEENEDILEDIVLTLTLFEDREMIEERLKTYAHLFDDKVMKQLKRRRYTGWGRLSRKLINGIRDKQSGKTILDFLKSDGFANRNFMQLIHDDSLTFKEDIQKAQVSGQGDSLHEHIANLAGSPAIKKGILQTVKVVDELVKVMGRHKPENIVIEMARENQTTQKGQKNSRERMKRIEEGIKELGSQILKEHPVENTQLQNEKLYLYYLQNGRDMYVDQELDINRLSDYDVDHIVPQSFLKDDSIDNKVLTRSDKARGKSDNVPSEEVVKKMKNYWRQLLNAKLITQRKFDNLTKAERGGLSELDKAGFIKRQLVETRQITKHVAQILDSRMNTKYDENDKLIREVKVITLKSKLVSDFRKDFQFYKVREINNYHHAHDAYLNAVVGTALIKKYPKLESEFVYGDYKVYDVRKMIAKSEQEIGKATAKYFFYSNIMNFFKTEITLANGEIRKRPLIETNGETGEIVWDKGRDFATVRKVLSMPQVNIVKKTEVQTGGFSKESILPKRNSDKLIARKKDWDPKKYGGFDSPTVAYSVLVVAKVEKGKSKKLKSVKELLGITIMERSSFEKNPIDFLEAKGYKEVKKDLIIKLPKYSLFELENGRKRMLASAGELQKGNELALPSKYVNFLYLASHYEKLKGSPEDNEQKQLFVEQHKHYLDEIIEQISEFSKRVILADANLDKVLSAYNKHRDKPIREQAENIIHLFTLTNLGAPAAFKYFDTTIDRKRYTSTKEVLDATLIHQSITGLYETRIDLSQLGGDGGGGGGSSGGTLNIEDEHRLHETSKEPDVSLGSTWLSDFPQAWAETGGMGLAVRQAPLIIPLKATSTPVSIKQYPMSQEARLGIKPHIQRLLDQGILVPCQSPWNTPLLPVKKPGTNDYRPVQDLREVNKRVEDIHPTVPNPYNLLSGLPPSHQWYTVLDLKDAFFCLRLHPTSQPLFAFEWRDPEMGISGQLTWTRLPQGFKNSPTLFNEALHRDLADFRIQHPDLILLQYVDDLLLAATSELDCQQGTRALLQTLGNLGYRASAKKAQICQKQVKYLGYLLKEGQRWLTEARKETVMGQPTPKTPRQLREFLGTAGFCRLWIPGFAEMAAPLYPLTKPGTLFNWGPDQQKAYQEIKQALLTAPALGLPDLTKPFELFVDEKQGYAKGVLTQKLGPWRRPVAYLSKKLDPVAAGWPPCLRMVAAIAVLTKDAGKLTMGQPLVILAPHAVEALVKQPPDRWLSNARMTHYQALLLDTDRVQFGPVVALNPATLLPLPEEGLQHNCLDILAEAHGTRPDLTDQPLPDADHTWYTDGSSLLQEGQRKAGAAVTTETEVIWAKALPAGTSAQRAELIALTQALKMAEGKKLNVYTDSRYAFATAHIHGEIYRRRGWLTSEGKEIKNKDEILALLKALFLPKRLSIIHCPGHQKGHSAEARGNRMADQAARKAAITETPDTSTLLAGKRTADGSEFEKRTADGSEFESPKKKAKVE

SEQ ID NO: 6664 - protein, 2091 aa, synthetic construct; identical to SEQ ID NO: 6663

SEQ ID NO: 6665 - protein, 2083 aa, synthetic construct
MPAAKRVKLDGGDKKYSIGLDIGTNSVGWAVITDEYKVPSKKFKVLGNTDRHSIKKNLIGALLFDSGETAEATRLKRTARRRYTRRKNRICYLQEIFSNEMAKVDDSFFHRLEESFLVEEDKKHERHPIFGNIVDEVAYHEKYPTIYHLRKKLVDSTDKADLRLIYLALAHMIKFRGHFLIEGDLNPDNSDVDKLFIQLVQTYNQLFEENPINASGVDAKAILSARLSKSRRLENLIAQLPGEKKNGLFGNLIALSLGLTPNFKSNFDLAEDAKLQLSKDTYDDDLDNLLAQIGDQYADLFLAAKNLSDAILLSDILRVNTEITKAPLSASMIKRYDEHHQDLTLLKALVRQQLPEKYKEIFFDQSKNGYAGYIDGGASQEEFYKFIKPILEKMDGTEELLVKLNREDLLRKQRTFDNGSIPHQIHLGELHAILRRQEDFYPFLKDNREKIEKILTFRIPYYVGPLARGNSRFAWMTRKSEETITPWNFEEVVDKGASAQSFIERMTNFDKNLPNEKVLPKHSLLYEYFTVYNELTKVKYVTEGMRKPAFLSGEQKKAIVDLLFKTNRKVTVKQLKEDYFKKIECFDSVEISGVEDRFNASLGTYHDLLKIIKDKDFLDNEENEDILEDIVLTLTLFEDREMIEERLKTYAHLFDDKVMKQLKRRRYTGWGRLSRKLINGIRDKQSGKTILDFLKSDGFANRNFMQLIHDDSLTFKEDIQKAQVSGQGDSLHEHIANLAGSPAIKKGILQTVKVVDELVKVMGRHKPENIVIEMARENQTTQKGQKNSRERMKRIEEGIKELGSQILKEHPVENTQLQNEKLYLYYLQNGRDMYVDQELDINRLSDYDVDHIVPQSFLKDDSIDNKVLTRSDKARGKSDNVPSEEVVKKMKNYWRQLLNAKLITQRKFDNLTKAERGGLSELDKAGFIKRQLVETRQITKHVAQILDSRMNTKYDENDKLIREVKVITLKSKLVSDFRKDFQFYKVREINNYHHAHDAYLNAVVGTALIKKYPKLESEFVYGDYKVYDVRKMIAKSEQEIGKATAKYFFYSNIMNFFKTEITLANGEIRKRPLIETNGETGEIVWDKGRDFATVRKVLSMPQVNIVKKTEVQTGGFSKESILPKRNSDKLIARKKDWDPKKYGGFDSPTVAYSVLVVAKVEKGKSKKLKSVKELLGITIMERSSFEKNPIDFLEAKGYKEVKKDLIIKLPKYSLFELENGRKRMLASAGELQKGNELALPSKYVNFLYLASHYEKLKGSPEDNEQKQLFVEQHKHYLDEIIEQISEFSKRVILADANLDKVLSAYNKHRDKPIREQAENIIHLFTLTNLGAPAAFKYFDTTIDRKRYTSTKEVLDATLIHQSITGLYETRIDLSQLGGDGGGGGGSSGGLDDEYRLYSPLVKPDQNIQFWLEQFPQAWAETAGMGLAKQVPPQVIQLKASATPVSVRQYPLSKEAQEGIRPHVQRLIQQGILVPVQSPWNTPLLPVRKPGTNDYRPVQDLREVNKRVQDIHPTVPNPYNLLCALPPQRSWYTVLDLKDAFFCLRLHPTSQPLFAFEWRDPGTGRTGQLTWTRLPQGFKNSPTIFNEALHRDLANFRIQHPQVTLLQYVDDLLLAGATKQDCLEGTKALLLELSDLGYRASAKKAQICRREVTYLGYSLRDGQRWLTEARKKTVVQIPAPTTAKQVREFLGKAGFCRLFIPGFATLAAPLYPLTKPKGEFSWAPEHQKAFDAIKKALLSAPALALPDVTKPFTLYVDERKGVARGVLTQTLGPWRRPVAYLSKKLDPVASGWPVCLKAIAAVAILVKDADKLTLGQNITVIAPHALENIVRQPPDRWMTNARMTHYQSLLLTERVTFAPPAALNPATLLPEETDEPVTHDCHQLLIEETGVRKDLTDIPLTGEVLTWFTDGSSYVVEGKRMAGAAVVDGTRTIWASSLPEGTSAQKAELMALTQALRLAEGKSINIYTDSRYAFATAHVHGAIYKQRGWLTSAGREIKNKEEILSLLEALHLPKRLAIIHCPGHQKAKDPISRGNQMADRVAKQAAQGVNLLPAGKRTADGSEFEKRTADGSEFESPKKKAKVE

SEQ ID NO: 6666 - protein, 2083 aa, synthetic construct; identical to SEQ ID NO: 6665

SEQ ID NO: 6667 - protein, 2082 aa, synthetic construct
MPAAKRVKLDGGDKKYSIGLDIGTNSVGWAVITDEYKVPSKKFKVLGNTDRHSIKKNLIGALLFDSGETAEATRLKRTARRRYTRRKNRICYLQEIFSNEMAKVDDSFFHRLEESFLVEEDKKHERHPIFGNIVDEVAYHEKYPTIYHLRKKLVDSTDKADLRLIYLALAHMIKFRGHFLIEGDLNPDNSDVDKLFIQLVQTYNQLFEENPINASGVDAKAILSARLSKSRRLENLIAQLPGEKKNGLFGNLIALSLGLTPNFKSNFDLAEDAKLQLSKDTYDDDLDNLLAQIGDQYADLFLAAKNLSDAILLSDILRVNTEITKAPLSASMIKRYDEHHQDLTLLKALVRQQLPEKYKEIFFDQSKNGYAGYIDGGASQEEFYKFIKPILEKMDGTEELLVKLNREDLLRKQRTFDNGSIPHQIHLGELHAILRRQEDFYPFLKDNREKIEKILTFRIPYYVGPLARGNSRFAWMTRKSEETITPWNFEEVVDKGASAQSFIERMTNFDKNLPNEKVLPKHSLLYEYFTVYNELTKVKYVTEGMRKPAFLSGEQKKAIVDLLFKTNRKVTVKQLKEDYFKKIECFDSVEISGVEDRFNASLGTYHDLLKIIKDKDFLDNEENEDILEDIVLTLTLFEDREMIEERLKTYAHLFDDKVMKQLKRRRYTGWGRLSRKLINGIRDKQSGKTILDFLKSDGFANRNFMQLIHDDSLTFKEDIQKAQVSGQGDSLHEHIANLAGSPAIKKGILQTVKVVDELVKVMGRHKPENIVIEMARENQTTQKGQKNSRERMKRIEEGIKELGSQILKEHPVENTQLQNEKLYLYYLQNGRDMYVDQELDINRLSDYDVDHIVPQSFLKDDSIDNKVLTRSDKARGKSDNVPSEEVVKKMKNYWRQLLNAKLITQRKFDNLTKAERGGLSELDKAGFIKRQLVETRQITKHVAQILDSRMNTKYDENDKLIREVKVITLKSKLVSDFRKDFQFYKVREINNYHHAHDAYLNAVVGTALIKKYPKLESEFVYGDYKVYDVRKMIAKSEQEIGKATAKYFFYSNIMNFFKTEITLANGEIRKRPLIETNGETGEIVWDKGRDFATVRKVLSMPQVNIVKKTEVQTGGFSKESILPKRNSDKLIARKKDWDPKKYGGFDSPTVAYSVLVVAKVEKGKSKKLKSVKELLGITIMERSSFEKNPIDFLEAKGYKEVKKDLIIKLPKYSLFELENGRKRMLASAGELQKGNELALPSKYVNFLYLASHYEKLKGSPEDNEQKQLFVEQHKHYLDEIIEQISEFSKRVILADANLDKVLSAYNKHRDKPIREQAENIIHLFTLTNLGAPAAFKYFDTTIDRKRYTSTKEVLDATLIHQSITGLYETRIDLSQLGGDGGGGGGSSGGIPWLMKKPLQLTTLVPLQEYEERLLKQTMLTGSYKEKLQSLFLKYDALWQHWENQVGHRRIKPHHIATGTVNPRPQKQYPINPKAKASIQTVINDLLKQGVLIQQNSIMNTPVYPVPKPDGKWRMVLDYREVNKTIPLIAAQNQHSAGILSSIFRGKYKTTLDLSNGFWAHSITPESYWLTAFTWLGQQYCWTRLPQGFLNSPALFNADVVDLLKEVPNVQVYVDDIYISHDDPREHLEQLEKVFSLLLNAGYVVSLKKSEIAQHEVEFLGFNITKEGRGLTETFKQKLLNITPPRDLKQLQSILGLLNFARNFIPNFSELVKPLYNIIATAPGKYITWTTDNSQQLQNIISMLNSAENLEERNPEVRLIMKVNTSPSAGYIRFYNEFAKRPIMYLNYVYTKAEVKFTNTEKLLTTIHKGLIKALDLGMGQEILVYSPIVSMTKIQKTPLPERKALPIRWITWMSYLEDPRIQFHYDKTLPELQQVPTVTDDIIAKIKHPSEFSMVFYTDGSAIKHPNVNKSHNAGMGIAQVQFKPEFTVINTWSIPLGDHTAQLAEVAAVEFACKKALKIDGPVLIVTDSFYVAESVNKELPYWQSNGFFNNKKKPLKHVSKWKSIADCIQLKPDIIIIHEKGHQPTASTFHTEGNNLADKLATQGSYVVNAGKRTADGSEFEKRTADGSEFESPKKKAKVE

SEQ ID NO: 6668 - protein, 2089 aa, synthetic construct
MPAAKRVKLDGGDKKYSIGLDIGTNSVGWAVITDEYKVPSKKFKVLGNTDRHSIKKNLIGALLFDSGETAEATRLKRTARRRYTRRKNRICYLQEIFSNEMAKVDDSFFHRLEESFLVEEDKKHERHPIFGNIVDEVAYHEKYPTIYHLRKKLVDSTDKADLRLIYLALAHMIKFRGHFLIEGDLNPDNSDVDKLFIQLVQTYNQLFEENPINASGVDAKAILSARLSKSRRLENLIAQLPGEKKNGLFGNLIALSLGLTPNFKSNFDLAEDAKLQLSKDTYDDDLDNLLAQIGDQYADLFLAAKNLSDAILLSDILRVNTEITKAPLSASMIKRYDEHHQDLTLLKALVRQQLPEKYKEIFFDQSKNGYAGYIDGGASQEEFYKFIKPILEKMDGTEELLVKLNREDLLRKQRTFDNGSIPHQIHLGELHAILRRQEDFYPFLKDNREKIEKILTFRIPYYVGPLARGNSRFAWMTRKSEETITPWNFEEVVDKGASAQSFIERMTNFDKNLPNEKVLPKHSLLYEYFTVYNELTKVKYVTEGMRKPAFLSGEQKKAIVDLLFKTNRKVTVKQLKEDYFKKIECFDSVEISGVEDRFNASLGTYHDLLKIIKDKDFLDNEENEDILEDIVLTLTLFEDREMIEERLKTYAHLFDDKVMKQLKRRRYTGWGRLSRKLINGIRDKQSGKTILDFLKSDGFANRNFMQLIHDDSLTFKEDIQKAQVSGQGDSLHEHIANLAGSPAIKKGILQTVKVVDELVKVMGRHKPENIVIEMARENQTTQKGQKNSRERMKRIEEGIKELGSQILKEHPVENTQLQNEKLYLYYLQNGRDMYVDQELDINRLSDYDVDHIVPQSFLKDDSIDNKVLTRSDKARGKSDNVPSEEVVKKMKNYWRQLLNAKLITQRKFDNLTKAERGGLSELDKAGFIKRQLVETRQITKHVAQILDSRMNTKYDENDKLIREVKVITLKSKLVSDFRKDFQFYKVREINNYHHAHDAYLNAVVGTALIKKYPKLESEFVYGDYKVYDVRKMIAKSEQEIGKATAKYFFYSNIMNFFKTEITLANGEIRKRPLIETNGETGEIVWDKGRDFATVRKVLSMPQVNIVKKTEVQTGGFSKESILPKRNSDKLIARKKDWDPKKYGGFDSPTVAYSVLVVAKVEKGKSKKLKSVKELLGITIMERSSFEKNPIDFLEAKGYKEVKKDLIIKLPKYSLFELENGRKRMLASAGELQKGNELALPSKYVNFLYLASHYEKLKGSPEDNEQKQLFVEQHKHYLDEIIEQISEFSKRVILADANLDKVLSAYNKHRDKPIREQAENIIHLFTLTNLGAPAAFKYFDTTIDRKRYTSTKEVLDATLIHQSITGLYETRIDLSQLGGDGGGGGGSSGGVLNLEEEYRLHEKPVPSSIDPSWLQLFPTVWAERAGMGLANQVPPVVVELRSGASPVAVRQYPMSKEAREGIRPHIQRFLDLGVLVPCQSPWNTPLLPVKKPGTNDYRPVQDLREINKRVQDIHPTVPNPYNLLSSLPPSHTWYSVLDLKDAFFCLKLHPNSQPLFAFEWRDPEKGNTGQLTWTRLPQGFKNSPTLFNEALHRDLAPFRALNPQVVLLQYVDDLLVAAPTYRDCKEGTQKLLQELSKLGYRVSAKKAQLCQKEVTYLGYLLKEGKRWLTPARKATVMKIPPPTTPRQVREFLGTAGFCRLWIPGFASLAAPLYPLTKPSIPFIWTEEHQKAFDRIKEALLSAPALALPDLTKPFTLYVDERAGVARGVLTQTLGPWRRPVAYLSKKLDPVASGWPTCLKAVAAVALLLKDADKLTLGQNVTVIASHSLESIVRQPPDRWMTNARMTHYQSLLLNERVSFAPPAVLNPATLLPVESEATPVHRCSEILAEETGTRRDLKDQPLPGVPAWYTDGSSFIAEGKRRAGAAIVDGKRTVWASSLPEGTSAQKAELVALTQALRLAEGKDINIYTDSRYAFATAHIHGAIYKQRGWLTSAGKDIKNKEEILALLEAIHLPKRVAIIHCPGHQKGNDPVATGNRRADEAAKQAALSTRVLAETTKPAGKRTADGSEFEKRTADGSEFESPKKKAKVE

SEQ ID NO: 6669 - protein, 2089 aa, synthetic construct
MPAAKRVKLDGGDKKYSIGLDIGTNSVGWAVITDEYKVPSKKFKVLGNTDRHSIKKNLIGALLFDSGETAEATRLKRTARRRYTRRKNRICYLQEIFSNEMAKVDDSFFHRLEESFLVEEDKKHERHPIFGNIVDEVAYHEKYPTIYHLRKKLVDSTDKADLRLIYLALAHMIKFRGHFLIEGDLNPDNSDVDKLFIQLVQTYNQLFEENPINASGVDAKAILSARLSKSRRLENLIAQLPGEKKNGLFGNLIALSLGLTPNFKSNFDLAEDAKLQLSKDTYDDDLDNLLAQIGDQYADLFLAAKNLSDAILLSDILRVNTEITKAPLSASMIKRYDEHHQDLTLLKALVRQQLPEKYKEIFFDQSKNGYAGYIDGGASQEEFYKFIKPILEKMDGTEELLVKLNREDLLRKQRTFDNGSIPHQIHLGELHAILRRQEDFYPFLKDNREKIEKILTFRIPYYVGPLARGNSRFAWMTRKSEETITPWNFEEVVDKGASAQSFIERMTNFDKNLPNEKVLPKHSLLYEYFTVYNELTKVKYVTEGMRKPAFLSGEQKKAIVDLLFKTNRKVTVKQLKEDYFKKIECFDSVEISGVEDRFNASLGTYHDLLKIIKDKDFLDNEENEDILEDIVLTLTLFEDREMIEERLKTYAHLFDDKVMKQLKRRRYTGWGRLSRKLINGIRDKQSGKTILDFLKSDGFANRNFMQLIHDDSLTFKEDIQKAQVSGQGDSLHEHIANLAGSPAIKKGILQTVKVVDELVKVMGRHKPENIVIEMARENQTTQKGQKNSRERMKRIEEGIKELGSQILKEHPVENTQLQNEKLYLYYLQNGRDMYVDQELDINRLSDYDVDHIVPQSFLKDDSIDNKVLTRSDKARGKSDNVPSEEVVKKMKNYWRQLLNAKLITQRKFDNLTKAERGGLSELDKAGFIKRQLVETRQITKHVAQILDSRMNTKYDENDKLIREVKVITLKSKLVSDFRKDFQFYKVREINNYHHAHDAYLNAVVGTALIKKYPKLESEFVYGDYKVYDVRKMIAKSEQEIGKATAKYFFYSNIMNFFKTEITLANGEIRKRPLIETNGETGEIVWDKGRDFATVRKVLSMPQVNIVKKTEVQTGGFSKESILPKRNSDKLIARKKDWDPKKYGGFDSPTVAYSVLVVAKVEKGKSKKLKSVKELLGITIMERSSFEKNPIDFLEAKGYKEVKKDLIIKLPKYSLFELENGRKRMLASAGELQKGNELALPSKYVNFLYLASHYEKLKGSPEDNEQKQLFVEQHKHYLDEIIEQISEFSKRVILADANLDKVLSAYNKHRDKPIREQAENIIHLFTLTNLGAPAAFKYFDTTIDRKRYTSTKEVLDATLIHQSITGLYETRIDLSQLGGDGGGGGGSSGGVLNLEEEYRLHEKPVPSSIDPSWLQLFPTVWAERAGMGLANQVPPVVVELRSGASPVAVRQYPMSKEAREGIRPHIQRFLDLGVLVPCQSPWNTPLLPVKKPGTNDYRPVQDLREINKRVQDIHPTVPNPYNLLSSLPPSHTWYSVLDLKDAFFCLKLHPNSQPLFAFEWRDPEKGNTGQLTWTRLPQGFKNSPTLFNEALHRDLAPFRALNPQVVLLQYVDDLLVAAPTYRDCKEGTQKLLQELSKLGYRVSAKKAQLCQKEVTYLGYLLKEGKRWLTPARKATVMKIPPPTTPRQVREFLGKAGFCRLFIPGFASLAAPLYPLTKPSIPFIWTEEHQKAFDRIKEALLSAPALALPDLTKPFTLYVDERAGVARGVLTQTLGPWRRPVAYLSKKLDPVASGWPTCLKAVAAVALLLKDADKLTLGQNVTVIASHSLESIVRQPPDRWMTNARMTHYQSLLLNERVSFAPPAVLNPATLLPVESEATPVHRCSEILAEETGTRRDLKDQPLPGVPAWYTDGSSFIAEGKRRAGAAIVDGKRTVWASSLPEGTSAQKAELVALTQALRLAEGKDINIYTDSRYAFATAHIHGAIYKQRGWLTSAGKDIKNKEEILALLEAIHLPKRVAIIHCPGHQKGNDPVATGNRRADEAAKQAALSTRVLAETTKPAGKRTADGSEFEKRTADGSEFESPKKKAKVE

SEQ ID NO: 6670 - protein, 2091 aa, synthetic construct
MPAAKRVKLDGGDKKYSIGLDIGTNSVGWAVITDEYKVPSKKFKVLGNTDRHSIKKNLIGALLFDSGETAEATRLKRTARRRYTRRKNRICYLQEIFSNEMAKVDDSFFHRLEESFLVEEDKKHERHPIFGNIVDEVAYHEKYPTIYHLRKKLVDSTDKADLRLIYLALAHMIKFRGHFLIEGDLNPDNSDVDKLFIQLVQTYNQLFEENPINASGVDAKAILSARLSKSRRLENLIAQLPGEKKNGLFGNLIALSLGLTPNFKSNFDLAEDAKLQLSKDTYDDDLDNLLAQIGDQYADLFLAAKNLSDAILLSDILRVNTEITKAPLSASMIKRYDEHHQDLTLLKALVRQQLPEKYKEIFFDQSKNGYAGYIDGGASQEEFYKFIKPILEKMDGTEELLVKLNREDLLRKQRTFDNGSIPHQIHLGELHAILRRQEDFYPFLKDNREKIEKILTFRIPYYVGPLARGNSRFAWMTRKSEETITPWNFEEVVDKGASAQSFIERMTNFDKNLPNEKVLPKHSLLYEYFTVYNELTKVKYVTEGMRKPAFLSGEQKKAIVDLLFKTNRKVTVKQLKEDYFKKIECFDSVEISGVEDRFNASLGTYHDLLKIIKDKDFLDNEENEDILEDIVLTLTLFEDREMIEERLKTYAHLFDDKVMKQLKRRRYTGWGRLSRKLINGIRDKQSGKTILDFLKSDGFANRNFMQLIHDDSLTFKEDIQKAQVSGQGDSLHEHIANLAGSPAIKKGILQTVKVVDELVKVMGRHKPENIVIEMARENQTTQKGQKNSRERMKRIEEGIKELGSQILKEHPVENTQLQNEKLYLYYLQNGRDMYVDQELDINRLSDYDVDHIVPQSFLKDDSIDNKVLTRSDKARGKSDNVPSEEVVKKMKNYWRQLLNAKLITQRKFDNLTKAERGGLSELDKAGFIKRQLVETRQITKHVAQILDSRMNTKYDENDKLIREVKVITLKSKLVSDFRKDFQFYKVREINNYHHAHDAYLNAVVGTALIKKYPKLESEFVYGDYKVYDVRKMIAKSEQEIGKATAKYFFYSNIMNFFKTEITLANGEIRKRPLIETNGETGEIVWDKGRDFATVRKVLSMPQVNIVKKTEVQTGGFSKESILPKRNSDKLIARKKDWDPKKYGGFDSPTVAYSVLVVAKVEKGKSKKLKSVKELLGITIMERSSFEKNPIDFLEAKGYKEVKKDLIIKLPKYSLFELENGRKRMLASAGELQKGNELALPSKYVNFLYLASHYEKLKGSPEDNEQKQLFVEQHKHYLDEIIEQISEFSKRVILADANLDKVLSAYNKHRDKPIREQAENIIHLFTLTNLGAPAAFKYFDTTIDRKRYTSTKEVLDATLIHQSITGLYETRIDLSQLGGDGGGGGGSSGGTLNIEDEYRLHETSKEPDVPLGSTWLSDFPQAWAETGGMGLAVRQAPLIIPLKATSTPVSIKQYPMSQEARLGIKPHIQRLLDQGILVPCQSPWNTPLLPVKKPGTNDYRPVQDLREVNKRVEDIHPTVPNPYNLLSGLPPSHQWYTVLDLKDAFFCLRLHPTSQPLFAFEWRDPEMGISGQLTWTRLPQGFKNSPTLFNEALHRDLADFRIQHPDLILLQYVDDLLLAATSEQDCQRGTRALLQTLGNLGYRASAKKAQICQKQVKYLGYLLKEGQRWLTEARKETVMGQPTPKTPRQLREFLGTAGFCRLWIPGFAEMAAPLYPLTKPGTLFNWGPDQQKAYQEIKQALLTAPALGLPDLTKPFELFVDEKQGYAKGVLTQKLGPWRRPVAYLSKKLDPVAAGWPPCLRMVAAIAVLTKDAGKLTMGQPLVILAPHAVEALVKQPPDRWLSNARMTHYQAMLLDTDRVQFGPVVALNPATLLPLPEKEAPHDCLEILAETHGTRPDLTDQPIPDADYTWYTDGSSFLQEGQRRAGAAVTTETEVIWARALPAGTSAQRAELIALTQALKMAEGKKLNVYTDSRYAFATAHVHGEIYRRRGWLTSEGREIKNKNEILALLKALFLPKRLSIIHCPGHQKGNSAEARGNRMADQAAREAAMKAVLETSTLLAGKRTADGSEFEKRTADGSEFESPKKKAKVE

SEQ ID NO: 6671 - protein, 2093 aa, synthetic construct
MPAAKRVKLDGGDKKYSIGLDIGTNSVGWAVITDEYKVPSKKFKVLGNTDRHSIKKNLIGALLFDSGETAEATRLKRTARRRYTRRKNRICYLQEIFSNEMAKVDDSFFHRLEESFLVEEDKKHERHPIFGNIVDEVAYHEKYPTIYHLRKKLVDSTDKADLRLIYLALAHMIKFRGHFLIEGDLNPDNSDVDKLFIQLVQTYNQLFEENPINASGVDAKAILSARLSKSRRLENLIAQLPGEKKNGLFGNLIALSLGLTPNFKSNFDLAEDAKLQLSKDTYDDDLDNLLAQIGDQYADLFLAAKNLSDAILLSDILRVNTEITKAPLSASMIKRYDEHHQDLTLLKALVRQQLPEKYKEIFFDQSKNGYAGYIDGGASQEEFYKFIKPILEKMDGTEELLVKLNREDLLRKQRTFDNGSIPHQIHLGELHAILRRQEDFYPFLKDNREKIEKILTFRIPYYVGPLARGNSRFAWMTRKSEETITPWNFEEVVDKGASAQSFIERMTNFDKNLPNEKVLPKHSLLYEYFTVYNELTKVKYVTEGMRKPAFLSGEQKKAIVDLLFKTNRKVTVKQLKEDYFKKIECFDSVEISGVEDRFNASLGTYHDLLKIIKDKDFLDNEENEDILEDIVLTLTLFEDREMIEERLKTYAHLFDDKVMKQLKRRRYTGWGRLSRKLINGIRDKQSGKTILDFLKSDGFANRNFMQLIHDDSLTFKEDIQKAQVSGQGDSLHEHIANLAGSPAIKKGILQTVKVVDELVKVMGRHKPENIVIEMARENQTTQKGQKNSRERMKRIEEGIKELGSQILKEHPVENTQLQNEKLYLYYLQNGRDMYVDQELDINRLSDYDVDHIVPQSFLKDDSIDNKVLTRSDKARGKSDNVPSEEVVKKMKNYWRQLLNAKLITQRKFDNLTKAERGGLSELDKAGFIKRQLVETRQITKHVAQILDSRMNTKYDENDKLIREVKVITLKSKLVSDFRKDFQFYKVREINNYHHAHDAYLNAVVGTALIKKYPKLESEFVYGDYKVYDVRKMIAKSEQEIGKATAKYFFYSNIMNFFKTEITLANGEIRKRPLIETNGETGEIVWDKGRDFATVRKVLSMPQVNIVKKTEVQTGGFSKESILPKRNSDKLIARKKDWDPKKYGGFDSPTVAYSVLVVAKVEKGKSKKLKSVKELLGITIMERSSFEKNPIDFLEAKGYKEVKKDLIIKLPKYSLFELENGRKRMLASAGELQKGNELALPSKYVNFLYLASHYEKLKGSPEDNEQKQLFVEQHKHYLDEIIEQISEFSKRVILADANLDKVLSAYNKHRDKPIREQAENIIHLFTLTNLGAPAAFKYFDTTIDRKRYTSTKEVLDATLIHQSITGLYETRIDLSQLGGDGGGSSGGGGGTAPLEEEYRLFLEAPIQNVTLLEQWKREIPKVWAEINPPGLASTQAPIHVQLLSTALPVRVRQYPITLEAKRSLRETIRKFRAAGILRPVHSPWNTPLLPVRKSGTSEYRMVQDLREVNKRVETIHPTVPNPYTLLSLLPPDRIWYSVLDLKDAFFCIPLAPESQLIFAFEWADAEEGESGQLTWTRLPQGFKNSPTLFDEALNRDLQGFRLDHPSVSLLQYVDDLLIAADTQAACLSATRDLLMTLAELGYRVSGKKAQLCQEEVTYLGFKIHKGSRSLSNSRTQAILQIPVPKTKRQVREFLGTIGYCRLWIPGFAELAQPLYAATRGGNDPLVWGEKEEEAFQSLKLALTQPPALALPSLDKPFQLFVEETSGAAKGVLTQALGPWKRPVAYLSKRLDPVAAGWPRCLRAIAAAALLTREASKLTFGQDIEITSSHNLESLLRSPPDKWLTNARITQYQVLLLDPPRVRFKQTAALNPATLLPETDDTLPIHHCLDTLDSLTSTRPDLTDQPLAQAEATLFTDGSSYIRDGKRYAGAAVVTLDSVIWAEPLPIGTSAQKAELIALTKALEWSKDKSVNIYTDSRYAFATLHVHGMIYRERGLLTAGGKAIKNAPEILALLTAVWLPKRVAVMHCKGHQKDDAPTSTGNRRADEVAREVAIRPLSTQATISAGKRTADGSEFEKRTADGSEFESPKKKAKVE

SEQ ID NO: 6672 - protein, 2097 aa, synthetic construct
MPAAKRVKLDGGDKKYSIGLDIGTNSVGWAVITDEYKVPSKKFKVLGNTDRHSIKKNLIGALLFDSGETAEATRLKRTARRRYTRRKNRICYLQEIFSNEMAKVDDSFFHRLEESFLVEEDKKHERHPIFGNIVDEVAYHEKYPTIYHLRKKLVDSTDKADLRLIYLALAHMIKFRGHFLIEGDLNPDNSDVDKLFIQLVQTYNQLFEENPINASGVDAKAILSARLSKSRRLENLIAQLPGEKKNGLFGNLIALSLGLTPNFKSNFDLAEDAKLQLSKDTYDDDLDNLLAQIGDQYADLFLAAKNLSDAILLSDILRVNTEITKAPLSASMIKRYDEHHQDLTLLKALVRQQLPEKYKEIFFDQSKNGYAGYIDGGASQEEFYKFIKPILEKMDGTEELLVKLNREDLLRKQRTFDNGSIPHQIHLGELHAILRRQEDFYPFLKDNREKIEKILTFRIPYYVGPLARGNSRFAWMTRKSEETITPWNFEEVVDKGASAQSFIERMTNFDKNLPNEKVLPKHSLLYEYFTVYNELTKVKYVTEGMRKPAFLSGEQKKAIVDLLFKTNRKVTVKQLKEDYFKKIECFDSVEISGVEDRFNASLGTYHDLLKIIKDKDFLDNEENEDILEDIVLTLTLFEDREMIEERLKTYAHLFDDKVMKQLKRRRYTGWGRLSRKLINGIRDKQSGKTILDFLKSDGFANRNFMQLIHDDSLTFKEDIQKAQVSGQGDSLHEHIANLAGSPAIKKGILQTVKVVDELVKVMGRHKPENIVIEMARENQTTQKGQKNSRERMKRIEEGIKELGSQILKEHPVENTQLQNEKLYLYYLQNGRDMYVDQELDINRLSDYDVDHIVPQSFLKDDSIDNKVLTRSDKARGKSDNVPSEEVVKKMKNYWRQLLNAKLITQRKFDNLTKAERGGLSELDKAGFIKRQLVETRQITKHVAQILDSRMNTKYDENDKLIREVKVITLKSKLVSDFRKDFQFYKVREINNYHHAHDAYLNAVVGTALIKKYPKLESEFVYGDYKVYDVRKMIAKSEQEIGKATAKYFFYSNIMNFFKTEITLANGEIRKRPLIETNGETGEIVWDKGRDFATVRKVLSMPQVNIVKKTEVQTGGFSKESILPKRNSDKLIARKKDWDPKKYGGFDSPTVAYSVLVVAKVEKGKSKKLKSVKELLGITIMERSSFEKNPIDFLEAKGYKEVKKDLIIKLPKYSLFELENGRKRMLASAGELQKGNELALPSKYVNFLYLASHYEKLKGSPEDNEQKQLFVEQHKHYLDEIIEQISEFSKRVILADANLDKVLSAYNKHRDKPIREQAENIIHLFTLTNLGAPAAFKYFDTTIDRKRYTSTKEVLDATLIHQSITGLYETRIDLSQLGGDGGGSSGGGGGTVSLQDEHRLFDIPVTTSLPDVWLQDFPQAWAETGGLGRAKCQAPIIIDLKPTAVPVSIKQYPMSLEAHMGIRQHIIKFLELGVLRPCRSPWNTPLLPVKKPGTQDYRPVQDLREINKRTVDIHPTVPNPYNLLSTLKPDYSWYTVLDLKDAFFCLPLAPQSQELFAFEWKDPERGISGQLTWTRLPQGFKNSPTLFNEALHRDLTDFRTQHPEVTLLQYVDDLLLAAPTKKACTQGTRHLLQELGEKGYRASAKKAQICQTKVTYLGYILSEGKRWLTPGRIETVARIPPPRNPREVREFLGKAGFCRLFIPGFAELAAPLYALTKPSTPFTWQTEHQLAFEALKKALLSAPALGLPDTSKPFTLFLDERQGIAKGVLTQKLGPWKRPVAYLSKKLDPVAAGWPPCLRIMAATAMLVKDSAKLTLGQPLTVITPHTLEAIVRQPPDRWITNARLTHYQALLLDTDRVQFGPPVTLNPATLLPVPENQPSPHDCRQVLAETHGTREDLKDQELPDADHTWYTDGSSYLDSGTRRAGAAVVDGHNTIWAQSLPPGTSAQKAELIALTKALELSKGKKANIYTDSRYAFATAHTHGSIYERRGWLTSEGKEIKNKAEIIALLKALFLPQEVAIIHCPGHQKGQDPVAVGNRQADRVARQAAMAEVLTLATEPDNTSHITAGKRTADGSEFEKRTADGSEFESPKKKAKVE

SEQ ID NO: 6673 - protein, 2008 aa, synthetic construct
MPAAKRVKLDGGDKKYSIGLDIGTNSVGWAVITDEYKVPSKKFKVLGNTDRHSIKKNLIGALLFDSGETAEATRLKRTARRRYTRRKNRICYLQEIFSNEMAKVDDSFFHRLEESFLVEEDKKHERHPIFGNIVDEVAYHEKYPTIYHLRKKLVDSTDKADLRLIYLALAHMIKFRGHFLIEGDLNPDNSDVDKLFIQLVQTYNQLFEENPINASGVDAKAILSARLSKSRRLENLIAQLPGEKKNGLFGNLIALSLGLTPNFKSNFDLAEDAKLQLSKDTYDDDLDNLLAQIGDQYADLFLAAKNLSDAILLSDILRVNTEITKAPLSASMIKRYDEHHQDLTLLKALVRQQLPEKYKEIFFDQSKNGYAGYIDGGASQEEFYKFIKPILEKMDGTEELLVKLNREDLLRKQRTFDNGSIPHQIHLGELHAILRRQEDFYPFLKDNREKIEKILTFRIPYYVGPLARGNSRFAWMTRKSEETITPWNFEEVVDKGASAQSFIERMTNFDKNLPNEKVLPKHSLLYEYFTVYNELTKVKYVTEGMRKPAFLSGEQKKAIVDLLFKTNRKVTVKQLKEDYFKKIECFDSVEISGVEDRFNASLGTYHDLLKIIKDKDFLDNEENEDILEDIVLTLTLFEDREMIEERLKTYAHLFDDKVMKQLKRRRYTGWGRLSRKLINGIRDKQSGKTILDFLKSDGFANRNFMQLIHDDSLTFKEDIQKAQVSGQGDSLHEHIANLAGSPAIKKGILQTVKVVDELVKVMGRHKPENIVIEMARENQTTQKGQKNSRERMKRIEEGIKELGSQILKEHPVENTQLQNEKLYLYYLQNGRDMYVDQELDINRLSDYDVDHIVPQSFLKDDSIDNKVLTRSDKARGKSDNVPSEEVVKKMKNYWRQLLNAKLITQRKFDNLTKAERGGLSELDKAGFIKRQLVETRQITKHVAQILDSRMNTKYDENDKLIREVKVITLKSKLVSDFRKDFQFYKVREINNYHHAHDAYLNAVVGTALIKKYPKLESEFVYGDYKVYDVRKMIAKSEQEIGKATAKYFFYSNIMNFFKTEITLANGEIRKRPLIETNGETGEIVWDKGRDFATVRKVLSMPQVNIVKKTEVQTGGFSKESILPKRNSDKLIARKKDWDPKKYGGFDSPTVAYSVLVVAKVEKGKSKKLKSVKELLGITIMERSSFEKNPIDFLEAKGYKEVKKDLIIKLPKYSLFELENGRKRMLASAGELQKGNELALPSKYVNFLYLASHYEKLKGSPEDNEQKQLFVEQHKHYLDEIIEQISEFSKRVILADANLDKVLSAYNKHRDKPIREQAENIIHLFTLTNLGAPAAFKYFDTTIDRKRYTSTKEVLDATLIHQSITGLYETRIDLSQLGGDGGGSSGGGGGAVLGLEHLPRPPQISQFPLNPERLQALQHLVRKALEAGHIEPYTGPGNNPVFPVKKANGTWRFIHDLRATNSLTIDLSSSSPGPPDLSSLPTTLAHLQTIDLRDAFFQIPLPKQFQPYFAFTVPQQCNYGPGTRYAWKVLPQGFKNSPTLFEMQLAHILQPIRQAFPQCTILQYMDDILLASPSHEDLLLLSEATMASLISHGLPVSENKTQQTPGTIKFLGQIISPNHLTYDAVPTVPIRSRWALPELQALLGEIQWVSKGTPTLRQPLHSLYCALQRHTDPRDQIYLNPSQVQSLVQLRQALSQNCRSRLVQTLPLLGAIMLTLTGTTTVVFQSKEQWPLVWLHAPLPHTSQCPWGQLLASAVLLLDKYTLQSYGLLCQTIHHNISTQTFNQFIQTSDHPSVPILLHHSHRFKNLGAQTGELWNTFLKTAAPLAPVKALMPVFTLSPVIINTAPCLFSDGSTSRAAYILWDKQILSQRSFPLPPPHKSAQRAELLGLLHGLSSARSWRCLNIFLDSKYLYHYLRTLALGTFQGRSSQAPFQALLPRLLSRKVVYLHHVRSHTNLPDPISRLNALTDALLITPVLQLAGKRTADGSEFEKRTADGSEFESPKKKAKVE

SEQ ID NO: 6674 - protein, 2122 aa, synthetic construct
MPAAKRVKLDGGDKKYSIGLDIGTNSVGWAVITDEYKVPSKKFKVLGNTDRHSIKKNLIGALLFDSGETAEATRLKRTARRRYTRRKNRICYLQEIFSNEMAKVDDSFFHRLEESFLVEEDKKHERHPIFGNIVDEVAYHEKYPTIYHLRKKLVDSTDKADLRLIYLALAHMIKFRGHFLIEGDLNPDNSDVDKLFIQLVQTYNQLFEENPINASGVDAKAILSARLSKSRRLENLIAQLPGEKKNGLFGNLIALSLGLTPNFKSNFDLAEDAKLQLSKDTYDDDLDNLLAQIGDQYADLFLAAKNLSDAILLSDILRVNTEITKAPLSASMIKRYDEHHQDLTLLKALVRQQLPEKYKEIFFDQSKNGYAGYIDGGASQEEFYKFIKPILEKMDGTEELLVKLNREDLLRKQRTFDNGSIPHQIHLGELHAILRRQEDFYPFLKDNREKIEKILTFRIPYYVGPLARGNSRFAWMTRKSEETITPWNFEEVVDKGASAQSFIERMTNFDKNLPNEKVLPKHSLLYEYFTVYNELTKVKYVTEGMRKPAFLSGEQKKAIVDLLFKTNRKVTVKQLKEDYFKKIECFDSVEISGVEDRFNASLGTYHDLLKIIKDKDFLDNEENEDILEDIVLTLTLFEDREMIEERLKTYAHLFDDKVMKQLKRRRYTGWGRLSRKLINGIRDKQSGKTILDFLKSDGFANRNFMQLIHDDSLTFKEDIQKAQVSGQGDSLHEHIANLAGSPAIKKGILQTVKVVDELVKVMGRHKPENIVIEMARENQTTQKGQKNSRERMKRIEEGIKELGSQILKEHPVENTQLQNEKLYLYYLQNGRDMYVDQELDINRLSDYDVDHIVPQSFLKDDSIDNKVLTRSDKARGKSDNVPSEEVVKKMKNYWRQLLNAKLITQRKFDNLTKAERGGLSELDKAGFIKRQLVETRQITKHVAQILDSRMNTKYDENDKLIREVKVITLKSKLVSDFRKDFQFYKVREINNYHHAHDAYLNAVVGTALIKKYPKLESEFVYGDYKVYDVRKMIAKSEQEIGKATAKYFFYSNIMNFFKTEITLANGEIRKRPLIETNGETGEIVWDKGRDFATVRKVLSMPQVNIVKKTEVQTGGFSKESILPKRNSDKLIARKKDWDPKKYGGFDSPTVAYSVLVVAKVEKGKSKKLKSVKELLGITIMERSSFEKNPIDFLEAKGYKEVKKDLIIKLPKYSLFELENGRKRMLASAGELQKGNELALPSKYVNFLYLASHYEKLKGSPEDNEQKQLFVEQHKHYLDEIIEQISEFSKRVILADANLDKVLSAYNKHRDKPIREQAENIIHLFTLTNLGAPAAFKYFDTTIDRKRYTSTKEVLDATLIHQSITGLYETRIDLSQLGGDGGGSSGGGGGLLGRDLLTKLKAQIQFSTEGPQVTWEDRPAMCLVLNLEEEYRLHEKPVPPSIDPSWLQLFPMVWAEKAGMGLANQVPPVVVELKSDASPVAVRQYPMSKEAREGIRPHIQRFLDLGILVPCQSPWNTPLLPVKKPGTNDYRPVQDLREVNKRVQDIHPTVPNPYNLLSSLPPSHTWYSVLDLKDAFFCLKLHPNSQPLFAFEWRDPEKGNTGQLTWTRLPQGFKNSPTLFNEALHRDLASFRALNPQVVMLQYVDDLLVAAPTYRDCKEGTRRLLQELSKLGYRVSAKKAQLCREEVTYLGYLLKGGKRWLTPARKATVMKIPTPTTPRQVREFLGTAGFCRLWIPGFASLAAPLYPLTRPKVPFTWTEAHQEAFGRIKEALLSAPALALPDLTKPFALYVDEKEGVARGVLTQTLGPWRRPVAYLSKKLDPVASGWPTCLKAIAAVALLLKDADKLTLGQNVLVIAPHNLESIVRQPPDRWMTNARMTHYQSLLLNERVSFAPPAILNPATLLPVESDDTPIHICSEILAEETGTRPDLRDQPLPGVPAWYTDGSSFIMDGRRQAGAAIVDNKRTVWASNLPEGTSAQKAELIALTQALRLAEGKSINIYTDSRYAFATAHVHGAIYKQRGWLTSAGKDIKNKEEILALLEAIHLPKRVAIIHCPGHQRGTDPVATGNRKADEAAKQAAQSTRILTETTKNAGKRTADGSEFEKRTADGSEFESPKKKAKVE

SEQ ID NO: 6675 - protein, 2213 aa, synthetic construct
MPAAKRVKLDGGDKKYSIGLDIGTNSVGWAVITDEYKVPSKKFKVLGNTDRHSIKKNLIGALLFDSGETAEATRLKRTARRRYTRRKNRICYLQEIFSNEMAKVDDSFFHRLEESFLVEEDKKHERHPIFGNIVDEVAYHEKYPTIYHLRKKLVDSTDKADLRLIYLALAHMIKFRGHFLIEGDLNPDNSDVDKLFIQLVQTYNQLFEENPINASGVDAKAILSARLSKSRRLENLIAQLPGEKKNGLFGNLIALSLGLTPNFKSNFDLAEDAKLQLSKDTYDDDLDNLLAQIGDQYADLFLAAKNLSDAILLSDILRVNTEITKAPLSASMIKRYDEHHQDLTLLKALVRQQLPEKYKEIFFDQSKNGYAGYIDGGASQEEFYKFIKPILEKMDGTEELLVKLNREDLLRKQRTFDNGSIPHQIHLGELHAILRRQEDFYPFLKDNREKIEKILTFRIPYYVGPLARGNSRFAWMTRKSEETITPWNFEEVVDKGASAQSFIERMTNFDKNLPNEKVLPKHSLLYEYFTVYNELTKVKYVTEGMRKPAFLSGEQKKAIVDLLFKTNRKVTVKQLKEDYFKKIECFDSVEISGVEDRFNASLGTYHDLLKIIKDKDFLDNEENEDILEDIVLTLTLFEDREMIEERLKTYAHLFDDKVMKQLKRRRYTGWGRLSRKLINGIRDKQSGKTILDFLKSDGFANRNFMQLIHDDSLTFKEDIQKAQVSGQGDSLHEHIANLAGSPAIKKGILQTVKVVDELVKVMGRHKPENIVIEMARENQTTQKGQKNSRERMKRIEEGIKELGSQILKEHPVENTQLQNEKLYLYYLQNGRDMYVDQELDINRLSDYDVDHIVPQSFLKDDSIDNKVLTRSDKARGKSDNVPSEEVVKKMKNYWRQLLNAKLITQRKFDNLTKAERGGLSELDKAGFIKRQLVETRQITKHVAQILDSRMNTKYDENDKLIREVKVITLKSKLVSDFRKDFQFYKVREINNYHHAHDAYLNAVVGTALIKKYPKLESEFVYGDYKVYDVRKMIAKSEQEIGKATAKYFFYSNIMNFFKTEITLANGEIRKRPLIETNGETGEIVWDKGRDFATVRKVLSMPQVNIVKKTEVQTGGFSKESILPKRNSDKLIARKKDWDPKKYGGFDSPTVAYSVLVVAKVEKGKSKKLKSVKELLGITIMERSSFEKNPIDFLEAKGYKEVKKDLIIKLPKYSLFELENGRKRMLASAGELQKGNELALPSKYVNFLYLASHYEKLKGSPEDNEQKQLFVEQHKHYLDEIIEQISEFSKRVILADANLDKVLSAYNKHRDKPIREQAENIIHLFTLTNLGAPAAFKYFDTTIDRKRYTSTKEVLDATLIHQSITGLYETRIDLSQLGGDGGGSSGGGGGTLGDQGSRGSDPLPEPRVTLTVEGIPTEFLVNTGAEHSVLTKPMGKMGSKRTVVAGATGSKVYPWTTKRLLKIGQKQVTHSFLVIPECPAPLLGRDLLTKLKAQIQFSTEGPQVTWEDRPAMCLVLNLEEEYRLHEKPVPPSIDPSWLQLFPMVWAEKAGMGLANQVPPVVVELKSDASPVAVRQYPMSKEAREGIRPHIQRFLDLGILVPCQSPWNTPLLPVKKPGTNDYRPVQDLREVNKRVQDIHPTVPNPYNLLSSLPPSHTWYSVLDLKDAFFCLKLHPNSQPLFAFEWRDPEKGNTGQLTWTRLPQGFKNSPTLFNEALHRDLASFRALNPQVVMLQYVDDLLVAAPTYRDCKEGTRRLLQELSKLGYRVSAKKAQLCREEVTYLGYLLKGGKRWLTPARKATVMKIPTPTTPRQVREFLGTAGFCRLWIPGFASLAAPLYPLTRPKVPFTWTEAHQEAFGRIKEALLSAPALALPDLTKPFALYVDEKEGVARGVLTQTLGPWRRPVAYLSKKLDPVASGWPTCLKAIAAVALLLKDADKLTLGQNVLVIAPHNLESIVRQPPDRWMTNARMTHYQSLLLNERVSFAPPAILNPATLLPVESDDTPIHICSEILAEETGTRPDLRDQPLPGVPAWYTDGSSFIMDGRRQAGAAIVDNKRTVWASNLPEGTSAQKAELIALTQALRLAEGKSINIYTDSRYAFATAHVHGAIYKQRGWLTSAGKDIKNKEEILALLEAIHLPKRVAIIHCPGHQRGTDPVATGNRKADEAAKQAAQSTRILTETTKNAGKRTADGSEFEKRTADGSEFESPKKKAKVE

SEQ ID NO: 6676 - protein, 2213 aa, synthetic construct
MPAAKRVKLDGGDKKYSIGLDIGTNSVGWAVITDEYKVPSKKFKVLGNTDRHSIKKNLIGALLFDSGETAEATRLKRTARRRYTRRKNRICYLQEIFSNEMAKVDDSFFHRLEESFLVEEDKKHERHPIFGNIVDEVAYHEKYPTIYHLRKKLVDSTDKADLRLIYLALAHMIKFRGHFLIEGDLNPDNSDVDKLFIQLVQTYNQLFEENPINASGVDAKAILSARLSKSRRLENLIAQLPGEKKNGLFGNLIALSLGLTPNFKSNFDLAEDAKLQLSKDTYDDDLDNLLAQIGDQYADLFLAAKNLSDAILLSDILRVNTEITKAPLSASMIKRYDEHHQDLTLLKALVRQQLPEKYKEIFFDQSKNGYAGYIDGGASQEEFYKFIKPILEKMDGTEELLVKLNREDLLRKQRTFDNGSIPHQIHLGELHAILRRQEDFYPFLKDNREKIEKILTFRIPYYVGPLARGNSRFAWMTRKSEETITPWNFEEVVDKGASAQSFIERMTNFDKNLPNEKVLPKHSLLYEYFTVYNELTKVKYVTEGMRKPAFLSGEQKKAIVDLLFKTNRKVTVKQLKEDYFKKIECFDSVEISGVEDRFNASLGTYHDLLKIIKDKDFLDNEENEDILEDIVLTLTLFEDREMIEERLKTYAHLFDDKVMKQLKRRRYTGWGRLSRKLINGIRDKQSGKTILDFLKSDGFANRNFMQLIHDDSLTFKEDIQKAQVSGQGDSLHEHIANLAGSPAIKKGILQTVKVVDELVKVMGRHKPENIVIEMARENQTTQKGQKNSRERMKRIEEGIKELGSQILKEHPVENTQLQNEKLYLYYLQNGRDMYVDQELDINRLSDYDVDHIVPQSFLKDDSIDNKVLTRSDKARGKSDNVPSEEVVKKMKNYWRQLLNAKLITQRKFDNLTKAERGGLSELDKAGFIKRQLVETRQITKHVAQILDSRMNTKYDENDKLIREVKVITLKSKLVSDFRKDFQFYKVREINNYHHAHDAYLNAVVGTALIKKYPKLESEFVYGDYKVYDVRKMIAKSEQEIGKATAKYFFYSNIMNFFKTEITLANGEIRKRPLIETNGETGEIVWDKGRDFATVRKVLSMPQVNIVKKTEVQTGGFSKESILPKRNSDKLIARKKDWDPKKYGGFDSPTVAYSVLVVAKVEKGKSKKLKSVKELLGITIMERSSFEKNPIDFLEAKGYKEVKKDLIIKLPKYSLFELENGRKRMLASAGELQKGNELALPSKYVNFLYLASHYEKLKGSPEDNEQKQLFVEQHKHYLDEIIEQISEFSKRVILADANLDKVLSAYNKHRDKPIREQAENIIHLFTLTNLGAPAAFKYFDTTIDRKRYTSTKEVLDATLIHQSITGLYETRIDLSQLGGDGGGSSGGGGGTLGDQGSRGSDPLPEPRVTLTVEGIPTEFLVNTGAEHSVLTKPMGKMGSKRTVVAGATGSKVYPWTTKRLLKIGQKQVTHSFLVIPECPAPLLGRDLLTKLKAQIQFSTEGPQVTWEDRPAMCLVLNLEEEYRLHEKPVPPSIDPSWLQLFPMVWAEKAGMGLANQVPPVVVELKSDASPVAVRQYPMSKEAREGIRPHIQRFLDLGILVPCQSPWNTPLLPVKKPGTNDYRPVQDLREVNKRVQDIHPTVPNPYNLLSSLPPSHTWYSVLDLKDAFFCLKLHPNSQPLFAFEWRDPEKGNTGQLTWTRLPQGFKNSPTLFNEALHRDLASFRALNPQVVMLQYVDDLLVAAPTYRDCKEGTRRLLQELSKLGYRVSAKKAQLCREEVTYLGYLLKGGKRWLTPARKATVMKIPTPTTPRQVREFLGKAGFCRLFIPGFASLAAPLYPLTRPKVPFTWTEAHQEAFGRIKEALLSAPALALPDLTKPFALYVDEKEGVARGVLTQTLGPWRRPVAYLSKKLDPVASGWPTCLKAIAAVALLLKDADKLTLGQNVLVIAPHNLESIVRQPPDRWMTNARMTHYQSLLLNERVSFAPPAILNPATLLPVESDDTPIHICSEILAEETGTRPDLRDQPLPGVPAWYTDGSSFIMDGRRQAGAAIVDNKRTVWASNLPEGTSAQKAELIALTQALRLAEGKSINIYTDSRYAFATAHVHGAIYKQRGWLTSAGKDIKNKEEILALLEAIHLPKRVAIIHCPGHQRGTDPVATGNRKADEAAKQAAQSTRILTETTKNAGKRTADGSEFEKRTADGSEFESPKKKAKVE

SEQ ID NO: 6677 - protein, 2091 aa, synthetic construct
MPAAKRVKLDGGDKKYSIGLDIGTNSVGWAVITDEYKVPSKKFKVLGNTDRHSIKKNLIGALLFDSGETAEATRLKRTARRRYTRRKNRICYLQEIFSNEMAKVDDSFFHRLEESFLVEEDKKHERHPIFGNIVDEVAYHEKYPTIYHLRKKLVDSTDKADLRLIYLALAHMIKFRGHFLIEGDLNPDNSDVDKLFIQLVQTYNQLFEENPINASGVDAKAILSARLSKSRRLENLIAQLPGEKKNGLFGNLIALSLGLTPNFKSNFDLAEDAKLQLSKDTYDDDLDNLLAQIGDQYADLFLAAKNLSDAILLSDILRVNTEITKAPLSASMIKRYDEHHQDLTLLKALVRQQLPEKYKEIFFDQSKNGYAGYIDGGASQEEFYKFIKPILEKMDGTEELLVKLNREDLLRKQRTFDNGSIPHQIHLGELHAILRRQEDFYPFLKDNREKIEKILTFRIPYYVGPLARGNSRFAWMTRKSEETITPWNFEEVVDKGASAQSFIERMTNFDKNLPNEKVLPKHSLLYEYFTVYNELTKVKYVTEGMRKPAFLSGEQKKAIVDLLFKTNRKVTVKQLKEDYFKKIECFDSVEISGVEDRFNASLGTYHDLLKIIKDKDFLDNEENEDILEDIVLTLTLFEDREMIEERLKTYAHLFDDKVMKQLKRRRYTGWGRLSRKLINGIRDKQSGKTILDFLKSDGFANRNFMQLIHDDSLTFKEDIQKAQVSGQGDSLHEHIANLAGSPAIKKGILQTVKVVDELVKVMGRHKPENIVIEMARENQTTQKGQKNSRERMKRIEEGIKELGSQILKEHPVENTQLQNEKLYLYYLQNGRDMYVDQELDINRLSDYDVDHIVPQSFLKDDSIDNKVLTRSDKARGKSDNVPSEEVVKKMKNYWRQLLNAKLITQRKFDNLTKAERGGLSELDKAGFIKRQLVETRQITKHVAQILDSRMNTKYDENDKLIREVKVITLKSKLVSDFRKDFQFYKVREINNYHHAHDAYLNAVVGTALIKKYPKLESEFVYGDYKVYDVRKMIAKSEQEIGKATAKYFFYSNIMNFFKTEITLANGEIRKRPLIETNGETGEIVWDKGRDFATVRKVLSMPQVNIVKKTEVQTGGFSKESILPKRNSDKLIARKKDWDPKKYGGFDSPTVAYSVLVVAKVEKGKSKKLKSVKELLGITIMERSSFEKNPIDFLEAKGYKEVKKDLIIKLPKYSLFELENGRKRMLASAGELQKGNELALPSKYVNFLYLASHYEKLKGSPEDNEQKQLFVEQHKHYLDEIIEQISEFSKRVILADANLDKVLSAYNKHRDKPIREQAENIIHLFTLTNLGAPAAFKYFDTTIDRKRYTSTKEVLDATLIHQSITGLYETRIDLSQLGGDGGGSSGGGGGTLNLEDEYRLYETSAEPEVSPGSTWLSDFPQAWAETGGMGLAVRQAPLIIPLKATSTPVSIKQYPMSQEAKLGIKPHIQRLLDQGILVPCQSPWNTPLLPVKKPGTNDYRPVQDLREVNKRVEDIHPTVPNPYNLLSGLPPSHRWYTVLDLKDAFFCLRLHPTSQPLFAFEWRDPGMGISGQLTWTRLPQGFKNSPTLFNEALHRDLADFRIQHPDLILLQYVDDILLAATSELDCQQGTRALLLTLGNLGYRASAKKAQLCQKQVKYLGYLLKEGQRWLTEARKETVMGQPTPKTPRQLREFLGTAGFCRLWIPGFAEMAAPLYPLTKPGTLFNWGPDQQKAYQEIKQALLTAPALGLPDLTKPFELFVDEKQGYAKGVLTQKLGPWRRPVAYLSKKLDPVAAGWPPCLRMVAAIAVLRKDAGKLTMGQPLVILAPHAVEALVKQPPDRWLSNARMTHYQAMLLDTDRVQFGPVVALNPATLLPLPEEGAPHDCLEILAETHGTRPDLTDQPIPDADHTWYTDGSSFLQEGQRKAGAAVTTETEVIWARALPAGTSAQRAELIALTQALKMAEGKRLNVYTDSRYAFATAHIHGEIYRRRGWLTSEGREIKNKSEILALLKALFLPKRLSIIHCLGHQKGDSAEARGNRLADQAAREAAIKTPPDTSTLLAGKRTADGSEFEKRTADGSEFESPKKKAKVE

SEQ ID NO: 6678 - protein, 2091 aa, synthetic construct
MPAAKRVKLDGGDKKYSIGLDIGTNSVGWAVITDEYKVPSKKFKVLGNTDRHSIKKNLIGALLFDSGETAEATRLKRTARRRYTRRKNRICYLQEIFSNEMAKVDDSFFHRLEESFLVEEDKKHERHPIFGNIVDEVAYHEKYPTIYHLRKKLVDSTDKADLRLIYLALAHMIKFRGHFLIEGDLNPDNSDVDKLFIQLVQTYNQLFEENPINASGVDAKAILSARLSKSRRLENLIAQLPGEKKNGLFGNLIALSLGLTPNFKSNFDLAEDAKLQLSKDTYDDDLDNLLAQIGDQYADLFLAAKNLSDAILLSDILRVNTEITKAPLSASMIKRYDEHHQDLTLLKALVRQQLPEKYKEIFFDQSKNGYAGYIDGGASQEEFYKFIKPILEKMDGTEELLVKLNREDLLRKQRTFDNGSIPHQIHLGELHAILRRQEDFYPFLKDNREKIEKILTFRIPYYVGPLARGNSRFAWMTRKSEETITPWNFEEVVDKGASAQSFIERMTNFDKNLPNEKVLPKHSLLYEYFTVYNELTKVKYVTEGMRKPAFLSGEQKKAIVDLLFKTNRKVTVKQLKEDYFKKIECFDSVEISGVEDRFNASLGTYHDLLKIIKDKDFLDNEENEDILEDIVLTLTLFEDREMIEERLKTYAHLFDDKVMKQLKRRRYTGWGRLSRKLINGIRDKQSGKTILDFLKSDGFANRNFMQLIHDDSLTFKEDIQKAQVSGQGDSLHEHIANLAGSPAIKKGILQTVKVVDELVKVMGRHKPENIVIEMARENQTTQKGQKNSRERMKRIEEGIKELGSQILKEHPVENTQLQNEKLYLYYLQNGRDMYVDQELDINRLSDYDVDHIVPQSFLKDDSIDNKVLTRSDKARGKSDNVPSEEVVKKMKNYWRQLLNAKLITQRKFDNLTKAERGGLSELDKAGFIKRQLVETRQITKHVAQILDSRMNTKYDENDKLIREVKVITLKSKLVSDFRKDFQFYKVREINNYHHAHDAYLNAVVGTALIKKYPKLESEFVYGDYKVYDVRKMIAKSEQEIGKATAKYFFYSNIMNFFKTEITLANGEIRKRPLIETNGETGEIVWDKGRDFATVRKVLSMPQVNIVKKTEVQTGGFSKESILPKRNSDKLIARKKDWDPKKYGGFDSPTVAYSVLVVAKVEKGKSKKLKSVKELLGITIMERSSFEKNPIDFLEAKGYKEVKKDLIIKLPKYSLFELENGRKRMLASAGELQKGNELALPSKYVNFLYLASHYEKLKGSPEDNEQKQLFVEQHKHYLDEIIEQISEFSKRVILADANLDKVLSAYNKHRDKPIREQAENIIHLFTLTNLGAPAAFKYFDTTIDRKRYTSTKEVLDATLIHQSITGLYETRIDLSQLGGDGGGSSGGGGGTLGIEDEYRLHETSTEPDVSLGSTWLSDFPQAWAETGGMGLAVRQAPLIIPLKATSTPVSIQQYPMSHEARLGIKPHIQRLLDQGILVPCQSPWNTPLLPVKKPGTNDYRPVQDLREVNKRVEDIHPTVPNPYNLLSGLPPSHQWYTVLDLKDAFFCLRLHPTSQPLFAFEWRDPGMGISGQLTWTRLPQGFKNSPTLFDEALHRDLADFRIQHPDLILLQYVDDILLAATSELDCQQGTRALLQTLGDLGYRASAKKAQICQKQVKYLGYLLREGQRWLTEARKETVMGQPVPKTPRQLREFLGTAGFCRLWIPGFAEMAAPLYPLTKTGTLFSWGPDQQKAYQEIKQALLTAPALGLPDLTKPFELFVDEKQGYAKGVLTQKLGPWRRPVAYLSKKLDPVAAGWPPCLRMVAAIAVLTKDAGKLTMGQPLVILAPHAVEALVKQPPDRWLSNARMTHYQAMLLDTDRVQFGPVVALNPATLLPLPEEGAPHDCLEILAETHGTRPDLTDQPIPDADHTWYTDGSSFLQEGQRKAGAAVTTETEVIWAGALPAGTSAQRAELIALTQALKMAEGKRLNVYTDSRYAFATAHIHGEIYRRRGLLTSEGREIKNKSEILALLKALFLPKRLSIIHCLGHQKGDSAEARGNRLADQAAREAAIKTPPDTSTLLAGKRTADGSEFEKRTADGSEFESPKKKAKVE

SEQ ID NO: 6679 - protein, 2091 aa, synthetic construct
MPAAKRVKLDGGDKKYSIGLDIGTNSVGWAVITDEYKVPSKKFKVLGNTDRHSIKKNLIGALLFDSGETAEATRLKRTARRRYTRRKNRICYLQEIFSNEMAKVDDSFFHRLEESFLVEEDKKHERHPIFGNIVDEVAYHEKYPTIYHLRKKLVDSTDKADLRLIYLALAHMIKFRGHFLIEGDLNPDNSDVDKLFIQLVQTYNQLFEENPINASGVDAKAILSARLSKSRRLENLIAQLPGEKKNGLFGNLIALSLGLTPNFKSNFDLAEDAKLQLSKDTYDDDLDNLLAQIGDQYADLFLAAKNLSDAILLSDILRVNTEITKAPLSASMIKRYDEHHQDLTLLKALVRQQLPEKYKEIFFDQSKNGYAGYIDGGASQEEFYKFIKPILEKMDGTEELLVKLNREDLLRKQRTFDNGSIPHQIHLGELHAILRRQEDFYPFLKDNREKIEKILTFRIPYYVGPLARGNSRFAWMTRKSEETITPWNFEEVVDKGASAQSFIERMTNFDKNLPNEKVLPKHSLLYEYFTVYNELTKVKYVTEGMRKPAFLSGEQKKAIVDLLFKTNRKVTVKQLKEDYFKKIECFDSVEISGVEDRFNASLGTYHDLLKIIKDKDFLDNEENEDILEDIVLTLTLFEDREMIEERLKTYAHLFDDKVMKQLKRRRYTGWGRLSRKLINGIRDKQSGKTILDFLKSDGFANRNFMQLIHDDSLTFKEDIQKAQVSGQGDSLHEHIANLAGSPAIKKGILQTVKVVDELVKVMGRHKPENIVIEMARENQTTQKGQKNSRERMKRIEEGIKELGSQILKEHPVENTQLQNEKLYLYYLQNGRDMYVDQELDINRLSDYDVDHIVPQSFLKDDSIDNKVLTRSDKARGKSDNVPSEEVVKKMKNYWRQLLNAKLITQRKFDNLTKAERGGLSELDKAGFIKRQLVETRQITKHVAQILDSRMNTKYDENDKLIREVKVITLKSKLVSDFRKDFQFYKVREINNYHHAHDAYLNAVVGTALIKKYPKLESEFVYGDYKVYDVRKMIAKSEQEIGKATAKYFFYSNIMNFFKTEITLANGEIRKRPLIETNGETGEIVWDKGRDFATVRKVLSMPQVNIVKKTEVQTGGFSKESILPKRNSDKLIARKKDWDPKKYGGFDSPTVAYSVLVVAKVEKGKSKKLKSVKELLGITIMERSSFEKNPIDFLEAKGYKEVKKDLIIKLPKYSLFELENGRKRMLASAGELQKGNELALPSKYVNFLYLASHYEKLKGSPEDNEQKQLFVEQHKHYLDEIIEQISEFSKRVILADANLDKVLSAYNKHRDKPIREQAENIIHLFTLTNLGAPAAFKYFDTTIDRKRYTSTKEVLDATLIHQSITGLYETRIDLSQLGGDGGGSSGGGGGTLNIEDEYRLHETSKGPDVPLGSTWLSDFPQAWAETGGMGLAVRQAPLIIPLKATSTPVSIKQYPMSQEARLGIKPHIQRLLDQGILVPCQSPWNTPLLPVKKPGTNDYRPVQDLREVNKRVEDIHPTVPNPYNLLSGLPPSHQWYTVLDLKDAFFCLRLHPTSQSLFAFEWRDPEMGISGQLTWTRLPQGFKNSPTLFNEALHRDLADFRIQHPDLILLQYVDDLLLAATSELDCQQGTRALLQTLGDLGYRASAKKAQICQKQVKYLGYLLKEGQRWLTEARKETVMGQPTPKTPRQLREFLGTAGFCRLWIPGFAEMAAPLYPLTKPGTLFEWGPDQQKAYQEIKQALLTAPALGLPDLTKPFELFVDEKQGYAKGVLTQKLGPWRRPVAYLSKKLDPVAAGWPPCLRMVAAIAVLTKDAGKLTMGQPLVILAPHAVEALVKQPPDRWLSNARMTHYQALLLDTDRVQFGPIVALNPATLLPLPEEGLQHDCLDILAEAHGTRPDLTDQPLPDADHTWYTDGSSFLQEGQRKAGAAVTTETEVVWAKALPAGTSAQRAELIALTQALKMAEGKKLNVYTDSRYAFATAHIHGEIYRRRGWLTSEGKEIKNKDEILALLKALFLPKRLSIIHCPGHQKGNRAEARGNRMADQAAREVATRETPETSTLLAGKRTADGSEFEKRTADGSEFESPKKKAKVE

SEQ ID NO: 6680 - protein, 2085 aa, synthetic construct
MPAAKRVKLDGGDKKYSIGLDIGTNSVGWAVITDEYKVPSKKFKVLGNTDRHSIKKNLIGALLFDSGETAEATRLKRTARRRYTRRKNRICYLQEIFSNEMAKVDDSFFHRLEESFLVEEDKKHERHPIFGNIVDEVAYHEKYPTIYHLRKKLVDSTDKADLRLIYLALAHMIKFRGHFLIEGDLNPDNSDVDKLFIQLVQTYNQLFEENPINASGVDAKAILSARLSKSRRLENLIAQLPGEKKNGLFGNLIALSLGLTPNFKSNFDLAEDAKLQLSKDTYDDDLDNLLAQIGDQYADLFLAAKNLSDAILLSDILRVNTEITKAPLSASMIKRYDEHHQDLTLLKALVRQQLPEKYKEIFFDQSKNGYAGYIDGGASQEEFYKFIKPILEKMDGTEELLVKLNREDLLRKQRTFDNGSIPHQIHLGELHAILRRQEDFYPFLKDNREKIEKILTFRIPYYVGPLARGNSRFAWMTRKSEETITPWNFEEVVDKGASAQSFIERMTNFDKNLPNEKVLPKHSLLYEYFTVYNELTKVKYVTEGMRKPAFLSGEQKKAIVDLLFKTNRKVTVKQLKEDYFKKIECFDSVEISGVEDRFNASLGTYHDLLKIIKDKDFLDNEENEDILEDIVLTLTLFEDREMIEERLKTYAHLFDDKVMKQLKRRRYTGWGRLSRKLINGIRDKQSGKTILDFLKSDGFANRNFMQLIHDDSLTFKEDIQKAQVSGQGDSLHEHIANLAGSPAIKKGILQTVKVVDELVKVMGRHKPENIVIEMARENQTTQKGQKNSRERMKRIEEGIKELGSQILKEHPVENTQLQNEKLYLYYLQNGRDMYVDQELDINRLSDYDVDHIVPQSFLKDDSIDNKVLTRSDKARGKSDNVPSEEVVKKMKNYWRQLLNAKLITQRKFDNLTKAERGGLSELDKAGFIKRQLVETRQITKHVAQILDSRMNTKYDENDKLIREVKVITLKSKLVSDFRKDFQFYKVREINNYHHAHDAYLNAVVGTALIKKYPKLESEFVYGDYKVYDVRKMIAKSEQEIGKATAKYFFYSNIMNFFKTEITLANGEIRKRPLIETNGETGEIVWDKGRDFATVRKVLSMPQVNIVKKTEVQTGGFSKESILPKRNSDKLIARKKDWDPKKYGGFDSPTVAYSVLVVAKVEKGKSKKLKSVKELLGITIMERSSFEKNPIDFLEAKGYKEVKKDLIIKLPKYSLFELENGRKRMLASAGELQKGNELALPSKYVNFLYLASHYEKLKGSPEDNEQKQLFVEQHKHYLDEIIEQISEFSKRVILADANLDKVLSAYNKHRDKPIREQAENIIHLFTLTNLGAPAAFKYFDTTIDRKRYTSTKEVLDATLIHQSITGLYETRIDLSQLGGDGGGSSGGGGGTLQLDDEYRLYSPLVKPDQNIQFWLEQFPQAWAETAGMGLAKQVPPQVIQLKASATPVSVRQYPLSKEAQEGIRPHVQRLIQQGILVPVQSPWNTPLLPVRKPGTNDYRPVQDLREVNKRVQDIHPTVPNPYNLLCALPPQRSWYTVLDLKDAFFCLRLHPTSQPLFAFEWRDPGTGRTGQLTWTRLPQGFKNSPTIFDEALHRDLANFRIQHPQVTLLQYVDDLLLAGATKQDCLEGTKALLLELSDLGYRASAKKAQICRREVTYLGYSLRDGQRWLTEARKKTVVQIPAPTTAKQVREFLGTAGFCRLWIPGFATLAAPLYPLTKEKGEFSWAPEHQKAFDAIKKALLSAPALALPDVTKPFTLYVDERKGVARGVLTQTLGPWRRPVAYLSKKLDPVASGWPVCLKAIAAVAILVKDADKLTLGQNITVIAPHALENIVRQPPDRWMTNARMTHYQSLLLTERVTFAPPAALNPATLLPEETDEPVTHDCHQLLIEETGVRKDLTDIPLTGEVLTWFTDGSSYVVEGKRMAGAAVVDGTRTIWASSLPEGTSAQKAELMALTQALRLAEGKSINIYTDSRYAFATAHVHGAIYKQRGLLTSAGREIKNKEEILSLLEALHLPKRLAIIHCPGHQKAKDPISRGNQMADRVAKQAAQGVNLLAGKRTADGSEFEKRTADGSEFESPKKKAKVE

SEQ ID NO: 6681 - protein, 2171 aa, synthetic construct
MPAAKRVKLDGGDKKYSIGLDIGTNSVGWAVITDEYKVPSKKFKVLGNTDRHSIKKNLIGALLFDSGETAEATRLKRTARRRYTRRKNRICYLQEIFSNEMAKVDDSFFHRLEESFLVEEDKKHERHPIFGNIVDEVAYHEKYPTIYHLRKKLVDSTDKADLRLIYLALAHMIKFRGHFLIEGDLNPDNSDVDKLFIQLVQTYNQLFEENPINASGVDAKAILSARLSKSRRLENLIAQLPGEKKNGLFGNLIALSLGLTPNFKSNFDLAEDAKLQLSKDTYDDDLDNLLAQIGDQYADLFLAAKNLSDAILLSDILRVNTEITKAPLSASMIKRYDEHHQDLTLLKALVRQQLPEKYKEIFFDQSKNGYAGYIDGGASQEEFYKFIKPILEKMDGTEELLVKLNREDLLRKQRTFDNGSIPHQIHLGELHAILRRQEDFYPFLKDNREKIEKILTFRIPYYVGPLARGNSRFAWMTRKSEETITPWNFEEVVDKGASAQSFIERMTNFDKNLPNEKVLPKHSLLYEYFTVYNELTKVKYVTEGMRKPAFLSGEQKKAIVDLLFKTNRKVTVKQLKEDYFKKIECFDSVEISGVEDRFNASLGTYHDLLKIIKDKDFLDNEENEDILEDIVLTLTLFEDREMIEERLKTYAHLFDDKVMKQLKRRRYTGWGRLSRKLINGIRDKQSGKTILDFLKSDGFANRNFMQLIHDDSLTFKEDIQKAQVSGQGDSLHEHIANLAGSPAIKKGILQTVKVVDELVKVMGRHKPENIVIEMARENQTTQKGQKNSRERMKRIEEGIKELGSQILKEHPVENTQLQNEKLYLYYLQNGRDMYVDQELDINRLSDYDVDHIVPQSFLKDDSIDNKVLTRSDKARGKSDNVPSEEVVKKMKNYWRQLLNAKLITQRKFDNLTKAERGGLSELDKAGFIKRQLVETRQITKHVAQILDSRMNTKYDENDKLIREVKVITLKSKLVSDFRKDFQFYKVREINNYHHAHDAYLNAVVGTALIKKYPKLESEFVYGDYKVYDVRKMIAKSEQEIGKATAKYFFYSNIMNFFKTEITLANGEIRKRPLIETNGETGEIVWDKGRDFATVRKVLSMPQVNIVKKTEVQTGGFSKESILPKRNSDKLIARKKDWDPKKYGGFDSPTVAYSVLVVAKVEKGKSKKLKSVKELLGITIMERSSFEKNPIDFLEAKGYKEVKKDLIIKLPKYSLFELENGRKRMLASAGELQKGNELALPSKYVNFLYLASHYEKLKGSPEDNEQKQLFVEQHKHYLDEIIEQISEFSKRVILADANLDKVLSAYNKHRDKPIREQAENIIHLFTLTNLGAPAAFKYFDTTIDRKRYTSTKEVLDATLIHQSITGLYETRIDLSQLGGDGGGSSGGGGGMDPLQLLQPLEAEIKGTKLKAHWNSGATITCVPQAFLEEEVPIKNIWIKTIHGEKEQPVYYLTFKIQGRKVEAEVISSPYDYILVSPSDIPWLMKKPLQLTTLVPLQEYEERLLKQTMLTGSYKEKLQSLFLKYDALWQHWENQVGHRRIKPHHIATGTVNPRPQKQYPINPKAKASIQTVINDLLKQGVLIQQNSIMNTPVYPVPKPDGKWRMVLDYREVNKTIPLIAAQNQHSAGILSSIFRGKYKTTLDLSNGFWAHSITPESYWLTAFTWLGQQYCWTRLPQGFLNSPALFNADVVDLLKEVPNVQVYVDDIYISHDDPREHLEQLEKVFSLLLNAGYVVSLKKSEIAQHEVEFLGFNITKEGRGLTETFKQKLLNITPPRDLKQLQSILGKLNFARNFIPNFSELVKPLYNIIATAPGKYITWTTDNSQQLQNIISMLNSAENLEERNPEVRLIMKVNTSPSAGYIRFYNEFAKRPIMYLNYVYTKAEVKFTNTEKLLTTIHKGLIKALDLGMGQEILVYSPIVSMTKIQKTPLPERKALPIRWITWMSYLEDPRIQFHYDKTLPELQQVPTVTDDIIAKIKHPSEFSMVFYTDGSAIKHPNVNKSHNAGMGIAQVQFKPEFTVINTWSIPLGDHTAQLAEVAAVEFACKKALKIDGPVLIVTDSFYVAESVNKELPYWQSNGFFNNKKKPLKHVSKWKSIADCIQLKPDIIIIHEKGHQPTASTFHTEGNNLADKLATQGSYVVNAGKRTADGSEFEKRTADGSEFESPKKKAKVE

SEQ ID NO: 6682 - protein, 2089 aa, synthetic construct
MPAAKRVKLDGGDKKYSIGLDIGTNSVGWAVITDEYKVPSKKFKVLGNTDRHSIKKNLIGALLFDSGETAEATRLKRTARRRYTRRKNRICYLQEIFSNEMAKVDDSFFHRLEESFLVEEDKKHERHPIFGNIVDEVAYHEKYPTIYHLRKKLVDSTDKADLRLIYLALAHMIKFRGHFLIEGDLNPDNSDVDKLFIQLVQTYNQLFEENPINASGVDAKAILSARLSKSRRLENLIAQLPGEKKNGLFGNLIALSLGLTPNFKSNFDLAEDAKLQLSKDTYDDDLDNLLAQIGDQYADLFLAAKNLSDAILLSDILRVNTEITKAPLSASMIKRYDEHHQDLTLLKALVRQQLPEKYKEIFFDQSKNGYAGYIDGGASQEEFYKFIKPILEKMDGTEELLVKLNREDLLRKQRTFDNGSIPHQIHLGELHAILRRQEDFYPFLKDNREKIEKILTFRIPYYVGPLARGNSRFAWMTRKSEETITPWNFEEVVDKGASAQSFIERMTNFDKNLPNEKVLPKHSLLYEYFTVYNELTKVKYVTEGMRKPAFLSGEQKKAIVDLLFKTNRKVTVKQLKEDYFKKIECFDSVEISGVEDRFNASLGTYHDLLKIIKDKDFLDNEENEDILEDIVLTLTLFEDREMIEERLKTYAHLFDDKVMKQLKRRRYTGWGRLSRKLINGIRDKQSGKTILDFLKSDGFANRNFMQLIHDDSLTFKEDIQKAQVSGQGDSLHEHIANLAGSPAIKKGILQTVKVVDELVKVMGRHKPENIVIEMARENQTTQKGQKNSRERMKRIEEGIKELGSQILKEHPVENTQLQNEKLYLYYLQNGRDMYVDQELDINRLSDYDVDHIVPQSFLKDDSIDNKVLTRSDKARGKSDNVPSEEVVKKMKNYWRQLLNAKLITQRKFDNLTKAERGGLSELDKAGFIKRQLVETRQITKHVAQILDSRMNTKYDENDKLIREVKVITLKSKLVSDFRKDFQFYKVREINNYHHAHDAYLNAVVGTALIKKYPKLESEFVYGDYKVYDVRKMIAKSEQEIGKATAKYFFYSNIMNFFKTEITLANGEIRKRPLIETNGETGEIVWDKGRDFATVRKVLSMPQVNIVKKTEVQTGGFSKESILPKRNSDKLIARKKDWDPKKYGGFDSPTVAYSVLVVAKVEKGKSKKLKSVKELLGITIMERSSFEKNPIDFLEAKGYKEVKKDLIIKLPKYSLFELENGRKRMLASAGELQKGNELALPSKYVNFLYLASHYEKLKGSPEDNEQKQLFVEQHKHYLDEIIEQISEFSKRVILADANLDKVLSAYNKHRDKPIREQAENIIHLFTLTNLGAPAAFKYFDTTIDRKRYTSTKEVLDATLIHQSITGLYETRIDLSQLGGDGGGSSGGGGGVLNLEEEYRLHEKPVPSSIDPSWLQLFPTVWAERAGMGLANQVPPVVVELRSGASPVAVRQYPMSKEAREGIRPHIQRFLDLGVLVPCQSPWNTPLLPVKKPGTNDYRPVQDLREINKRVQDIHPTVPNPYNLLSSLPPSHTWYSVLDLKDAFFCLKLHPNSQPLFAFEWRDPEKGNTGQLTWTRLPQGFKNSPTLFDEALHRDLAPFRALNPQVVLLQYVDDLLVAAPTYRDCKEGTQKLLQELSKLGYRVSAKKAQLCQKEVTYLGYLLKEGKRWLTPARKATVMKIPPPTTPRQVREFLGTAGFCRLWIPGFASLAAPLYPLTKESIPFIWTEEHQKAFDRIKEALLSAPALALPDLTKPFTLYVDERAGVARGVLTQTLGPWRRPVAYLSKKLDPVASGWPTCLKAVAAVALLLKDADKLTLGQNVTVIASHSLESIVRQPPDRWMTNARMTHYQSLLLNERVSFAPPAVLNPATLLPVESEATPVHRCSEILAEETGTRRDLKDQPLPGVPAWYTDGSSFIAEGKRRAGAAIVDGKRTVWASSLPEGTSAQKAELVALTQALRLAEGKDINIYTDSRYAFATAHIHGAIYKQRGLLTSAGKDIKNKEEILALLEAIHLPKRVAIIHCPGHQKGNDPVATGNRRADEAAKQAALSTRVLAETTKPAGKRTADGSEFEKRTADGSEFESPKKKAKVE

SEQ ID NO: 6683 - protein, 2095 aa, synthetic construct
MPAAKRVKLDGGDKKYSIGLDIGTNSVGWAVITDEYKVPSKKFKVLGNTDRHSIKKNLIGALLFDSGETAEATRLKRTARRRYTRRKNRICYLQEIFSNEMAKVDDSFFHRLEESFLVEEDKKHERHPIFGNIVDEVAYHEKYPTIYHLRKKLVDSTDKADLRLIYLALAHMIKFRGHFLIEGDLNPDNSDVDKLFIQLVQTYNQLFEENPINASGVDAKAILSARLSKSRRLENLIAQLPGEKKNGLFGNLIALSLGLTPNFKSNFDLAEDAKLQLSKDTYDDDLDNLLAQIGDQYADLFLAAKNLSDAILLSDILRVNTEITKAPLSASMIKRYDEHHQDLTLLKALVRQQLPEKYKEIFFDQSKNGYAGYIDGGASQEEFYKFIKPILEKMDGTEELLVKLNREDLLRKQRTFDNGSIPHQIHLGELHAILRRQEDFYPFLKDNREKIEKILTFRIPYYVGPLARGNSRFAWMTRKSEETITPWNFEEVVDKGASAQSFIERMTNFDKNLPNEKVLPKHSLLYEYFTVYNELTKVKYVTEGMRKPAFLSGEQKKAIVDLLFKTNRKVTVKQLKEDYFKKIECFDSVEISGVEDRFNASLGTYHDLLKIIKDKDFLDNEENEDILEDIVLTLTLFEDREMIEERLKTYAHLFDDKVMKQLKRRRYTGWGRLSRKLINGIRDKQSGKTILDFLKSDGFANRNFMQLIHDDSLTFKEDIQKAQVSGQGDSLHEHIANLAGSPAIKKGILQTVKVVDELVKVMGRHKPENIVIEMARENQTTQKGQKNSRERMKRIEEGIKELGSQILKEHPVENTQLQNEKLYLYYLQNGRDMYVDQELDINRLSDYDVDHIVPQSFLKDDSIDNKVLTRSDKARGKSDNVPSEEVVKKMKNYWRQLLNAKLITQRKFDNLTKAERGGLSELDKAGFIKRQLVETRQITKHVAQILDSRMNTKYDENDKLIREVKVITLKSKLVSDFRKDFQFYKVREINNYHHAHDAYLNAVVGTALIKKYPKLESEFVYGDYKVYDVRKMIAKSEQEIGKATAKYFFYSNIMNFFKTEITLANGEIRKRPLIETNGETGEIVWDKGRDFATVRKVLSMPQVNIVKKTEVQTGGFSKESILPKRNSDKLIARKKDWDPKKYGGFDSPTVAYSVLVVAKVEKGKSKKLKSVKELLGITIMERSSFEKNPIDFLEAKGYKEVKKDLIIKLPKYSLFELENGRKRMLASAGELQKGNELALPSKYVNFLYLASHYEKLKGSPEDNEQKQLFVEQHKHYLDEIIEQISEFSKRVILADANLDKVLSAYNKHRDKPIREQAENIIHLFTLTNLGAPAAFKYFDTTIDRKRYTSTKEVLDATLIHQSITGLYETRIDLSQLGGDGGGGGEAAAKGGTAPLEEEYRLFLEAPIQNVTLLEQWKREIPKVWAEINPPGLASTQAPIHVQLLSTALPVRVRQYPITLEAKRSLRETIRKFRAAGILRPVHSPWNTPLLPVRKSGTSEYRMVQDLREVNKRVETIHPTVPNPYTLLSLLPPDRIWYSVLDLKDAFFCIPLAPESQLIFAFEWADAEEGESGQLTWTRLPQGFKNSPTLFNEALNRDLQGFRLDHPSVSLLQYVDDLLIAADTQAACLSATRDLLMTLAELGYRVSGKKAQLCQEEVTYLGFKIHKGSRSLSNSRTQAILQIPVPKTKRQVREFLGTIGYCRLWIPGFAELAQPLYAATRPGNDPLVWGEKEEEAFQSLKLALTQPPALALPSLDKPFQLFVEETSGAAKGVLTQALGPWKRPVAYLSKRLDPVAAGWPRCLRAIAAAALLTREASKLTFGQDIEITSSHNLESLLRSPPDKWLTNARITQYQVLLLDPPRVRFKQTAALNPATLLPETDDTLPIHHCLDTLDSLTSTRPDLTDQPLAQAEATLFTDGSSYIRDGKRYAGAAVVTLDSVIWAEPLPIGTSAQKAELIALTKALEWSKDKSVNIYTDSRYAFATLHVHGMIYRERGWLTAGGKAIKNAPEILALLTAVWLPKRVAVMHCKGHQKDDAPTSTGNRRADEVAREVAIRPLSTQATISAGKRTADGSEFEKRTADGSEFESPKKKAKVE

SEQ ID NO: 6684 - protein, 2099 aa, synthetic construct
MPAAKRVKLDGGDKKYSIGLDIGTNSVGWAVITDEYKVPSKKFKVLGNTDRHSIKKNLIGALLFDSGETAEATRLKRTARRRYTRRKNRICYLQEIFSNEMAKVDDSFFHRLEESFLVEEDKKHERHPIFGNIVDEVAYHEKYPTIYHLRKKLVDSTDKADLRLIYLALAHMIKFRGHFLIEGDLNPDNSDVDKLFIQLVQTYNQLFEENPINASGVDAKAILSARLSKSRRLENLIAQLPGEKKNGLFGNLIALSLGLTPNFKSNFDLAEDAKLQLSKDTYDDDLDNLLAQIGDQYADLFLAAKNLSDAILLSDILRVNTEITKAPLSASMIKRYDEHHQDLTLLKALVRQQLPEKYKEIFFDQSKNGYAGYIDGGASQEEFYKFIKPILEKMDGTEELLVKLNREDLLRKQRTFDNGSIPHQIHLGELHAILRRQEDFYPFLKDNREKIEKILTFRIPYYVGPLARGNSRFAWMTRKSEETITPWNFEEVVDKGASAQSFIERMTNFDKNLPNEKVLPKHSLLYEYFTVYNELTKVKYVTEGMRKPAFLSGEQKKAIVDLLFKTNRKVTVKQLKEDYFKKIECFDSVEISGVEDRFNASLGTYHDLLKIIKDKDFLDNEENEDILEDIVLTLTLFEDREMIEERLKTYAHLFDDKVMKQLKRRRYTGWGRLSRKLINGIRDKQSGKTILDFLKSDGFANRNFMQLIHDDSLTFKEDIQKAQVSGQGDSLHEHIANLAGSPAIKKGILQTVKVVDELVKVMGRHKPENIVIEMARENQTTQKGQKNSRERMKRIEEGIKELGSQILKEHPVENTQLQNEKLYLYYLQNGRDMYVDQELDINRLSDYDVDHIVPQSFLKDDSIDNKVLTRSDKARGKSDNVPSEEVVKKMKNYWRQLLNAKLITQRKFDNLTKAERGGLSELDKAGFIKRQLVETRQITKHVAQILDSRMNTKYDENDKLIREVKVITLKSKLVSDFRKDFQFYKVREINNYHHAHDAYLNAVVGTALIKKYPKLESEFVYGDYKVYDVRKMIAKSEQEIGKATAKYFFYSNIMNFFKTEITLANGEIRKRPLIETNGETGEIVWDKGRDFATVRKVLSMPQVNIVKKTEVQTGGFSKESILPKRNSDKLIARKKDWDPKKYGGFDSPTVAYSVLVVAKVEKGKSKKLKSVKELLGITIMERSSFEKNPIDFLEAKGYKEVKKDLIIKLPKYSLFELENGRKRMLASAGELQKGNELALPSKYVNFLYLASHYEKLKGSPEDNEQKQLFVEQHKHYLDEIIEQISEFSKRVILADANLDKVLSAYNKHRDKPIREQAENIIHLFTLTNLGAPAAFKYFDTTIDRKRYTSTKEVLDATLIHQSITGLYETRIDLSQLGGDGGGGGEAAAKGGTVSLQDEHRLFDIPVTTSLPDVWLQDFPQAWAETGGLGRAKCQAPIIIDLKPTAVPVSIKQYPMSLEAHMGIRQHIIKFLELGVLRPCRSPWNTPLLPVKKPGTQDYRPVQDLREINKRTVDIHPTVPNPYNLLSTLKPDYSWYTVLDLKDAFFCLPLAPQSQELFAFEWKDPERGISGQLTWTRLPQGFKNSPTLFDEALHRDLTDFRTQHPEVTLLQYVDDLLLAAPTKKACTQGTRHLLQELGEKGYRASAKKAQICQTKVTYLGYILSEGKRWLTPGRIETVARIPPPRNPREVREFLGTAGFCRLWIPGFAELAAPLYALTKESTPFTWQTEHQLAFEALKKALLSAPALGLPDTSKPFTLFLDERQGIAKGVLTQKLGPWKRPVAYLSKKLDPVAAGWPPCLRIMAATAMLVKDSAKLTLGQPLTVITPHTLEAIVRQPPDRWITNARLTHYQALLLDTDRVQFGPPVTLNPATLLPVPENQPSPHDCRQVLAETHGTREDLKDQELPDADHTWYTDGSSYLDSGTRRAGAAVVDGHNTIWAQSLPPGTSAQKAELIALTKALELSKGKKANIYTDSRYAFATAHTHGSIYERRGLLTSEGKEIKNKAEIIALLKALFLPQEVAIIHCPGHQKGQDPVAVGNRQADRVARQAAMAEVLTLATEPDNTSHITAGKRTADGSEFEKRTADGSEFESPKKKAKVE

SEQ ID NO: 6685 - protein, 2092 aa, synthetic construct
MPAAKRVKLDGGDKKYSIGLDIGTNSVGWAVITDEYKVPSKKFKVLGNTDRHSIKKNLIGALLFDSGETAEATRLKRTARRRYTRRKNRICYLQEIFSNEMAKVDDSFFHRLEESFLVEEDKKHERHPIFGNIVDEVAYHEKYPTIYHLRKKLVDSTDKADLRLIYLALAHMIKFRGHFLIEGDLNPDNSDVDKLFIQLVQTYNQLFEENPINASGVDAKAILSARLSKSRRLENLIAQLPGEKKNGLFGNLIALSLGLTPNFKSNFDLAEDAKLQLSKDTYDDDLDNLLAQIGDQYADLFLAAKNLSDAILLSDILRVNTEITKAPLSASMIKRYDEHHQDLTLLKALVRQQLPEKYKEIFFDQSKNGYAGYIDGGASQEEFYKFIKPILEKMDGTEELLVKLNREDLLRKQRTFDNGSIPHQIHLGELHAILRRQEDFYPFLKDNREKIEKILTFRIPYYVGPLARGNSRFAWMTRKSEETITPWNFEEVVDKGASAQSFIERMTNFDKNLPNEKVLPKHSLLYEYFTVYNELTKVKYVTEGMRKPAFLSGEQKKAIVDLLFKTNRKVTVKQLKEDYFKKIECFDSVEISGVEDRFNASLGTYHDLLKIIKDKDFLDNEENEDILEDIVLTLTLFEDREMIEERLKTYAHLFDDKVMKQLKRRRYTGWGRLSRKLINGIRDKQSGKTILDFLKSDGFANRNFMQLIHDDSLTFKEDIQKAQVSGQGDSLHEHIANLAGSPAIKKGILQTVKVVDELVKVMGRHKPENIVIEMARENQTTQKGQKNSRERMKRIEEGIKELGSQILKEHPVENTQLQNEKLYLYYLQNGRDMYVDQELDINRLSDYDVDHIVPQSFLKDDSIDNKVLTRSDKARGKSDNVPSEEVVKKMKNYWRQLLNAKLITQRKFDNLTKAERGGLSELDKAGFIKRQLVETRQITKHVAQILDSRMNTKYDENDKLIREVKVITLKSKLVSDFRKDFQFYKVREINNYHHAHDAYLNAVVGTALIKKYPKLESEFVYGDYKVYDVRKMIAKSEQEIGKATAKYFFYSNIMNFFKTEITLANGEIRKRPLIETNGETGEIVWDKGRDFATVRKVLSMPQVNIVKKTEVQTGGFSKESILPKRNSDKLIARKKDWDPKKYGGFDSPTVAYSVLVVAKVEKGKSKKLKSVKELLGITIMERSSFEKNPIDFLEAKGYKEVKKDLIIKLPKYSLFELENGRKRMLASAGELQKGNELALPSKYVNFLYLASHYEKLKGSPEDNEQKQLFVEQHKHYLDEIIEQISEFSKRVILADANLDKVLSAYNKHRDKPIREQAENIIHLFTLTNLGAPAAFKYFDTTIDRKRYTSTKEVLDATLIHQSITGLYETRIDLSQLGGDGGGGGEAAAKGGTLQLEEEYRLFEPESTQKQEMDIWLKNFPQAWAETGGMGTAHCQAPVLIQLKATATPISIRQYPMPHEAYQGIKPHIRRMLDQGILKPCQSPWNTPLLPVKKPGTEDYRPVQDLREVNKRVEDIHPTVPNPYNLLSTLPPSHPWYTVLDLKDAFFCLRLHSESQLLFAFEWRDPEIGLSGQLTWTRLPQGFKNSPTLFNEALHSDLADFRVRYPALVLLQYVDDLLLAAATRTECLEGTKALLETLGNKGYRASAKKAQICLQEVTYLGYSLKDGQRWLTKARKEAILSIPVPKNSRQVREFLGTAGYCRLWIPGFAELAAPLYPLTRPGTLFQWGTEQQLAFEDIKKALLSSPALGLPDITKPFELFIDENSGFAKGVLVQKLGPWKRPVAYLSKKLDTVASGWPPCLRMVAAIAILVKDAGKLTLGQPLTILTSHPVEALVRQPPNKWLSNARMTHYQAMLLDAERVHFGPTVSLNPATLLPLPSGGNHHDCLQILAETHGTRPDLTDQPLPDADLTWYTDGSSFIRNGEREAGAAVTTESEVIWAAPLPPGTSAQRAELIALTQALKMAEGKKLTVYTDSRYAFATTHVHGEIYRRRGWLTSEGKEIKNKNEILALLEALFLPKRLSIIHCPGHQKGDSPQAKGNRLADDTAKKAATETHSSLTVLPAGKRTADGSEFEKRTADGSEFESPKKKAKVE

SEQ ID NO: 6686 - protein, 2124 aa, synthetic construct
MPAAKRVKLDGGDKKYSIGLDIGTNSVGWAVITDEYKVPSKKFKVLGNTDRHSIKKNLIGALLFDSGETAEATRLKRTARRRYTRRKNRICYLQEIFSNEMAKVDDSFFHRLEESFLVEEDKKHERHPIFGNIVDEVAYHEKYPTIYHLRKKLVDSTDKADLRLIYLALAHMIKFRGHFLIEGDLNPDNSDVDKLFIQLVQTYNQLFEENPINASGVDAKAILSARLSKSRRLENLIAQLPGEKKNGLFGNLIALSLGLTPNFKSNFDLAEDAKLQLSKDTYDDDLDNLLAQIGDQYADLFLAAKNLSDAILLSDILRVNTEITKAPLSASMIKRYDEHHQDLTLLKALVRQQLPEKYKEIFFDQSKNGYAGYIDGGASQEEFYKFIKPILEKMDGTEELLVKLNREDLLRKQRTFDNGSIPHQIHLGELHAILRRQEDFYPFLKDNREKIEKILTFRIPYYVGPLARGNSRFAWMTRKSEETITPWNFEEVVDKGASAQSFIERMTNFDKNLPNEKVLPKHSLLYEYFTVYNELTKVKYVTEGMRKPAFLSGEQKKAIVDLLFKTNRKVTVKQLKEDYFKKIECFDSVEISGVEDRFNASLGTYHDLLKIIKDKDFLDNEENEDILEDIVLTLTLFEDREMIEERLKTYAHLFDDKVMKQLKRRRYTGWGRLSRKLINGIRDKQSGKTILDFLKSDGFANRNFMQLIHDDSLTFKEDIQKAQVSGQGDSLHEHIANLAGSPAIKKGILQTVKVVDELVKVMGRHKPENIVIEMARENQTTQKGQKNSRERMKRIEEGIKELGSQILKEHPVENTQLQNEKLYLYYLQNGRDMYVDQELDINRLSDYDVDHIVPQSFLKDDSIDNKVLTRSDKARGKSDNVPSEEVVKKMKNYWRQLLNAKLITQRKFDNLTKAERGGLSELDKAGFIKRQLVETRQITKHVAQILDSRMNTKYDENDKLIREVKVITLKSKLVSDFRKDFQFYKVREINNYHHAHDAYLNAVVGTALIKKYPKLESEFVYGDYKVYDVRKMIAKSEQEIGKATAKYFFYSNIMNFFKTEITLANGEIRKRPLIETNGETGEIVWDKGRDFATVRKVLSMPQVNIVKKTEVQTGGFSKESILPKRNSDKLIARKKDWDPKKYGGFDSPTVAYSVLVVAKVEKGKSKKLKSVKELLGITIMERSSFEKNPIDFLEAKGYKEVKKDLIIKLPKYSLFELENGRKRMLASAGELQKGNELALPSKYVNFLYLASHYEKLKGSPEDNEQKQLFVEQHKHYLDEIIEQISEFSKRVILADANLDKVLSAYNKHRDKPIREQAENIIHLFTLTNLGAPAAFKYFDTTIDRKRYTSTKEVLDATLIHQSITGLYETRIDLSQLGGDGGGGGEAAAKGGLLGRDLLTKLKAQIQFSTEGPQVTWEDRPAMCLVLNLEEEYRLHEKPVPPSIDPSWLQLFPMVWAEKAGMGLANQVPPVVVELKSDASPVAVRQYPMSKEAREGIRPHIQRFLDLGILVPCQSPWNTPLLPVKKPGTNDYRPVQDLREVNKRVQDIHPTVPNPYNLLSSLPPSHTWYSVLDLKDAFFCLKLHPNSQPLFAFEWRDPEKGNTGQLTWTRLPQGFKNSPTLFNEALHRDLASFRALNPQVVMLQYVDDLLVAAPTYRDCKEGTRRLLQELSKLGYRVSAKKAQLCREEVTYLGYLLKGGKRWLTPARKATVMKIPTPTTPRQVREFLGKAGFCRLFIPGFASLAAPLYPLTRPKVPFTWTEAHQEAFGRIKEALLSAPALALPDLTKPFALYVDEKEGVARGVLTQTLGPWRRPVAYLSKKLDPVASGWPTCLKAIAAVALLLKDADKLTLGQNVLVIAPHNLESIVRQPPDRWMTNARMTHYQSLLLNERVSFAPPAILNPATLLPVESDDTPIHICSEILAEETGTRPDLRDQPLPGVPAWYTDGSSFIMDGRRQAGAAIVDNKRTVWASNLPEGTSAQKAELIALTQALRLAEGKSINIYTDSRYAFATAHVHGAIYKQRGWLTSAGKDIKNKEEILALLEAIHLPKRVAIIHCPGHQRGTDPVATGNRKADEAAKQAAQSTRILTETTKNAGKRTADGSEFEKRTADGSEFESPKKKAKVE

SEQ ID NO: 6687 - protein, 2215 aa, synthetic construct
MPAAKRVKLDGGDKKYSIGLDIGTNSVGWAVITDEYKVPSKKFKVLGNTDRHSIKKNLIGALLFDSGETAEATRLKRTARRRYTRRKNRICYLQEIFSNEMAKVDDSFFHRLEESFLVEEDKKHERHPIFGNIVDEVAYHEKYPTIYHLRKKLVDSTDKADLRLIYLALAHMIKFRGHFLIEGDLNPDNSDVDKLFIQLVQTYNQLFEENPINASGVDAKAILSARLSKSRRLENLIAQLPGEKKNGLFGNLIALSLGLTPNFKSNFDLAEDAKLQLSKDTYDDDLDNLLAQIGDQYADLFLAAKNLSDAILLSDILRVNTEITKAPLSASMIKRYDEHHQDLTLLKALVRQQLPEKYKEIFFDQSKNGYAGYIDGGASQEEFYKFIKPILEKMDGTEELLVKLNREDLLRKQRTFDNGSIPHQIHLGELHAILRRQEDFYPFLKDNREKIEKILTFRIPYYVGPLARGNSRFAWMTRKSEETITPWNFEEVVDKGASAQSFIERMTNFDKNLPNEKVLPKHSLLYEYFTVYNELTKVKYVTEGMRKPAFLSGEQKKAIVDLLFKTNRKVTVKQLKEDYFKKIECFDSVEISGVEDRFNASLGTYHDLLKIIKDKDFLDNEENEDILEDIVLTLTLFEDREMIEERLKTYAHLFDDKVMKQLKRRRYTGWGRLSRKLINGIRDKQSGKTILDFLKSDGFANRNFMQLIHDDSLTFKEDIQKAQVSGQGDSLHEHIANLAGSPAIKKGILQTVKVVDELVKVMGRHKPENIVIEMARENQTTQKGQKNSRERMKRIEEGIKELGSQILKEHPVENTQLQNEKLYLYYLQNGRDMYVDQELDINRLSDYDVDHIVPQSFLKDDSIDNKVLTRSDKARGKSDNVPSEEVVKKMKNYWRQLLNAKLITQRKFDNLTKAERGGLSELDKAGFIKRQLVETRQITKHVAQILDSRMNTKYDENDKLIREVKVITLKSKLVSDFRKDFQFYKVREINNYHHAHDAYLNAVVGTALIKKYPKLESEFVYGDYKVYDVRKMIAKSEQEIGKATAKYFFYSNIMNFFKTEITLANGEIRKRPLIETNGETGEIVWDKGRDFATVRKVLSMPQVNIVKKTEVQTGGFSKESILPKRNSDKLIARKKDWDPKKYGGFDSPTVAYSVLVVAKVEKGKSKKLKSVKELLGITIMERSSFEKNPIDFLEAKGYKEVKKDLIIKLPKYSLFELENGRKRMLASAGELQKGNELALPSKYVNFLYLASHYEKLKGSPEDNEQKQLFVEQHKHYLDEIIEQISEFSKRVILADANLDKVLSAYNKHRDKPIREQAENIIHLFTLTNLGAPAAFKYFDTTIDRKRYTSTKEVLDATLIHQSITGLYETRIDLSQLGGDGGGGGEAAAKGGTLGDQGSRGSDPLPEPRVTLTVEGIPTEFLVNTGAEHSVLTKPMGKMGSKRTVVAGATGSKVYPWTTKRLLKIGQKQVTHSFLVIPECPAPLLGRDLLTKLKAQIQFSTEGPQVTWEDRPAMCLVLNLEEEYRLHEKPVPPSIDPSWLQLFPMVWAEKAGMGLANQVPPVVVELKSDASPVAVRQYPMSKEAREGIRPHIQRFLDLGILVPCQSPWNTPLLPVKKPGTNDYRPVQDLREVNKRVQDIHPTVPNPYNLLSSLPPSHTWYSVLDLKDAFFCLKLHPNSQPLFAFEWRDPEKGNTGQLTWTRLPQGFKNSPTLFNEALHRDLASFRALNPQVVMLQYVDDLLVAAPTYRDCKEGTRRLLQELSKLGYRVSAKKAQLCREEVTYLGYLLKGGKRWLTPARKATVMKIPTPTTPRQVREFLGTAGFCRLWIPGFASLAAPLYPLTRPKVPFTWTEAHQEAFGRIKEALLSAPALALPDLTKPFALYVDEKEGVARGVLTQTLGPWRRPVAYLSKKLDPVASGWPTCLKAIAAVALLLKDADKLTLGQNVLVIAPHNLESIVRQPPDRWMTNARMTHYQSLLLNERVSFAPPAILNPATLLPVESDDTPIHICSEILAEETGTRPDLRDQPLPGVPAWYTDGSSFIMDGRRQAGAAIVDNKRTVWASNLPEGTSAQKAELIALTQALRLAEGKSINIYTDSRYAFATAHVHGAIYKQRGWLTSAGKDIKNKEEILALLEAIHLPKRVAIIHCPGHQRGTDPVATGNRKADEAAKQAAQSTRILTETTKNAGKRTADGSEFEKRTADGSEFESPKKKAKVE

SEQ ID NO: 6688 - protein, 2215 aa, synthetic construct
MPAAKRVKLDGGDKKYSIGLDIGTNSVGWAVITDEYKVPSKKFKVLGNTDRHSIKKNLIGALLFDSGETAEATRLKRTARRRYTRRKNRICYLQEIFSNEMAKVDDSFFHRLEESFLVEEDKKHERHPIFGNIVDEVAYHEKYPTIYHLRKKLVDSTDKADLRLIYLALAHMIKFRGHFLIEGDLNPDNSDVDKLFIQLVQTYNQLFEENPINASGVDAKAILSARLSKSRRLENLIAQLPGEKKNGLFGNLIALSLGLTPNFKSNFDLAEDAKLQLSKDTYDDDLDNLLAQIGDQYADLFLAAKNLSDAILLSDILRVNTEITKAPLSASMIKRYDEHHQDLTLLKALVRQQLPEKYKEIFFDQSKNGYAGYIDGGASQEEFYKFIKPILEKMDGTEELLVKLNREDLLRKQRTFDNGSIPHQIHLGELHAILRRQEDFYPFLKDNREKIEKILTFRIPYYVGPLARGNSRFAWMTRKSEETITPWNFEEVVDKGASAQSFIERMTNFDKNLPNEKVLPKHSLLYEYFTVYNELTKVKYVTEGMRKPAFLSGEQKKAIVDLLFKTNRKVTVKQLKEDYFKKIECFDSVEISGVEDRFNASLGTYHDLLKIIKDKDFLDNEENEDILEDIVLTLTLFEDREMIEERLKTYAHLFDDKVMKQLKRRRYTGWGRLSRKLINGIRDKQSGKTILDFLKSDGFANRNFMQLIHDDSLTFKEDIQKAQVSGQGDSLHEHIANLAGSPAIKKGILQTVKVVDELVKVMGRHKPENIVIEMARENQTTQKGQKNSRERMKRIEEGIKELGSQILKEHPVENTQLQNEKLYLYYLQNGRDMYVDQELDINRLSDYDVDHIVPQSFLKDDSIDNKVLTRSDKARGKSDNVPSEEVVKKMKNYWRQLLNAKLITQRKFDNLTKAERGGLSELDKAGFIKRQLVETRQITKHVAQILDSRMNTKYDENDKLIREVKVITLKSKLVSDFRKDFQFYKVREINNYHHAHDAYLNAVVGTALIKKYPKLESEFVYGDYKVYDVRKMIAKSEQEIGKATAKYFFYSNIMNFFKTEITLANGEIRKRPLIETNGETGEIVWDKGRDFATVRKVLSMPQVNIVKKTEVQTGGFSKESILPKRNSDKLIARKKDWDPKKYGGFDSPTVAYSVLVVAKVEKGKSKKLKSVKELLGITIMERSSFEKNPIDFLEAKGYKEVKKDLIIKLPKYSLFELENGRKRMLASAGELQKGNELALPSKYVNFLYLASHYEKLKGSPEDNEQKQLFVEQHKHYLDEIIEQISEFSKRVILADANLDKVLSAYNKHRDKPIREQAENIIHLFTLTNLGAPAAFKYFDTTIDRKRYTSTKEVLDATLIHQSITGLYETRIDLSQLGGDGGGGGEAAAKGGTLGDQGSRGSDPLPEPRVTLTVEGIPTEFLVNTGAEHSVLTKPMGKMGSKRTVVAGATGSKVYPWTTKRLLKIGQKQVTHSFLVIPECPAPLLGRDLLTKLKAQIQFSTEGPQVTWEDRPAMCLVLNLEEEYRLHEKPVPPSIDPSWLQLFPMVWAEKAGMGLANQVPPVVVELKSDASPVAVRQYPMSKEAREGIRPHIQRFLDLGILVPCQSPWNTPLLPVKKPGTNDYRPVQDLREVNKRVQDIHPTVPNPYNLLSSLPPSHTWYSVLDLKDAFFCLKLHPNSQPLFAFEWRDPEKGNTGQLTWTRLPQGFKNSPTLFNEALHRDLASFRALNPQVVMLQYVDDLLVAAPTYRDCKEGTRRLLQELSKLGYRVSAKKAQLCREEVTYLGYLLKGGKRWLTPARKATVMKIPTPTTPRQVREFLGKAGFCRLFIPGFASLAAPLYPLTRPKVPFTWTEAHQEAFGRIKEALLSAPALALPDLTKPFALYVDEKEGVARGVLTQTLGPWRRPVAYLSKKLDPVASGWPTCLKAIAAVALLLKDADKLTLGQNVLVIAPHNLESIVRQPPDRWMTNARMTHYQSLLLNERVSFAPPAILNPATLLPVESDDTPIHICSEILAEETGTRPDLRDQPLPGVPAWYTDGSSFIMDGRRQAGAAIVDNKRTVWASNLPEGTSAQKAELIALTQALRLAEGKSINIYTDSRYAFATAHVHGAIYKQRGWLTSAGKDIKNKEEILALLEAIHLPKRVAIIHCPGHQRGTDPVATGNRKADEAAKQAAQSTRILTETTKNAGKRTADGSEFEKRTADGSEFESPKKKAKVE

SEQ ID NO: 6689 - protein, 2093 aa, synthetic construct
MPAAKRVKLDGGDKKYSIGLDIGTNSVGWAVITDEYKVPSKKFKVLGNTDRHSIKKNLIGALLFDSGETAEATRLKRTARRRYTRRKNRICYLQEIFSNEMAKVDDSFFHRLEESFLVEEDKKHERHPIFGNIVDEVAYHEKYPTIYHLRKKLVDSTDKADLRLIYLALAHMIKFRGHFLIEGDLNPDNSDVDKLFIQLVQTYNQLFEENPINASGVDAKAILSARLSKSRRLENLIAQLPGEKKNGLFGNLIALSLGLTPNFKSNFDLAEDAKLQLSKDTYDDDLDNLLAQIGDQYADLFLAAKNLSDAILLSDILRVNTEITKAPLSASMIKRYDEHHQDLTLLKALVRQQLPEKYKEIFFDQSKNGYAGYIDGGASQEEFYKFIKPILEKMDGTEELLVKLNREDLLRKQRTFDNGSIPHQIHLGELHAILRRQEDFYPFLKDNREKIEKILTFRIPYYVGPLARGNSRFAWMTRKSEETITPWNFEEVVDKGASAQSFIERMTNFDKNLPNEKVLPKHSLLYEYFTVYNELTKVKYVTEGMRKPAFLSGEQKKAIVDLLFKTNRKVTVKQLKEDYFKKIECFDSVEISGVEDRFNASLGTYHDLLKIIKDKDFLDNEENEDILEDIVLTLTLFEDREMIEERLKTYAHLFDDKVMKQLKRRRYTGWGRLSRKLINGIRDKQSGKTILDFLKSDGFANRNFMQLIHDDSLTFKEDIQKAQVSGQGDSLHEHIANLAGSPAIKKGILQTVKVVDELVKVMGRHKPENIVIEMARENQTTQKGQKNSRERMKRIEEGIKELGSQILKEHPVENTQLQNEKLYLYYLQNGRDMYVDQELDINRLSDYDVDHIVPQSFLKDDSIDNKVLTRSDKARGKSDNVPSEEVVKKMKNYWRQLLNAKLITQRKFDNLTKAERGGLSELDKAGFIKRQLVETRQITKHVAQILDSRMNTKYDENDKLIREVKVITLKSKLVSDFRKDFQFYKVREINNYHHAHDAYLNAVVGTALIKKYPKLESEFVYGDYKVYDVRKMIAKSEQEIGKATAKYFFYSNIMNFFKTEITLANGEIRKRPLIETNGETGEIVWDKGRDFATVRKVLSMPQVNIVKKTEVQTGGFSKESILPKRNSDKLIARKKDWDPKKYGGFDSPTVAYSVLVVAKVEKGKSKKLKSVKELLGITIMERSSFEKNPIDFLEAKGYKEVKKDLIIKLPKYSLFELENGRKRMLASAGELQKGNELALPSKYVNFLYLASHYEKLKGSPEDNEQKQLFVEQHKHYLDEIIEQISEFSKRVILADANLDKVLSAYNKHRDKPIREQAENIIHLFTLTNLGAPAAFKYFDTTIDRKRYTSTKEVLDATLIHQSITGLYETRIDLSQLGGDGGGGGEAAAKGGTLNLEDEYRLYETSAEPEVSPGSTWLSDFPQAWAETGGMGLAVRQAPLIIPLKATSTPVSIKQYPMSQEAKLGIKPHIQRLLDQGILVPCQSPWNTPLLPVKKPGTNDYRPVQDLREVNKRVEDIHPTVPNPYNLLSGLPPSHRWYTVLDLKDAFFCLRLHPTSQPLFAFEWRDPGMGISGQLTWTRLPQGFKNSPTLFNEALHRDLADFRIQHPDLILLQYVDDILLAATSELDCQQGTRALLLTLGNLGYRASAKKAQLCQKQVKYLGYLLKEGQRWLTEARKETVMGQPTPKTPRQLREFLGTAGFCRLWIPGFAEMAAPLYPLTKPGTLFNWGPDQQKAYQEIKQALLTAPALGLPDLTKPFELFVDEKQGYAKGVLTQKLGPWRRPVAYLSKKLDPVAAGWPPCLRMVAAIAVLRKDAGKLTMGQPLVILAPHAVEALVKQPPDRWLSNARMTHYQAMLLDTDRVQFGPVVALNPATLLPLPEEGAPHDCLEILAETHGTRPDLTDQPIPDADHTWYTDGSSFLQEGQRKAGAAVTTETEVIWARALPAGTSAQRAELIALTQALKMAEGKRLNVYTDSRYAFATAHIHGEIYRRRGWLTSEGREIKNKSEILALLKALFLPKRLSIIHCLGHQKGDSAEARGNRLADQAAREAAIKTPPDTSTLLAGKRTADGSEFEKRTADGSEFESPKKKAKVE

SEQ ID NO: 6690 - protein, 2093 aa, synthetic construct
MPAAKRVKLDGGDKKYSIGLDIGTNSVGWAVITDEYKVPSKKFKVLGNTDRHSIKKNLIGALLFDSGETAEATRLKRTARRRYTRRKNRICYLQEIFSNEMAKVDDSFFHRLEESFLVEEDKKHERHPIFGNIVDEVAYHEKYPTIYHLRKKLVDSTDKADLRLIYLALAHMIKFRGHFLIEGDLNPDNSDVDKLFIQLVQTYNQLFEENPINASGVDAKAILSARLSKSRRLENLIAQLPGEKKNGLFGNLIALSLGLTPNFKSNFDLAEDAKLQLSKDTYDDDLDNLLAQIGDQYADLFLAAKNLSDAILLSDILRVNTEITKAPLSASMIKRYDEHHQDLTLLKALVRQQLPEKYKEIFFDQSKNGYAGYIDGGASQEEFYKFIKPILEKMDGTEELLVKLNREDLLRKQRTFDNGSIPHQIHLGELHAILRRQEDFYPFLKDNREKIEKILTFRIPYYVGPLARGNSRFAWMTRKSEETITPWNFEEVVDKGASAQSFIERMTNFDKNLPNEKVLPKHSLLYEYFTVYNELTKVKYVTEGMRKPAFLSGEQKKAIVDLLFKTNRKVTVKQLKEDYFKKIECFDSVEISGVEDRFNASLGTYHDLLKIIKDKDFLDNEENEDILEDIVLTLTLFEDREMIEERLKTYAHLFDDKVMKQLKRRRYTGWGRLSRKLINGIRDKQSGKTILDFLKSDGFANRNFMQLIHDDSLTFKEDIQKAQVSGQGDSLHEHIANLAGSPAIKKGILQTVKVVDELVKVMGRHKPENIVIEMARENQTTQKGQKNSRERMKRIEEGIKELGSQILKEHPVENTQLQNEKLYLYYLQNGRDMYVDQELDINRLSDYDVDHIVPQSFLKDDSIDNKVLTRSDKARGKSDNVPSEEVVKKMKNYWRQLLNAKLITQRKFDNLTKAERGGLSELDKAGFIKRQLVETRQITKHVAQILDSRMNTKYDENDKLIREVKVITLKSKLVSDFRKDFQFYKVREINNYHHAHDAYLNAVVGTALIKKYPKLESEFVYGDYKVYDVRKMIAKSEQEIGKATAKYFFYSNIMNFFKTEITLANGEIRKRPLIETNGETGEIVWDKGRDFATVRKVLSMPQVNIVKKTEVQTGGFSKESILPKRNSDKLIARKKDWDPKKYGGFDSPTVAYSVLVVAKVEKGKSKKLKSVKELLGITIMERSSFEKNPIDFLEAKGYKEVKKDLIIKLPKYSLFELENGRKRMLASAGELQKGNELALPSKYVNFLYLASHYEKLKGSPEDNEQKQLFVEQHKHYLDEIIEQISEFSKRVILADANLDKVLSAYNKHRDKPIREQAENIIHLFTLTNLGAPAAFKYFDTTIDRKRYTSTKEVLDATLIHQSITGLYETRIDLSQLGGDGGGGGEAAAKGGTLNLEDEYRLYETSAEPEVSPGSTWLSDFPQAWAETGGMGLAVRQAPLIIPLKATSTPVSIKQYPMSQEAKLGIKPHIQRLLDQGILVPCQSPWNTPLLPVKKPGTNDYRPVQDLREVNKRVEDIHPTVPNPYNLLSGLPPSHRWYTVLDLKDAFFCLRLHPTSQPLFAFEWRDPGMGISGQLTWTRLPQGFKNSPTLFNEALHRDLADFRIQHPDLILLQYVDDILLAATSELDCQQGTRALLLTLGNLGYRASAKKAQLCQKQVKYLGYLLKEGQRWLTEARKETVMGQPTPKTPRQLREFLGKAGFCRLFIPGFAEMAAPLYPLTKPGTLFNWGPDQQKAYQEIKQALLTAPALGLPDLTKPFELFVDEKQGYAKGVLTQKLGPWRRPVAYLSKKLDPVAAGWPPCLRMVAAIAVLRKDAGKLTMGQPLVILAPHAVEALVKQPPDRWLSNARMTHYQAMLLDTDRVQFGPVVALNPATLLPLPEEGAPHDCLEILAETHGTRPDLTDQPIPDADHTWYTDGSSFLQEGQRKAGAAVTTETEVIWARALPAGTSAQRAELIALTQALKMAEGKRLNVYTDSRYAFATAHIHGEIYRRRGWLTSEGREIKNKSEILALLKALFLPKRLSIIHCLGHQKGDSAEARGNRLADQAAREAAIKTPPDTSTLLAGKRTADGSEFEKRTADGSEFESPKKKAKVE

SEQ ID NO: 6691 - protein, 2093 aa, synthetic construct
MPAAKRVKLDGGDKKYSIGLDIGTNSVGWAVITDEYKVPSKKFKVLGNTDRHSIKKNLIGALLFDSGETAEATRLKRTARRRYTRRKNRICYLQEIFSNEMAKVDDSFFHRLEESFLVEEDKKHERHPIFGNIVDEVAYHEKYPTIYHLRKKLVDSTDKADLRLIYLALAHMIKFRGHFLIEGDLNPDNSDVDKLFIQLVQTYNQLFEENPINASGVDAKAILSARLSKSRRLENLIAQLPGEKKNGLFGNLIALSLGLTPNFKSNFDLAEDAKLQLSKDTYDDDLDNLLAQIGDQYADLFLAAKNLSDAILLSDILRVNTEITKAPLSASMIKRYDEHHQDLTLLKALVRQQLPEKYKEIFFDQSKNGYAGYIDGGASQEEFYKFIKPILEKMDGTEELLVKLNREDLLRKQRTFDNGSIPHQIHLGELHAILRRQEDFYPFLKDNREKIEKILTFRIPYYVGPLARGNSRFAWMTRKSEETITPWNFEEVVDKGASAQSFIERMTNFDKNLPNEKVLPKHSLLYEYFTVYNELTKVKYVTEGMRKPAFLSGEQKKAIVDLLFKTNRKVTVKQLKEDYFKKIECFDSVEISGVEDRFNASLGTYHDLLKIIKDKDFLDNEENEDILEDIVLTLTLFEDREMIEERLKTYAHLFDDKVMKQLKRRRYTGWGRLSRKLINGIRDKQSGKTILDFLKSDGFANRNFMQLIHDDSLTFKEDIQKAQVSGQGDSLHEHIANLAGSPAIKKGILQTVKVVDELVKVMGRHKPENIVIEMARENQTTQKGQKNSRERMKRIEEGIKELGSQILKEHPVENTQLQNEKLYLYYLQNGRDMYVDQELDINRLSDYDVDHIVPQSFLKDDSIDNKVLTRSDKARGKSDNVPSEEVVKKMKNYWRQLLNAKLITQRKFDNLTKAERGGLSELDKAGFIKRQLVETRQITKHVAQILDSRMNTKYDENDKLIREVKVITLKSKLVSDFRKDFQFYKVREINNYHHAHDAYLNAVVGTALIKKYPKLESEFVYGDYKVYDVRKMIAKSEQEIGKATAKYFFYSNIMNFFKTEITLANGEIRKRPLIETNGETGEIVWDKGRDFATVRKVLSMPQVNIVKKTEVQTGGFSKESILPKRNSDKLIARKKDWDPKKYGGFDSPTVAYSVLVVAKVEKGKSKKLKSVKELLGITIMERSSFEKNPIDFLEAKGYKEVKKDLIIKLPKYSLFELENGRKRMLASAGELQKGNELALPSKYVNFLYLASHYEKLKGSPEDNEQKQLFVEQHKHYLDEIIEQISEFSKRVILADANLDKVLSAYNKHRDKPIREQAENIIHLFTLTNLGAPAAFKYFDTTIDRKRYTSTKEVLDATLIHQSITGLYETRIDLSQLGGDGGGGGEAAAKGGLGIEDEYRLHETSTEPDVSLGSTWLSDFPQAWAETGGMGLAVRQAPLIIPLKATSTPVSIQQYPMSHEARLGIKPHIQRLLDQGILVPCQSPWNTPLLPVKKPGTNDYRPVQDLREVNKRVEDIHPTVPNPYNLLSGLPPSHQWYTVLDLKDAFFCLRLHPTSQPLFAFEWRDPGMGISGQLTWTRLPQGFKNSPTLFNEALHRDLADFRIQHPDLILLQYVDDILLAATSELDCQQGTRALLQTLGDLGYRASAKKAQICQKQVKYLGYLLREGQRWLTEARKETVMGQPVPKTPRQLREFLGKAGFCRLFIPGFAEMAAPLYPLTKPGTLFSWGPDQQKAYQEIKQALLTAPALGLPDLTKPFELFVDEKQGYAKGVLTQKLGPWRRPVAYLSKKLDPVAAGWPPCLRMVAAIAVLTKDAGKLTMGQPLVILAPHAVEALVKQPPDRWLSNARMTHYQAMLLDTDRVQFGPVVALNPATLLPLPEEGAPHDCLEILAETHGTRPDLTDQPIPDADHTWYTDGSSFLQEGQRKAGAAVTTETEVIWAGALPAGTSAQRAELIALTQALKMAEGKRLNVYTDSRYAFATAHIHGEIYRRRGWLTSEGREIKNKSEILALLKALFLPKRLSIIHCLGHQKGDSAEARGNRLADQAAREAAIKTPPDTSTLLIAGKRTADGSEFEKRTADGSEFESPKKKAKVE

SEQ ID NO: 6692 - protein, 2093 aa, synthetic construct
MPAAKRVKLDGGDKKYSIGLDIGTNSVGWAVITDEYKVPSKKFKVLGNTDRHSIKKNLIGALLFDSGETAEATRLKRTARRRYTRRKNRICYLQEIFSNEMAKVDDSFFHRLEESFLVEEDKKHERHPIFGNIVDEVAYHEKYPTIYHLRKKLVDSTDKADLRLIYLALAHMIKFRGHFLIEGDLNPDNSDVDKLFIQLVQTYNQLFEENPINASGVDAKAILSARLSKSRRLENLIAQLPGEKKNGLFGNLIALSLGLTPNFKSNFDLAEDAKLQLSKDTYDDDLDNLLAQIGDQYADLFLAAKNLSDAILLSDILRVNTEITKAPLSASMIKRYDEHHQDLTLLKALVRQQLPEKYKEIFFDQSKNGYAGYIDGGASQEEFYKFIKPILEKMDGTEELLVKLNREDLLRKQRTFDNGSIPHQIHLGELHAILRRQEDFYPFLKDNREKIEKILTFRIPYYVGPLARGNSRFAWMTRKSEETITPWNFEEVVDKGASAQSFIERMTNFDKNLPNEKVLPKHSLLYEYFTVYNELTKVKYVTEGMRKPAFLSGEQKKAIVDLLFKTNRKVTVKQLKEDYFKKIECFDSVEISGVEDRFNASLGTYHDLLKIIKDKDFLDNEENEDILEDIVLTLTLFEDREMIEERLKTYAHLFDDKVMKQLKRRRYTGWGRLSRKLINGIRDKQSGKTILDFLKSDGFANRNFMQLIHDDSLTFKEDIQKAQVSGQGDSLHEHIANLAGSPAIKKGILQTVKVVDELVKVMGRHKPENIVIEMARENQTTQKGQKNSRERMKRIEEGIKELGSQILKEHPVENTQLQNEKLYLYYLQNGRDMYVDQELDINRLSDYDVDHIVPQSFLKDDSIDNKVLTRSDKARGKSDNVPSEEVVKKMKNYWRQLLNAKLITQRKFDNLTKAERGGLSELDKAGFIKRQLVETRQITKHVAQILDSRMNTKYDENDKLIREVKVITLKSKLVSDFRKDFQFYKVREINNYHHAHDAYLNAVVGTALIKKYPKLESEFVYGDYKVYDVRKMIAKSEQEIGKATAKYFFYSNIMNFFKTEITLANGEIRKRPLIETNGETGEIVWDKGRDFATVRKVLSMPQVNIVKKTEVQTGGFSKESILPKRNSDKLIARKKDWDPKKYGGFDSPTVAYSVLVVAKVEKGKSKKLKSVKELLGITIMERSSFEKNPIDFLEAKGYKEVKKDLIIKLPKYSLFELENGRKRMLASAGELQKGNELALPSKYVNFLYLASHYEKLKGSPEDNEQKQLFVEQHKHYLDEIIEQISEFSKRVILADANLDKVLSAYNKHRDKPIREQAENIIHLFTLTNLGAPAAFKYFDTTIDRKRYTSTKEVLDATLIHQSITGLYETRIDLSQLGGDGGGGGEAAAKGGTLNIEDEYRLHETSKGPDVPLGSTWLSDFPQAWAETGGMGLAVRQAPLIIPLKATSTPVSIKQYPMSQEARLGIKPHIQRLLDQGILVPCQSPWNTPLLPVKKPGTNDYRPVQDLREVNKRVEDIHPTVPNPYNLLSGLPPSHQWYTVLDLKDAFFCLRLHPTSQSLFAFEWRDPEMGISGQLTWTRLPQGFKNSPTLFNEALHRDLADFRIQHPDLILLQYVDDLLLAATSELDCQQGTRALLQTLGDLGYRASAKKAQICQKQVKYLGYLLKEGQRWLTEARKETVMGQPTPKTPRQLREFLGTAGFCRLWIPGFAEMAAPLYPLTKPGTLFEWGPDQQKAYQEIKQALLTAPALGLPDLTKPFELFVDEKQGYAKGVLTQKLGPWRRPVAYLSKKLDPVAAGWPPCLRMVAAIAVLTKDAGKLTMGQPLVILAPHAVEALVKQPPDRWLSNARMTHYQALLLDTDRVQFGPIVALNPATLLPLPEEGLQHDCLDILAEAHGTRPDLTDQPLPDADHTWYTDGSSFLQEGQRKAGAAVTTETEVVWAKALPAGTSAQRAELIALTQALKMAEGKKLNVYTDSRYAFATAHIHGEIYRRRGWLTSEGKEIKNKDEILALLKALFLPKRLSIIHCPGHQKGNRAEARGNRMADQAAREVATRETPETSTLLAGKRTADGSEFEKRTADGSEFESPKKKAKVE

SEQ ID NO: 6693 - protein, 2087 aa, synthetic construct
MPAAKRVKLDGGDKKYSIGLDIGTNSVGWAVITDEYKVPSKKFKVLGNTDRHSIKKNLIGALLFDSGETAEATRLKRTARRRYTRRKNRICYLQEIFSNEMAKVDDSFFHRLEESFLVEEDKKHERHPIFGNIVDEVAYHEKYPTIYHLRKKLVDSTDKADLRLIYLALAHMIKFRGHFLIEGDLNPDNSDVDKLFIQLVQTYNQLFEENPINASGVDAKAILSARLSKSRRLENLIAQLPGEKKNGLFGNLIALSLGLTPNFKSNFDLAEDAKLQLSKDTYDDDLDNLLAQIGDQYADLFLAAKNLSDAILLSDILRVNTEITKAPLSASMIKRYDEHHQDLTLLKALVRQQLPEKYKEIFFDQSKNGYAGYIDGGASQEEFYKFIKPILEKMDGTEELLVKLNREDLLRKQRTFDNGSIPHQIHLGELHAILRRQEDFYPFLKDNREKIEKILTFRIPYYVGPLARGNSRFAWMTRKSEETITPWNFEEVVDKGASAQSFIERMTNFDKNLPNEKVLPKHSLLYEYFTVYNELTKVKYVTEGMRKPAFLSGEQKKAIVDLLFKTNRKVTVKQLKEDYFKKIECFDSVEISGVEDRFNASLGTYHDLLKIIKDKDFLDNEENEDILEDIVLTLTLFEDREMIEERLKTYAHLFDDKVMKQLKRRRYTGWGRLSRKLINGIRDKQSGKTILDFLKSDGFANRNFMQLIHDDSLTFKEDIQKAQVSGQGDSLHEHIANLAGSPAIKKGILQTVKVVDELVKVMGRHKPENIVIEMARENQTTQKGQKNSRERMKRIEEGIKELGSQILKEHPVENTQLQNEKLYLYYLQNGRDMYVDQELDINRLSDYDVDHIVPQSFLKDDSIDNKVLTRSDKARGKSDNVPSEEVVKKMKNYWRQLLNAKLITQRKFDNLTKAERGGLSELDKAGFIKRQLVETRQITKHVAQILDSRMNTKYDENDKLIREVKVITLKSKLVSDFRKDFQFYKVREINNYHHAHDAYLNAVVGTALIKKYPKLESEFVYGDYKVYDVRKMIAKSEQEIGKATAKYFFYSNIMNFFKTEITLANGEIRKRPLIETNGETGEIVWDKGRDFATVRKVLSMPQVNIVKKTEVQTGGFSKESILPKRNSDKLIARKKDWDPKKYGGFDSPTVAYSVLVVAKVEKGKSKKLKSVKELLGITIMERSSFEKNPIDFLEAKGYKEVKKDLIIKLPKYSLFELENGRKRMLASAGELQKGNELALPSKYVNFLYLASHYEKLKGSPEDNEQKQLFVEQHKHYLDEIIEQISEFSKRVILADANLDKVLSAYNKHRDKPIREQAENIIHLFTLTNLGAPAAFKYFDTTIDRKRYTSTKEVLDATLIHQSITGLYETRIDLSQLGGDGGGGGEAAAKGGTLQLDDEYRLYSPLVKPDQNIQFWLEQFPQAWAETAGMGLAKQVPPQVIQLKASATPVSVRQYPLSKEAQEGIRPHVQRLIQQGILVPVQSPWNTPLLPVRKPGTNDYRPVQDLREVNKRVQDIHPTVPNPYNLLCALPPQRSWYTVLDLKDAFFCLRLHPTSQPLFAFEWRDPGTGRTGQLTWTRLPQGFKNSPTIFDEALHRDLANFRIQHPQVTLLQYVDDLLLAGATKQDCLEGTKALLLELSDLGYRASAKKAQICRREVTYLGYSLRDGQRWLTEARKKTVVQIPAPTTAKQVREFLGTAGFCRLWIPGFATLAAPLYPLTKEKGEFSWAPEHQKAFDAIKKALLSAPALALPDVTKPFTLYVDERKGVARGVLTQTLGPWRRPVAYLSKKLDPVASGWPVCLKAIAAVAILVKDADKLTLGQNITVIAPHALENIVRQPPDRWMTNARMTHYQSLLLTERVTFAPPAALNPATLLPEETDEPVTHDCHQLLIEETGVRKDLTDIPLTGEVLTWFTDGSSYVVEGKRMAGAAVVDGTRTIWASSLPEGTSAQKAELMALTQALRLAEGKSINIYTDSRYAFATAHVHGAIYKQRGLLTSAGREIKNKEEILSLLEALHLPKRLAIIHCPGHQKAKDPISRGNQMADRVAKQAAQGVNLLAGKRTADGSEFEKRTADGSEFESPKKKAKVE

SEQ ID NO: 6694 - protein, 2173 aa, synthetic construct
MPAAKRVKLDGGDKKYSIGLDIGTNSVGWAVITDEYKVPSKKFKVLGNTDRHSIKKNLIGALLFDSGETAEATRLKRTARRRYTRRKNRICYLQEIFSNEMAKVDDSFFHRLEESFLVEEDKKHERHPIFGNIVDEVAYHEKYPTIYHLRKKLVDSTDKADLRLIYLALAHMIKFRGHFLIEGDLNPDNSDVDKLFIQLVQTYNQLFEENPINASGVDAKAILSARLSKSRRLENLIAQLPGEKKNGLFGNLIALSLGLTPNFKSNFDLAEDAKLQLSKDTYDDDLDNLLAQIGDQYADLFLAAKNLSDAILLSDILRVNTEITKAPLSASMIKRYDEHHQDLTLLKALVRQQLPEKYKEIFFDQSKNGYAGYIDGGASQEEFYKFIKPILEKMDGTEELLVKLNREDLLRKQRTFDNGSIPHQIHLGELHAILRRQEDFYPFLKDNREKIEKILTFRIPYYVGPLARGNSRFAWMTRKSEETITPWNFEEVVDKGASAQSFIERMTNFDKNLPNEKVLPKHSLLYEYFTVYNELTKVKYVTEGMRKPAFLSGEQKKAIVDLLFKTNRKVTVKQLKEDYFKKIECFDSVEISGVEDRFNASLGTYHDLLKIIKDKDFLDNEENEDILEDIVLTLTLFEDREMIEERLKTYAHLFDDKVMKQLKRRRYTGWGRLSRKLINGIRDKQSGKTILDFLKSDGFANRNFMQLIHDDSLTFKEDIQKAQVSGQGDSLHEHIANLAGSPAIKKGILQTVKVVDELVKVMGRHKPENIVIEMARENQTTQKGQKNSRERMKRIEEGIKELGSQILKEHPVENTQLQNEKLYLYYLQNGRDMYVDQELDINRLSDYDVDHIVPQSFLKDDSIDNKVLTRSDKARGKSDNVPSEEVVKKMKNYWRQLLNAKLITQRKFDNLTKAERGGLSELDKAGFIKRQLVETRQITKHVAQILDSRMNTKYDENDKLIREVKVITLKSKLVSDFRKDFQFYKVREINNYHHAHDAYLNAVVGTALIKKYPKLESEFVYGDYKVYDVRKMIAKSEQEIGKATAKYFFYSNIMNFFKTEITLANGEIRKRPLIETNGETGEIVWDKGRDFATVRKVLSMPQVNIVKKTEVQTGGFSKESILPKRNSDKLIARKKDWDPKKYGGFDSPTVAYSVLVVAKVEKGKSKKLKSVKELLGITIMERSSFEKNPIDFLEAKGYKEVKKDLIIKLPKYSLFELENGRKRMLASAGELQKGNELALPSKYVNFLYLASHYEKLKGSPEDNEQKQLFVEQHKHYLDEIIEQISEFSKRVILADANLDKVLSAYNKHRDKPIREQAENIIHLFTLTNLGAPAAFKYFDTTIDRKRYTSTKEVLDATLIHQSITGLYETRIDLSQLGGDGGGGGEAAAKGGMDPLQLLQPLEAEIKGTKLKAHWNSGATITCVPQAFLEEEVPIKNIWIKTIHGEKEQPVYYLTFKIQGRKVEAEVISSPYDYILVSPSDIPWLMKKPLQLTTLVPLQEYEERLLKQTMLTGSYKEKLQSLFLKYDALWQHWENQVGHRRIKPHHIATGTVNPRPQKQYPINPKAKASIQTVINDLLKQGVLIQQNSIMNTPVYPVPKPDGKWRMVLDYREVNKTIPLIAAQNQHSAGILSSIFRGKYKTTLDLSNGFWAHSITPESYWLTAFTWLGQQYCWTRLPQGFLNSPALFNADVVDLLKEVPNVQVYVDDIYISHDDPREHLEQLEKVFSLLLNAGYVVSLKKSEIAQHEVEFLGFNITKEGRGLTETFKQKLLNITPPRDLKQLQSILGKLNFARNFIPNFSELVKPLYNIIATAPGKYITWTTDNSQQLQNIISMLNSAENLEERNPEVRLIMKVNTSPSAGYIRFYNEFAKRPIMYLNYVYTKAEVKFTNTEKLLTTIHKGLIKALDLGMGQEILVYSPIVSMTKIQKTPLPERKALPIRWITWMSYLEDPRIQFHYDKTLPELQQVPTVTDDIIAKIKHPSEFSMVFYTDGSAIKHPNVNKSHNAGMGIAQVQFKPEFTVINTWSIPLGDHTAQLAEVAAVEFACKKALKIDGPVLIVTDSFYVAESVNKELPYWQSNGFFNNKKKPLKHVSKWKSIADCIQLKPDIIIIHEKGHQPTASTFHTEGNNLADKLATQGSYVVNAGKRTADGSEFEKRTADGSEFESPKKKAKVE

SEQ ID NO: 6695 - protein, 2093 aa, synthetic construct
MPAAKRVKLDGGDKKYSIGLDIGTNSVGWAVITDEYKVPSKKFKVLGNTDRHSIKKNLIGALLFDSGETAEATRLKRTARRRYTRRKNRICYLQEIFSNEMAKVDDSFFHRLEESFLVEEDKKHERHPIFGNIVDEVAYHEKYPTIYHLRKKLVDSTDKADLRLIYLALAHMIKFRGHFLIEGDLNPDNSDVDKLFIQLVQTYNQLFEENPINASGVDAKAILSARLSKSRRLENLIAQLPGEKKNGLFGNLIALSLGLTPNFKSNFDLAEDAKLQLSKDTYDDDLDNLLAQIGDQYADLFLAAKNLSDAILLSDILRVNTEITKAPLSASMIKRYDEHHQDLTLLKALVRQQLPEKYKEIFFDQSKNGYAGYIDGGASQEEFYKFIKPILEKMDGTEELLVKLNREDLLRKQRTFDNGSIPHQIHLGELHAILRRQEDFYPFLKDNREKIEKILTFRIPYYVGPLARGNSRFAWMTRKSEETITPWNFEEVVDKGASAQSFIERMTNFDKNLPNEKVLPKHSLLYEYFTVYNELTKVKYVTEGMRKPAFLSGEQKKAIVDLLFKTNRKVTVKQLKEDYFKKIECFDSVEISGVEDRFNASLGTYHDLLKIIKDKDFLDNEENEDILEDIVLTLTLFEDREMIEERLKTYAHLFDDKVMKQLKRRRYTGWGRLSRKLINGIRDKQSGKTILDFLKSDGFANRNFMQLIHDDSLTFKEDIQKAQVSGQGDSLHEHIANLAGSPAIKKGILQTVKVVDELVKVMGRHKPENIVIEMARENQTTQKGQKNSRERMKRIEEGIKELGSQILKEHPVENTQLQNEKLYLYYLQNGRDMYVDQELDINRLSDYDVDHIVPQSFLKDDSIDNKVLTRSDKARGKSDNVPSEEVVKKMKNYWRQLLNAKLITQRKFDNLTKAERGGLSELDKAGFIKRQLVETRQITKHVAQILDSRMNTKYDENDKLIREVKVITLKSKLVSDFRKDFQFYKVREINNYHHAHDAYLNAVVGTALIKKYPKLESEFVYGDYKVYDVRKMIAKSEQEIGKATAKYFFYSNIMNFFKTEITLANGEIRKRPLIETNGETGEIVWDKGRDFATVRKVLSMPQVNIVKKTEVQTGGFSKESILPKRNSDKLIARKKDWDPKKYGGFDSPTVAYSVLVVAKVEKGKSKKLKSVKELLGITIMERSSFEKNPIDFLEAKGYKEVKKDLIIKLPKYSLFELENGRKRMLASAGELQKGNELALPSKYVNFLYLASHYEKLKGSPEDNEQKQLFVEQHKHYLDEIIEQISEFSKRVILADANLDKVLSAYNKHRDKPIREQAENIIHLFTLTNLGAPAAFKYFDTTIDRKRYTSTKEVLDATLIHQSITGLYETRIDLSQLGGDGGGGGEAAAKGGTLNIEDEYRLHETSKEPDVPLGSTWLSDFPQAWAETGGMGLAVRQAPLIIPLKATSTPVSIKQYPMSQEARLGIKPHIQRLLDQGILVPCQSPWNTPLLPVKKPGTNDYRPVQDLREVNKRVEDIHPTVPNPYNLLSGLPPSHQWYTVLDLKDAFFCLRLHPTSQPLFAFEWRDPEMGISGQLTWTRLPQGFKNSPTLFNEALHRDLADFRIQHPDLILLQYVDDLLLAATSEQDCQRGTRALLQTLGNLGYRASAKKAQICQKQVKYLGYLLKEGQRWLTEARKETVMGQPTPKTPRQLREFLGTAGFCRLWIPGFAEMAAPLYPLTKPGTLFNWGPDQQKAYQEIKQALLTAPALGLPDLTKPFELFVDEKQGYAKGVLTQKLGPWRRPVAYLSKKLDPVAAGWPPCLRMVAAIAVLTKDAGKLTMGQPLVILAPHAVEALVKQPPDRWLSNARMTHYQAMLLDTDRVQFGPVVALNPATLLPLPEKEAPHDCLEILAETHGTRPDLTDQPIPDADYTWYTDGSSFLQEGQRRAGAAVTTETEVIWARALPAGTSAQRAELIALTQALKMAEGKKLNVYTDSRYAFATAHVHGEIYRRRGWLTSEGREIKNKNEILALLKALFLPKRLSIIHCPGHQKGNSAEARGNRMADQAAREAAMKAVLETSTLLAGKRTADGSEFEKRTADGSEFESPKKKAKVE

SEQ ID NO: 6696 - protein, 2091 aa, synthetic construct
MPAAKRVKLDGGDKKYSIGLDIGTNSVGWAVITDEYKVPSKKFKVLGNTDRHSIKKNLIGALLFDSGETAEATRLKRTARRRYTRRKNRICYLQEIFSNEMAKVDDSFFHRLEESFLVEEDKKHERHPIFGNIVDEVAYHEKYPTIYHLRKKLVDSTDKADLRLIYLALAHMIKFRGHFLIEGDLNPDNSDVDKLFIQLVQTYNQLFEENPINASGVDAKAILSARLSKSRRLENLIAQLPGEKKNGLFGNLIALSLGLTPNFKSNFDLAEDAKLQLSKDTYDDDLDNLLAQIGDQYADLFLAAKNLSDAILLSDILRVNTEITKAPLSASMIKRYDEHHQDLTLLKALVRQQLPEKYKEIFFDQSKNGYAGYIDGGASQEEFYKFIKPILEKMDGTEELLVKLNREDLLRKQRTFDNGSIPHQIHLGELHAILRRQEDFYPFLKDNREKIEKILTFRIPYYVGPLARGNSRFAWMTRKSEETITPWNFEEVVDKGASAQSFIERMTNFDKNLPNEKVLPKHSLLYEYFTVYNELTKVKYVTEGMRKPAFLSGEQKKAIVDLLFKTNRKVTVKQLKEDYFKKIECFDSVEISGVEDRFNASLGTYHDLLKIIKDKDFLDNEENEDILEDIVLTLTLFEDREMIEERLKTYAHLFDDKVMKQLKRRRYTGWGRLSRKLINGIRDKQSGKTILDFLKSDGFANRNFMQLIHDDSLTFKEDIQKAQVSGQGDSLHEHIANLAGSPAIKKGILQTVKVVDELVKVMGRHKPENIVIEMARENQTTQKGQKNSRERMKRIEEGIKELGSQILKEHPVENTQLQNEKLYLYYLQNGRDMYVDQELDINRLSDYDVDHIVPQSFLKDDSIDNKVLTRSDKARGKSDNVPSEEVVKKMKNYWRQLLNAKLITQRKFDNLTKAERGGLSELDKAGFIKRQLVETRQITKHVAQILDSRMNTKYDENDKLIREVKVITLKSKLVSDFRKDFQFYKVREINNYHHAHDAYLNAVVGTALIKKYPKLESEFVYGDYKVYDVRKMIAKSEQEIGKATAKYFFYSNIMNFFKTEITLANGEIRKRPLIETNGETGEIVWDKGRDFATVRKVLSMPQVNIVKKTEVQTGGFSKESILPKRNSDKLIARKKDWDPKKYGGFDSPTVAYSVLVVAKVEKGKSKKLKSVKELLGITIMERSSFEKNPIDFLEAKGYKEVKKDLIIKLPKYSLFELENGRKRMLASAGELQKGNELALPSKYVNFLYLASHYEKLKGSPEDNEQKQLFVEQHKHYLDEIIEQISEFSKRVILADANLDKVLSAYNKHRDKPIREQAENIIHLFTLTNLGAPAAFKYFDTTIDRKRYTSTKEVLDATLIHQSITGLYETRIDLSQLGGDGGEAAAKGGGGGVLNLEEEYRLHEKPVPSSIDPSWLQLFPTVWAERAGMGLANQVPPVVVELRSGASPVAVRQYPMSKEAREGIRPHIQKFLDLGVLVPCRSPWNTPLLPVKKPGTNDYRPVQDLREINKRVQDIHPTVPNPYNLLSSLPPSYTWYSVLDLKDAFFCLRLHPNSQPLFAFEWKDPEKGNTGQLTWTRLPQGFKNSPTLFNEALHRDLAPFRALNPQVVLLQYVDDLLVAAPTYEDCKKGTQKLLQELSKLGYRVSAKKAQLCQREVTYLGYLLKEGKRWLTPARKATVMKIPVPTTPRQVREFLGTAGFCRLWIPGFASLAAPLYPLTKPSIPFIWTEEHQQAFDHIKKALLSAPALALPDLTKPFTLYIDERAGVARGVLTQTLGPWRRPVAYLSKKLDPVASGWPTCLKAVAAVALLLKDADKLTLGQNVTVIASHSLESIVRQPPDRWMTNARMTHYQSLLLNERVSFAPPAVLNPATLLPVESEATPVHRCSEILAEETGTRRDLEDQPLPGVPTWYTDGSSFITEGKRRAGAPIVDGKRTVWASSLPEGTSAQKAELVALTQALRLAEGKNINIYTDSRYAFATAHIHGAIYKQRGWLTSAGKDIKNKEEILALLEAIHLPRRVAIIHCPGHQRGSNPVATGNRRADEAAKQAALSTRVLAGTTKPAGKRTADGSEFEKRTADGSEFESPKKKAKVE

SEQ ID NO: 6697 - protein, 2091 aa, synthetic construct
MPAAKRVKLDGGDKKYSIGLDIGTNSVGWAVITDEYKVPSKKFKVLGNTDRHSIKKNLIGALLFDSGETAEATRLKRTARRRYTRRKNRICYLQEIFSNEMAKVDDSFFHRLEESFLVEEDKKHERHPIFGNIVDEVAYHEKYPTIYHLRKKLVDSTDKADLRLIYLALAHMIKFRGHFLIEGDLNPDNSDVDKLFIQLVQTYNQLFEENPINASGVDAKAILSARLSKSRRLENLIAQLPGEKKNGLFGNLIALSLGLTPNFKSNFDLAEDAKLQLSKDTYDDDLDNLLAQIGDQYADLFLAAKNLSDAILLSDILRVNTEITKAPLSASMIKRYDEHHQDLTLLKALVRQQLPEKYKEIFFDQSKNGYAGYIDGGASQEEFYKFIKPILEKMDGTEELLVKLNREDLLRKQRTFDNGSIPHQIHLGELHAILRRQEDFYPFLKDNREKIEKILTFRIPYYVGPLARGNSRFAWMTRKSEETITPWNFEEVVDKGASAQSFIERMTNFDKNLPNEKVLPKHSLLYEYFTVYNELTKVKYVTEGMRKPAFLSGEQKKAIVDLLFKTNRKVTVKQLKEDYFKKIECFDSVEISGVEDRFNASLGTYHDLLKIIKDKDFLDNEENEDILEDIVLTLTLFEDREMIEERLKTYAHLFDDKVMKQLKRRRYTGWGRLSRKLINGIRDKQSGKTILDFLKSDGFANRNFMQLIHDDSLTFKEDIQKAQVSGQGDSLHEHIANLAGSPAIKKGILQTVKVVDELVKVMGRHKPENIVIEMARENQTTQKGQKNSRERMKRIEEGIKELGSQILKEHPVENTQLQNEKLYLYYLQNGRDMYVDQELDINRLSDYDVDHIVPQSFLKDDSIDNKVLTRSDKARGKSDNVPSEEVVKKMKNYWRQLLNAKLITQRKFDNLTKAERGGLSELDKAGFIKRQLVETRQITKHVAQILDSRMNTKYDENDKLIREVKVITLKSKLVSDFRKDFQFYKVREINNYHHAHDAYLNAVVGTALIKKYPKLESEFVYGDYKVYDVRKMIAKSEQEIGKATAKYFFYSNIMNFFKTEITLANGEIRKRPLIETNGETGEIVWDKGRDFATVRKVLSMPQVNIVKKTEVQTGGFSKESILPKRNSDKLIARKKDWDPKKYGGFDSPTVAYSVLVVAKVEKGKSKKLKSVKELLGITIMERSSFEKNPIDFLEAKGYKEVKKDLIIKLPKYSLFELENGRKRMLASAGELQKGNELALPSKYVNFLYLASHYEKLKGSPEDNEQKQLFVEQHKHYLDEIIEQISEFSKRVILADANLDKVLSAYNKHRDKPIREQAENIIHLFTLTNLGAPAAFKYFDTTIDRKRYTSTKEVLDATLIHQSITGLYETRIDLSQLGGDGGEAAAKGGGGGVLNLEEEYRLHEKPVPSSIDPSWLQLFPTVWAERAGMGLANQVPPVVVELRSGASPVAVRQYPMSKEAREGIRPHIQKFLDLGVLVPCRSPWNTPLLPVKKPGTNDYRPVQDLREINKRVQDIHPTVPNPYNLLSSLPPSYTWYSVLDLKDAFFCLRLHPNSQPLFAFEWKDPEKGNTGQLTWTRLPQGFKNSPTLFNEALHRDLAPFRALNPQVVLLQYVDDLLVAAPTYEDCKKGTQKLLQELSKLGYRVSAKKAQLCQREVTYLGYLLKEGKRWLTPARKATVMKIPVPTTPRQVREFLGKAGFCRLFIPGFASLAAPLYPLTKPSIPFIWTEEHQQAFDHIKKALLSAPALALPDLTKPFTLYIDERAGVARGVLTQTLGPWRRPVAYLSKKLDPVASGWPTCLKAVAAVALLLKDADKLTLGQNVTVIASHSLESIVRQPPDRWMTNARMTHYQSLLLNERVSFAPPAVLNPATLLPVESEATPVHRCSEILAEETGTRRDLEDQPLPGVPTWYTDGSSFITEGKRRAGAPIVDGKRTVWASSLPEGTSAQKAELVALTQALRLAEGKNINIYTDSRYAFATAHIHGAIYKQRGWLTSAGKDIKNKEEILALLEAIHLPRRVAIIHCPGHQRGSNPVATGNRRADEAAKQAALSTRVLAGTTKPAGKRTADGSEFEKRTADGSEFESPKKKAKVE

SEQ ID NO: 6698 - protein, 2124 aa, synthetic construct
MPAAKRVKLDGGDKKYSIGLDIGTNSVGWAVITDEYKVPSKKFKVLGNTDRHSIKKNLIGALLFDSGETAEATRLKRTARRRYTRRKNRICYLQEIFSNEMAKVDDSFFHRLEESFLVEEDKKHERHPIFGNIVDEVAYHEKYPTIYHLRKKLVDSTDKADLRLIYLALAHMIKFRGHFLIEGDLNPDNSDVDKLFIQLVQTYNQLFEENPINASGVDAKAILSARLSKSRRLENLIAQLPGEKKNGLFGNLIALSLGLTPNFKSNFDLAEDAKLQLSKDTYDDDLDNLLAQIGDQYADLFLAAKNLSDAILLSDILRVNTEITKAPLSASMIKRYDEHHQDLTLLKALVRQQLPEKYKEIFFDQSKNGYAGYIDGGASQEEFYKFIKPILEKMDGTEELLVKLNREDLLRKQRTFDNGSIPHQIHLGELHAILRRQEDFYPFLKDNREKIEKILTFRIPYYVGPLARGNSRFAWMTRKSEETITPWNFEEVVDKGASAQSFIERMTNFDKNLPNEKVLPKHSLLYEYFTVYNELTKVKYVTEGMRKPAFLSGEQKKAIVDLLFKTNRKVTVKQLKEDYFKKIECFDSVEISGVEDRFNASLGTYHDLLKIIKDKDFLDNEENEDILEDIVLTLTLFEDREMIEERLKTYAHLFDDKVMKQLKRRRYTGWGRLSRKLINGIRDKQSGKTILDFLKSDGFANRNFMQLIHDDSLTFKEDIQKAQVSGQGDSLHEHIANLAGSPAIKKGILQTVKVVDELVKVMGRHKPENIVIEMARENQTTQKGQKNSRERMKRIEEGIKELGSQILKEHPVENTQLQNEKLYLYYLQNGRDMYVDQELDINRLSDYDVDHIVPQSFLKDDSIDNKVLTRSDKARGKSDNVPSEEVVKKMKNYWRQLLNAKLITQRKFDNLTKAERGGLSELDKAGFIKRQLVETRQITKHVAQILDSRMNTKYDENDKLIREVKVITLKSKLVSDFRKDFQFYKVREINNYHHAHDAYLNAVVGTALIKKYPKLESEFVYGDYKVYDVRKMIAKSEQEIGKATAKYFFYSNIMNFFKTEITLANGEIRKRPLIETNGETGEIVWDKGRDFATVRKVLSMPQVNIVKKTEVQTGGFSKESILPKRNSDKLIARKKDWDPKKYGGFDSPTVAYSVLVVAKVEKGKSKKLKSVKELLGITIMERSSFEKNPIDFLEAKGYKEVKKDLIIKLPKYSLFELENGRKRMLASAGELQKGNELALPSKYVNFLYLASHYEKLKGSPEDNEQKQLFVEQHKHYLDEIIEQISEFSKRVILADANLDKVLSAYNKHRDKPIREQAENIIHLFTLTNLGAPAAFKYFDTTIDRKRYTSTKEVLDATLIHQSITGLYETRIDLSQLGGDGGEAAAKGGGGGLLGRDLLTKLKAQIQFSTEGPQVTWEDRPAMCLVLNLEEEYRLHEKPVPPSIDPSWLQLFPMVWAEKAGMGLANQVPPVVVELKSDASPVAVRQYPMSKEAREGIRPHIQRFLDLGILVPCQSPWNTPLLPVKKPGTNDYRPVQDLREVNKRVQDIHPTVPNPYNLLSSLPPSHTWYSVLDLKDAFFCLKLHPNSQPLFAFEWRDPEKGNTGQLTWTRLPQGFKNSPTLFNEALHRDLASFRALNPQVVMLQYVDDLLVAAPTYRDCKEGTRRLLQELSKLGYRVSAKKAQLCREEVTYLGYLLKGGKRWLTPARKATVMKIPTPTTPRQVREFLGTAGFCRLWIPGFASLAAPLYPLTRPKVPFTWTEAHQEAFGRIKEALLSAPALALPDLTKPFALYVDEKEGVARGVLTQTLGPWRRPVAYLSKKLDPVASGWPTCLKAIAAVALLLKDADKLTLGQNVLVIAPHNLESIVRQPPDRWMTNARMTHYQSLLLNERVSFAPPAILNPATLLPVESDDTPIHICSEILAEETGTRPDLRDQPLPGVPAWYTDGSSFIMDGRRQAGAAIVDNKRTVWASNLPEGTSAQKAELIALTQALRLAEGKSINIYTDSRYAFATAHVHGAIYKQRGWLTSAGKDIKNKEEILALLEAIHLPKRVAIIHCPGHQRGTDPVATGNRKADEAAKQAAQSTRILTETTKNAGKRTADGSEFEKRTADGSEFESPKKKAKVE

SEQ ID NO: 6699 - protein, 2093 aa, synthetic construct
MPAAKRVKLDGGDKKYSIGLDIGTNSVGWAVITDEYKVPSKKFKVLGNTDRHSIKKNLIGALLFDSGETAEATRLKRTARRRYTRRKNRICYLQEIFSNEMAKVDDSFFHRLEESFLVEEDKKHERHPIFGNIVDEVAYHEKYPTIYHLRKKLVDSTDKADLRLIYLALAHMIKFRGHFLIEGDLNPDNSDVDKLFIQLVQTYNQLFEENPINASGVDAKAILSARLSKSRRLENLIAQLPGEKKNGLFGNLIALSLGLTPNFKSNFDLAEDAKLQLSKDTYDDDLDNLLAQIGDQYADLFLAAKNLSDAILLSDILRVNTEITKAPLSASMIKRYDEHHQDLTLLKALVRQQLPEKYKEIFFDQSKNGYAGYIDGGASQEEFYKFIKPILEKMDGTEELLVKLNREDLLRKQRTFDNGSIPHQIHLGELHAILRRQEDFYPFLKDNREKIEKILTFRIPYYVGPLARGNSRFAWMTRKSEETITPWNFEEVVDKGASAQSFIERMTNFDKNLPNEKVLPKHSLLYEYFTVYNELTKVKYVTEGMRKPAFLSGEQKKAIVDLLFKTNRKVTVKQLKEDYFKKIECFDSVEISGVEDRFNASLGTYHDLLKIIKDKDFLDNEENEDILEDIVLTLTLFEDREMIEERLKTYAHLFDDKVMKQLKRRRYTGWGRLSRKLINGIRDKQSGKTILDFLKSDGFANRNFMQLIHDDSLTFKEDIQKAQVSGQGDSLHEHIANLAGSPAIKKGILQTVKVVDELVKVMGRHKPENIVIEMARENQTTQKGQKNSRERMKRIEEGIKELGSQILKEHPVENTQLQNEKLYLYYLQNGRDMYVDQELDINRLSDYDVDHIVPQSFLKDDSIDNKVLTRSDKARGKSDNVPSEEVVKKMKNYWRQLLNAKLITQRKFDNLTKAERGGLSELDKAGFIKRQLVETRQITKHVAQILDSRMNTKYDENDKLIREVKVITLKSKLVSDFRKDFQFYKVREINNYHHAHDAYLNAVVGTALIKKYPKLESEFVYGDYKVYDVRKMIAKSEQEIGKATAKYFFYSNIMNFFKTEITLANGEIRKRPLIETNGETGEIVWDKGRDFATVRKVLSMPQVNIVKKTEVQTGGFSKESILPKRNSDKLIARKKDWDPKKYGGFDSPTVAYSVLVVAKVEKGKSKKLKSVKELLGITIMERSSFEKNPIDFLEAKGYKEVKKDLIIKLPKYSLFELENGRKRMLASAGELQKGNELALPSKYVNFLYLASHYEKLKGSPEDNEQKQLFVEQHKHYLDEIIEQISEFSKRVILADANLDKVLSAYNKHRDKPIREQAENIIHLFTLTNLGAPAAFKYFDTTIDRKRYTSTKEVLDATLIHQSITGLYETRIDLSQLGGDGGEAAAKGGGGGTLNIEDEHRLHETSKEPDVSLGSTWLSDFPQAWAETGGMGLAVRQAPLIIPLKATSTPVSIKQYPMSQEARLGIKPHIQRLLDQGILVPCQSPWNTPLLPVKKPGTNDYRPVQDLREVNKRVEDIHPTVPNPYNLLSGLPPSHQWYTVLDLKDAFFCLRLHPTSQPLFAFEWRDPEMGISGQLTWTRLPQGFKNSPTLFDEALHRDLADFRIQHPDLILLQYVDDLLLAATSELDCQQGTRALLQTLGNLGYRASAKKAQICQKQVKYLGYLLKEGQRWLTEARKETVMGQPTPKTPRQLREFLGTAGFCRLWIPGFAEMAAPLYPLTKTGTLFNWGPDQQKAYQEIKQALLTAPALGLPDLTKPFELFVDEKQGYAKGVLTQKLGPWRRPVAYLSKKLDPVAAGWPPCLRMVAAIAVLTKDAGKLTMGQPLVILAPHAVEALVKQPPDRWLSNARMTHYQALLLDTDRVQFGPVVALNPATLLPLPEEGLQHNCLDILAEAHGTRPDLTDQPLPDADHTWYTDGSSLLQEGQRKAGAAVTTETEVIWAKALPAGTSAQRAELIALTQALKMAEGKKLNVYTDSRYAFATAHIHGEIYRRRGLLTSEGKEIKNKDEILALLKALFLPKRLSIIHCPGHQKGHSAEARGNRMADQAARKAAITETPDTSTLLAGKRTADGSEFEKRTADGSEFESPKKKAKVE

SEQ ID NO: 6700 - protein, 2084 aa, synthetic construct
MPAAKRVKLDGGDKKYSIGLDIGTNSVGWAVITDEYKVPSKKFKVLGNTDRHSIKKNLIGALLFDSGETAEATRLKRTARRRYTRRKNRICYLQEIFSNEMAKVDDSFFHRLEESFLVEEDKKHERHPIFGNIVDEVAYHEKYPTIYHLRKKLVDSTDKADLRLIYLALAHMIKFRGHFLIEGDLNPDNSDVDKLFIQLVQTYNQLFEENPINASGVDAKAILSARLSKSRRLENLIAQLPGEKKNGLFGNLIALSLGLTPNFKSNFDLAEDAKLQLSKDTYDDDLDNLLAQIGDQYADLFLAAKNLSDAILLSDILRVNTEITKAPLSASMIKRYDEHHQDLTLLKALVRQQLPEKYKEIFFDQSKNGYAGYIDGGASQEEFYKFIKPILEKMDGTEELLVKLNREDLLRKQRTFDNGSIPHQIHLGELHAILRRQEDFYPFLKDNREKIEKILTFRIPYYVGPLARGNSRFAWMTRKSEETITPWNFEEVVDKGASAQSFIERMTNFDKNLPNEKVLPKHSLLYEYFTVYNELTKVKYVTEGMRKPAFLSGEQKKAIVDLLFKTNRKVTVKQLKEDYFKKIECFDSVEISGVEDRFNASLGTYHDLLKIIKDKDFLDNEENEDILEDIVLTLTLFEDREMIEERLKTYAHLFDDKVMKQLKRRRYTGWGRLSRKLINGIRDKQSGKTILDFLKSDGFANRNFMQLIHDDSLTFKEDIQKAQVSGQGDSLHEHIANLAGSPAIKKGILQTVKVVDELVKVMGRHKPENIVIEMARENQTTQKGQKNSRERMKRIEEGIKELGSQILKEHPVENTQLQNEKLYLYYLQNGRDMYVDQELDINRLSDYDVDHIVPQSFLKDDSIDNKVLTRSDKARGKSDNVPSEEVVKKMKNYWRQLLNAKLITQRKFDNLTKAERGGLSELDKAGFIKRQLVETRQITKHVAQILDSRMNTKYDENDKLIREVKVITLKSKLVSDFRKDFQFYKVREINNYHHAHDAYLNAVVGTALIKKYPKLESEFVYGDYKVYDVRKMIAKSEQEIGKATAKYFFYSNIMNFFKTEITLANGEIRKRPLIETNGETGEIVWDKGRDFATVRKVLSMPQVNIVKKTEVQTGGFSKESILPKRNSDKLIARKKDWDPKKYGGFDSPTVAYSVLVVAKVEKGKSKKLKSVKELLGITIMERSSFEKNPIDFLEAKGYKEVKKDLIIKLPKYSLFELENGRKRMLASAGELQKGNELALPSKYVNFLYLASHYEKLKGSPEDNEQKQLFVEQHKHYLDEIIEQISEFSKRVILADANLDKVLSAYNKHRDKPIREQAENIIHLFTLTNLGAPAAFKYFDTTIDRKRYTSTKEVLDATLIHQSITGLYETRIDLSQLGGDGGEAAAKGGGGGVPWLMKKPLQLTVLVPLHEYQERLLQQTALPKEQKELLQKLFLKYDALWQHWENQVGHRRIKPHNIATGTLAPRPQKQYPINPKAKPSIQIVIDDLLKQGVLIQQNSTMNTPVYPVPKPDGKWRMVLDYREVNKTIPLIAAQNQHSAGILSSIYRGKYKTTLDLTNGFWAHPITPESYWLTAFTWQGKQYCWTRLPQGFLNSPALFTADVVDLLKEIPNVQAYVDDIYISHDDPQEHLEQLEKIFSILLNAGYVVSLKKSEIAQREVEFLGFNITKEGRGLTDTFKQKLLNITPPKDLKQLQSILGLLNFARNFIPNYSELVKPLYTIVANANGKFISWTEDNSNQLQHIISVLNQADNLEERNPETRLIIKVNSSPSAGYIRYYNEGSKRPIMYVNYIFSKAEAKFTQTEKLLTTMHKGLIKAMDLAMGQEILVYSPIVSMTKIQRTPLPERKALPVRWITWMTYLEDPRIQFHYDKSLPELQQIPNVTEDVIAKTKHPSEFAMVFYTDGSAIKHPDVNKSHSAGMGIAQVQFIPEYKIVHQWSIPLGDHTAQLAEIAAVEFACKKALKISGPVLIVTDSFYVAESANKELPYWKSNGFLNNKKKPLRHVSKWKSIAECLQLKPDIIIMHEKGHQQPMTTLHTEGNNLADKLATQGSYVVHAGKRTADGSEFEKRTADGSEFESPKKKAKVE

SEQ ID NO: 6701 - protein, 2173 aa, synthetic construct
MPAAKRVKLDGGDKKYSIGLDIGTNSVGWAVITDEYKVPSKKFKVLGNTDRHSIKKNLIGALLFDSGETAEATRLKRTARRRYTRRKNRICYLQEIFSNEMAKVDDSFFHRLEESFLVEEDKKHERHPIFGNIVDEVAYHEKYPTIYHLRKKLVDSTDKADLRLIYLALAHMIKFRGHFLIEGDLNPDNSDVDKLFIQLVQTYNQLFEENPINASGVDAKAILSARLSKSRRLENLIAQLPGEKKNGLFGNLIALSLGLTPNFKSNFDLAEDAKLQLSKDTYDDDLDNLLAQIGDQYADLFLAAKNLSDAILLSDILRVNTEITKAPLSASMIKRYDEHHQDLTLLKALVRQQLPEKYKEIFFDQSKNGYAGYIDGGASQEEFYKFIKPILEKMDGTEELLVKLNREDLLRKQRTFDNGSIPHQIHLGELHAILRRQEDFYPFLKDNREKIEKILTFRIPYYVGPLARGNSRFAWMTRKSEETITPWNFEEVVDKGASAQSFIERMTNFDKNLPNEKVLPKHSLLYEYFTVYNELTKVKYVTEGMRKPAFLSGEQKKAIVDLLFKTNRKVTVKQLKEDYFKKIECFDSVEISGVEDRFNASLGTYHDLLKIIKDKDFLDNEENEDILEDIVLTLTLFEDREMIEERLKTYAHLFDDKVMKQLKRRRYTGWGRLSRKLINGIRDKQSGKTILDFLKSDGFANRNFMQLIHDDSLTFKEDIQKAQVSGQGDSLHEHIANLAGSPAIKKGILQTVKVVDELVKVMGRHKPENIVIEMARENQTTQKGQKNSRERMKRIEEGIKELGSQILKEHPVENTQLQNEKLYLYYLQNGRDMYVDQELDINRLSDYDVDHIVPQSFLKDDSIDNKVLTRSDKARGKSDNVPSEEVVKKMKNYWRQLLNAKLITQRKFDNLTKAERGGLSELDKAGFIKRQLVETRQITKHVAQILDSRMNTKYDENDKLIREVKVITLKSKLVSDFRKDFQFYKVREINNYHHAHDAYLNAVVGTALIKKYPKLESEFVYGDYKVYDVRKMIAKSEQEIGKATAKYFFYSNIMNFFKTEITLANGEIRKRPLIETNGETGEIVWDKGRDFATVRKVLSMPQVNIVKKTEVQTGGFSKESILPKRNSDKLIARKKDWDPKKYGGFDSPTVAYSVLVVAKVEKGKSKKLKSVKELLGITIMERSSFEKNPIDFLEAKGYKEVKKDLIIKLPKYSLFELENGRKRMLASAGELQKGNELALPSKYVNFLYLASHYEKLKGSPEDNEQKQLFVEQHKHYLDEIIEQISEFSKRVILADANLDKVLSAYNKHRDKPIREQAENIIHLFTLTNLGAPAAFKYFDTTIDRKRYTSTKEVLDATLIHQSITGLYETRIDLSQLGGDGGEAAAKGGGGGMDPLQLLQPLEAEIKGTKLKAHWNSGATITCVPQAFLEEEVPIKNIWIKTIHGEKEQPVYYLTFKIQGRKVEAEVISSPYDYILVSPSDIPWLMKKPLQLTTLVPLQEYEERLLKQTMLTGSYKEKLQSLFLKYDALWQHWENQVGHRRIKPHHIATGTVNPRPQKQYPINPKAKASIQTVINDLLKQGVLIQQNSIMNTPVYPVPKPDGKWRMVLDYREVNKTIPLIAAQNQHSAGILSSIFRGKYKTTLDLSNGFWAHSITPESYWLTAFTWLGQQYCWTRLPQGFLNSPALFNADVVDLLKEVPNVQVYVDDIYISHDDPREHLEQLEKVFSLLLNAGYVVSLKKSEIAQHEVEFLGFNITKEGRGLTETFKQKLLNITPPRDLKQLQSILGKLNFARNFIPNFSELVKPLYNIIATAPGKYITWTTDNSQQLQNIISMLNSAENLEERNPEVRLIMKVNTSPSAGYIRFYNEFAKRPIMYLNYVYTKAEVKFTNTEKLLTTIHKGLIKALDLGMGQEILVYSPIVSMTKIQKTPLPERKALPIRWITWMSYLEDPRIQFHYDKTLPELQQVPTVTDDIIAKIKHPSEFSMVFYTDGSAIKHPNVNKSHNAGMGIAQVQFKPEFTVINTWSIPLGDHTAQLAEVAAVEFACKKALKIDGPVLIVTDSFYVAESVNKELPYWQSNGFFNNKKKPLKHVSKWKSIADCIQLKPDIIIIHEKGHQPTASTFHTEGNNLADKLATQGSYVVNAGKRTADGSEFEKRTADGSEFESPKKKAKVE

SEQ ID NO: 6702 - protein, 2091 aa, synthetic construct
MPAAKRVKLDGGDKKYSIGLDIGTNSVGWAVITDEYKVPSKKFKVLGNTDRHSIKKNLIGALLFDSGETAEATRLKRTARRRYTRRKNRICYLQEIFSNEMAKVDDSFFHRLEESFLVEEDKKHERHPIFGNIVDEVAYHEKYPTIYHLRKKLVDSTDKADLRLIYLALAHMIKFRGHFLIEGDLNPDNSDVDKLFIQLVQTYNQLFEENPINASGVDAKAILSARLSKSRRLENLIAQLPGEKKNGLFGNLIALSLGLTPNFKSNFDLAEDAKLQLSKDTYDDDLDNLLAQIGDQYADLFLAAKNLSDAILLSDILRVNTEITKAPLSASMIKRYDEHHQDLTLLKALVRQQLPEKYKEIFFDQSKNGYAGYIDGGASQEEFYKFIKPILEKMDGTEELLVKLNREDLLRKQRTFDNGSIPHQIHLGELHAILRRQEDFYPFLKDNREKIEKILTFRIPYYVGPLARGNSRFAWMTRKSEETITPWNFEEVVDKGASAQSFIERMTNFDKNLPNEKVLPKHSLLYEYFTVYNELTKVKYVTEGMRKPAFLSGEQKKAIVDLLFKTNRKVTVKQLKEDYFKKIECFDSVEISGVEDRFNASLGTYHDLLKIIKDKDFLDNEENEDILEDIVLTLTLFEDREMIEERLKTYAHLFDDKVMKQLKRRRYTGWGRLSRKLINGIRDKQSGKTILDFLKSDGFANRNFMQLIHDDSLTFKEDIQKAQVSGQGDSLHEHIANLAGSPAIKKGILQTVKVVDELVKVMGRHKPENIVIEMARENQTTQKGQKNSRERMKRIEEGIKELGSQILKEHPVENTQLQNEKLYLYYLQNGRDMYVDQELDINRLSDYDVDHIVPQSFLKDDSIDNKVLTRSDKARGKSDNVPSEEVVKKMKNYWRQLLNAKLITQRKFDNLTKAERGGLSELDKAGFIKRQLVETRQITKHVAQILDSRMNTKYDENDKLIREVKVITLKSKLVSDFRKDFQFYKVREINNYHHAHDAYLNAVVGTALIKKYPKLESEFVYGDYKVYDVRKMIAKSEQEIGKATAKYFFYSNIMNFFKTEITLANGEIRKRPLIETNGETGEIVWDKGRDFATVRKVLSMPQVNIVKKTEVQTGGFSKESILPKRNSDKLIARKKDWDPKKYGGFDSPTVAYSVLVVAKVEKGKSKKLKSVKELLGITIMERSSFEKNPIDFLEAKGYKEVKKDLIIKLPKYSLFELENGRKRMLASAGELQKGNELALPSKYVNFLYLASHYEKLKGSPEDNEQKQLFVEQHKHYLDEIIEQISEFSKRVILADANLDKVLSAYNKHRDKPIREQAENIIHLFTLTNLGAPAAFKYFDTTIDRKRYTSTKEVLDATLIHQSITGLYETRIDLSQLGGDGGEAAAKGGGGGVLNLEEEYRLHEKPVPSSIDPSWLQLFPTVWAERAGMGLANQVPPVVVELRSGASPVAVRQYPMSKEAREGIRPHIQRFLDLGVLVPCQSPWNTPLLPVKKPGTNDYRPVQDLREINKRVQDIHPTVPNPYNLLSSLPPSHTWYSVLDLKDAFFCLKLHPNSQPLFAFEWRDPEKGNTGQLTWTRLPQGFKNSPTLFDEALHRDLAPFRALNPQVVLLQYVDDLLVAAPTYRDCKEGTQKLLQELSKLGYRVSAKKAQLCQKEVTYLGYLLKEGKRWLTPARKATVMKIPPPTTPRQVREFLGTAGFCRLWIPGFASLAAPLYPLTKESIPFIWTEEHQKAFDRIKEALLSAPALALPDLTKPFTLYVDERAGVARGVLTQTLGPWRRPVAYLSKKLDPVASGWPTCLKAVAAVALLLKDADKLTLGQNVTVIASHSLESIVRQPPDRWMTNARMTHYQSLLLNERVSFAPPAVLNPATLLPVESEATPVHRCSEILAEETGTRRDLKDQPLPGVPAWYTDGSSFIAEGKRRAGAAIVDGKRTVWASSLPEGTSAQKAELVALTQALRLAEGKDINIYTDSRYAFATAHIHGAIYKQRGLLTSAGKDIKNKEEILALLEAIHLPKRVAIIHCPGHQKGNDPVATGNRRADEAAKQAALSTRVLAETTKPAGKRTADGSEFEKRTADGSEFESPKKKAKVE

SEQ ID NO: 6703 - protein, 2093 aa, synthetic construct
MPAAKRVKLDGGDKKYSIGLDIGTNSVGWAVITDEYKVPSKKFKVLGNTDRHSIKKNLIGALLFDSGETAEATRLKRTARRRYTRRKNRICYLQEIFSNEMAKVDDSFFHRLEESFLVEEDKKHERHPIFGNIVDEVAYHEKYPTIYHLRKKLVDSTDKADLRLIYLALAHMIKFRGHFLIEGDLNPDNSDVDKLFIQLVQTYNQLFEENPINASGVDAKAILSARLSKSRRLENLIAQLPGEKKNGLFGNLIALSLGLTPNFKSNFDLAEDAKLQLSKDTYDDDLDNLLAQIGDQYADLFLAAKNLSDAILLSDILRVNTEITKAPLSASMIKRYDEHHQDLTLLKALVRQQLPEKYKEIFFDQSKNGYAGYIDGGASQEEFYKFIKPILEKMDGTEELLVKLNREDLLRKQRTFDNGSIPHQIHLGELHAILRRQEDFYPFLKDNREKIEKILTFRIPYYVGPLARGNSRFAWMTRKSEETITPWNFEEVVDKGASAQSFIERMTNFDKNLPNEKVLPKHSLLYEYFTVYNELTKVKYVTEGMRKPAFLSGEQKKAIVDLLFKTNRKVTVKQLKEDYFKKIECFDSVEISGVEDRFNASLGTYHDLLKIIKDKDFLDNEENEDILEDIVLTLTLFEDREMIEERLKTYAHLFDDKVMKQLKRRRYTGWGRLSRKLINGIRDKQSGKTILDFLKSDGFANRNFMQLIHDDSLTFKEDIQKAQVSGQGDSLHEHIANLAGSPAIKKGILQTVKVVDELVKVMGRHKPENIVIEMARENQTTQKGQKNSRERMKRIEEGIKELGSQILKEHPVENTQLQNEKLYLYYLQNGRDMYVDQELDINRLSDYDVDHIVPQSFLKDDSIDNKVLTRSDKARGKSDNVPSEEVVKKMKNYWRQLLNAKLITQRKFDNLTKAERGGLSELDKAGFIKRQLVETRQITKHVAQILDSRMNTKYDENDKLIREVKVITLKSKLVSDFRKDFQFYKVREINNYHHAHDAYLNAVVGTALIKKYPKLESEFVYGDYKVYDVRKMIAKSEQEIGKATAKYFFYSNIMNFFKTEITLANGEIRKRPLIETNGETGEIVWDKGRDFATVRKVLSMPQVNIVKKTEVQTGGFSKESILPKRNSDKLIARKKDWDPKKYGGFDSPTVAYSVLVVAKVEKGKSKKLKSVKELLGITIMERSSFEKNPIDFLEAKGYKEVKKDLIIKLPKYSLFELENGRKRMLASAGELQKGNELALPSKYVNFLYLASHYEKLKGSPEDNEQKQLFVEQHKHYLDEIIEQISEFSKRVILADANLDKVLSAYNKHRDKPIREQAENIIHLFTLTNLGAPAAFKYFDTTIDRKRYTSTKEVLDATLIHQSITGLYETRIDLSQLGGDGGGGGPAPGGTAPLEEEYRLFLEAPIQNVTLLEQWKREIPKVWAEINPPGLASTQAPIHVQLLSTALPVRVRQYPITLEAKRSLRETIRKFRAAGILRPVHSPWNTPLLPVRKSGTSEYRMVQDLREVNKRVETIHPTVPNPYTLLSLLPPDRIWYSVLDLKDAFFCIPLAPESQLIFAFEWADAEEGESGQLTWTRLPQGFKNSPTLFNEALNRDLQGFRLDHPSVSLLQYVDDLLIAADTQAACLSATRDLLMTLAELGYRVSGKKAQLCQEEVTYLGFKIHKGSRSLSNSRTQAILQIPVPKTKRQVREFLGTIGYCRLWIPGFAELAQPLYAATRPGNDPLVWGEKEEEAFQSLKLALTQPPALALPSLDKPFQLFVEETSGAAKGVLTQALGPWKRPVAYLSKRLDPVAAGWPRCLRAIAAAALLTREASKLTFGQDIEITSSHNLESLLRSPPDKWLTNARITQYQVLLLDPPRVRFKQTAALNPATLLPETDDTLPIHHCLDTLDSLTSTRPDLTDQPLAQAEATLFTDGSSYIRDGKRYAGAAVVTLDSVIWAEPLPIGTSAQKAELIALTKALEWSKDKSVNIYTDSRYAFATLHVHGMIYRERGWLTAGGKAIKNAPEILALLTAVWLPKRVAVMHCKGHQKDDAPTSTGNRRADEVAREVAIRPLSTQATISAGKRTADGSEFEKRTADGSEFESPKKKAKVE

SEQ ID NO: 6704 - protein, 2082 aa, synthetic construct
MPAAKRVKLDGGDKKYSIGLDIGTNSVGWAVITDEYKVPSKKFKVLGNTDRHSIKKNLIGALLFDSGETAEATRLKRTARRRYTRRKNRICYLQEIFSNEMAKVDDSFFHRLEESFLVEEDKKHERHPIFGNIVDEVAYHEKYPTIYHLRKKLVDSTDKADLRLIYLALAHMIKFRGHFLIEGDLNPDNSDVDKLFIQLVQTYNQLFEENPINASGVDAKAILSARLSKSRRLENLIAQLPGEKKNGLFGNLIALSLGLTPNFKSNFDLAEDAKLQLSKDTYDDDLDNLLAQIGDQYADLFLAAKNLSDAILLSDILRVNTEITKAPLSASMIKRYDEHHQDLTLLKALVRQQLPEKYKEIFFDQSKNGYAGYIDGGASQEEFYKFIKPILEKMDGTEELLVKLNREDLLRKQRTFDNGSIPHQIHLGELHAILRRQEDFYPFLKDNREKIEKILTFRIPYYVGPLARGNSRFAWMTRKSEETITPWNFEEVVDKGASAQSFIERMTNFDKNLPNEKVLPKHSLLYEYFTVYNELTKVKYVTEGMRKPAFLSGEQKKAIVDLLFKTNRKVTVKQLKEDYFKKIECFDSVEISGVEDRFNASLGTYHDLLKIIKDKDFLDNEENEDILEDIVLTLTLFEDREMIEERLKTYAHLFDDKVMKQLKRRRYTGWGRLSRKLINGIRDKQSGKTILDFLKSDGFANRNFMQLIHDDSLTFKEDIQKAQVSGQGDSLHEHIANLAGSPAIKKGILQTVKVVDELVKVMGRHKPENIVIEMARENQTTQKGQKNSRERMKRIEEGIKELGSQILKEHPVENTQLQNEKLYLYYLQNGRDMYVDQELDINRLSDYDVDHIVPQSFLKDDSIDNKVLTRSDKARGKSDNVPSEEVVKKMKNYWRQLLNAKLITQRKFDNLTKAERGGLSELDKAGFIKRQLVETRQITKHVAQILDSRMNTKYDENDKLIREVKVITLKSKLVSDFRKDFQFYKVREINNYHHAHDAYLNAVVGTALIKKYPKLESEFVYGDYKVYDVRKMIAKSEQEIGKATAKYFFYSNIMNFFKTEITLANGEIRKRPLIETNGETGEIVWDKGRDFATVRKVLSMPQVNIVKKTEVQTGGFSKESILPKRNSDKLIARKKDWDPKKYGGFDSPTVAYSVLVVAKVEKGKSKKLKSVKELLGITIMERSSFEKNPIDFLEAKGYKEVKKDLIIKLPKYSLFELENGRKRMLASAGELQKGNELALPSKYVNFLYLASHYEKLKGSPEDNEQKQLFVEQHKHYLDEIIEQISEFSKRVILADANLDKVLSAYNKHRDKPIREQAENIIHLFTLTNLGAPAAFKYFDTTIDRKRYTSTKEVLDATLIHQSITGLYETRIDLSQLGGDGGGGGPAPGGVPWILKKPLELTIKLDLEEQQGTLLNNSILSKKGKEELKQLFEKYSALWQSWENQVGHRRIRPHKIATGTVKPTPQKQYHINPKAKPDIQIVINDLLKQGVLIQKESTMNTPVYPVPKPNGRWRMVLDYRAVNKVTPLIAVQNQHSYGILGSLFKGRYKTTIDLSNGFWAHPIVPEDYWITAFTWQGKQYCWTVLPQGFLNSPGLFTGDVVDLLQGIPNVEVYVDDVYISHDSEKEHLEYLDILFNRLKEAGYIISLKKSNIANSIVDFLGFQITNEGRGLTDTFKEKLENITAPTTLKQLQSILGLLNFARNFIPDFTELIAPLYALIPKSTKNYVPWQIEHSTTLETLITKLNGAEYLQGRKGDKTLIMKVNASYTTGYIRYYNEGEKKPISYVSIVFSKTELKFTELEKLLTTVHKGLLKALDLSMGQNIHVYSPIVSMQNIQKTPQTAKKALASRWLSWLSYLEDPRIRFFYDPQMPALKDLPAVDTGKDNKKHPSNFQHIFYTDGSAITSPTKEGHLNAGMGIVYFINKDGNLQKQQEWSISLGNHTAQFAEIAAFEFALKKCLPLGGNILVVTDSNYVAKAYNEELDVWASNGFVNNRKKPLKHISKWKSVADLKRLRPDVVVTHEPGHQKLDSSPHAYGNNLADQLATQASFKVHAGKRTADGSEFEKRTADGSEFESPKKKAKVE

SEQ ID NO: 6705 - protein, 2213 aa, synthetic construct
MPAAKRVKLDGGDKKYSIGLDIGTNSVGWAVITDEYKVPSKKFKVLGNTDRHSIKKNLIGALLFDSGETAEATRLKRTARRRYTRRKNRICYLQEIFSNEMAKVDDSFFHRLEESFLVEEDKKHERHPIFGNIVDEVAYHEKYPTIYHLRKKLVDSTDKADLRLIYLALAHMIKFRGHFLIEGDLNPDNSDVDKLFIQLVQTYNQLFEENPINASGVDAKAILSARLSKSRRLENLIAQLPGEKKNGLFGNLIALSLGLTPNFKSNFDLAEDAKLQLSKDTYDDDLDNLLAQIGDQYADLFLAAKNLSDAILLSDILRVNTEITKAPLSASMIKRYDEHHQDLTLLKALVRQQLPEKYKEIFFDQSKNGYAGYIDGGASQEEFYKFIKPILEKMDGTEELLVKLNREDLLRKQRTFDNGSIPHQIHLGELHAILRRQEDFYPFLKDNREKIEKILTFRIPYYVGPLARGNSRFAWMTRKSEETITPWNFEEVVDKGASAQSFIERMTNFDKNLPNEKVLPKHSLLYEYFTVYNELTKVKYVTEGMRKPAFLSGEQKKAIVDLLFKTNRKVTVKQLKEDYFKKIECFDSVEISGVEDRFNASLGTYHDLLKIIKDKDFLDNEENEDILEDIVLTLTLFEDREMIEERLKTYAHLFDDKVMKQLKRRRYTGWGRLSRKLINGIRDKQSGKTILDFLKSDGFANRNFMQLIHDDSLTFKEDIQKAQVSGQGDSLHEHIANLAGSPAIKKGILQTVKVVDELVKVMGRHKPENIVIEMARENQTTQKGQKNSRERMKRIEEGIKELGSQILKEHPVENTQLQNEKLYLYYLQNGRDMYVDQELDINRLSDYDVDHIVPQSFLKDDSIDNKVLTRSDKARGKSDNVPSEEVVKKMKNYWRQLLNAKLITQRKFDNLTKAERGGLSELDKAGFIKRQLVETRQITKHVAQILDSRMNTKYDENDKLIREVKVITLKSKLVSDFRKDFQFYKVREINNYHHAHDAYLNAVVGTALIKKYPKLESEFVYGDYKVYDVRKMIAKSEQEIGKATAKYFFYSNIMNFFKTEITLANGEIRKRPLIETNGETGEIVWDKGRDFATVRKVLSMPQVNIVKKTEVQTGGFSKESILPKRNSDKLIARKKDWDPKKYGGFDSPTVAYSVLVVAKVEKGKSKKLKSVKELLGITIMERSSFEKNPIDFLEAKGYKEVKKDLIIKLPKYSLFELENGRKRMLASAGELQKGNELALPSKYVNFLYLASHYEKLKGSPEDNEQKQLFVEQHKHYLDEIIEQISEFSKRVILADANLDKVLSAYNKHRDKPIREQAENIIHLFTLTNLGAPAAFKYFDTTIDRKRYTSTKEVLDATLIHQSITGLYETRIDLSQLGGDGGGGGPAPGGTLGDQGSRGSDPLPEPRVTLTVEGIPTEFLVNTGAEHSVLTKPMGKMGSKRTVVAGATGSKVYPWTTKRLLKIGQKQVTHSFLVIPECPAPLLGRDLLTKLKAQIQFSTEGPQVTWEDRPAMCLVLNLEEEYRLHEKPVPPSIDPSWLQLFPMVWAEKAGMGLANQVPPVVVELKSDASPVAVRQYPMSKEAREGIRPHIQRFLDLGILVPCQSPWNTPLLPVKKPGTNDYRPVQDLREVNKRVQDIHPTVPNPYNLLSSLPPSHTWYSVLDLKDAFFCLKLHPNSQPLFAFEWRDPEKGNTGQLTWTRLPQGFKNSPTLFNEALHRDLASFRALNPQVVMLQYVDDLLVAAPTYRDCKEGTRRLLQELSKLGYRVSAKKAQLCREEVTYLGYLLKGGKRWLTPARKATVMKIPTPTTPRQVREFLGTAGFCRLWIPGFASLAAPLYPLTRPKVPFTWTEAHQEAFGRIKEALLSAPALALPDLTKPFALYVDEKEGVARGVLTQTLGPWRRPVAYLSKKLDPVASGWPTCLKAIAAVALLLKDADKLTLGQNVLVIAPHNLESIVRQPPDRWMTNARMTHYQSLLLNERVSFAPPAILNPATLLPVESDDTPIHICSEILAEETGTRPDLRDQPLPGVPAWYTDGSSFIMDGRRQAGAAIVDNKRTVWASNLPEGTSAQKAELIALTQALRLAEGKSINIYTDSRYAFATAHVHGAIYKQRGWLTSAGKDIKNKEEILALLEAIHLPKRVAIIHCPGHQRGTDPVATGNRKADEAAKQAAQSTRILTETTKNAGKRTADGSEFEKRTADGSEFESPKKKAKVE

SEQ ID NO: 6706 - protein, 2091 aa, synthetic construct
MPAAKRVKLDGGDKKYSIGLDIGTNSVGWAVITDEYKVPSKKFKVLGNTDRHSIKKNLIGALLFDSGETAEATRLKRTARRRYTRRKNRICYLQEIFSNEMAKVDDSFFHRLEESFLVEEDKKHERHPIFGNIVDEVAYHEKYPTIYHLRKKLVDSTDKADLRLIYLALAHMIKFRGHFLIEGDLNPDNSDVDKLFIQLVQTYNQLFEENPINASGVDAKAILSARLSKSRRLENLIAQLPGEKKNGLFGNLIALSLGLTPNFKSNFDLAEDAKLQLSKDTYDDDLDNLLAQIGDQYADLFLAAKNLSDAILLSDILRVNTEITKAPLSASMIKRYDEHHQDLTLLKALVRQQLPEKYKEIFFDQSKNGYAGYIDGGASQEEFYKFIKPILEKMDGTEELLVKLNREDLLRKQRTFDNGSIPHQIHLGELHAILRRQEDFYPFLKDNREKIEKILTFRIPYYVGPLARGNSRFAWMTRKSEETITPWNFEEVVDKGASAQSFIERMTNFDKNLPNEKVLPKHSLLYEYFTVYNELTKVKYVTEGMRKPAFLSGEQKKAIVDLLFKTNRKVTVKQLKEDYFKKIECFDSVEISGVEDRFNASLGTYHDLLKIIKDKDFLDNEENEDILEDIVLTLTLFEDREMIEERLKTYAHLFDDKVMKQLKRRRYTGWGRLSRKLINGIRDKQSGKTILDFLKSDGFANRNFMQLIHDDSLTFKEDIQKAQVSGQGDSLHEHIANLAGSPAIKKGILQTVKVVDELVKVMGRHKPENIVIEMARENQTTQKGQKNSRERMKRIEEGIKELGSQILKEHPVENTQLQNEKLYLYYLQNGRDMYVDQELDINRLSDYDVDHIVPQSFLKDDSIDNKVLTRSDKARGKSDNVPSEEVVKKMKNYWRQLLNAKLITQRKFDNLTKAERGGLSELDKAGFIKRQLVETRQITKHVAQILDSRMNTKYDENDKLIREVKVITLKSKLVSDFRKDFQFYKVREINNYHHAHDAYLNAVVGTALIKKYPKLESEFVYGDYKVYDVRKMIAKSEQEIGKATAKYFFYSNIMNFFKTEITLANGEIRKRPLIETNGETGEIVWDKGRDFATVRKVLSMPQVNIVKKTEVQTGGFSKESILPKRNSDKLIARKKDWDPKKYGGFDSPTVAYSVLVVAKVEKGKSKKLKSVKELLGITIMERSSFEKNPIDFLEAKGYKEVKKDLIIKLPKYSLFELENGRKRMLASAGELQKGNELALPSKYVNFLYLASHYEKLKGSPEDNEQKQLFVEQHKHYLDEIIEQISEFSKRVILADANLDKVLSAYNKHRDKPIREQAENIIHLFTLTNLGAPAAFKYFDTTIDRKRYTSTKEVLDATLIHQSITGLYETRIDLSQLGGDGGGGGPAPGGTLNLEDEYRLYETSAEPEVSPGSTWLSDFPQAWAETGGMGLAVRQAPLIIPLKATSTPVSIKQYPMSQEAKLGIKPHIQRLLDQGILVPCQSPWNTPLLPVKKPGTNDYRPVQDLREVNKRVEDIHPTVPNPYNLLSGLPPSHRWYTVLDLKDAFFCLRLHPTSQPLFAFEWRDPGMGISGQLTWTRLPQGFKNSPTLFNEALHRDLADFRIQHPDLILLQYVDDILLAATSELDCQQGTRALLLTLGNLGYRASAKKAQLCQKQVKYLGYLLKEGQRWLTEARKETVMGQPTPKTPRQLREFLGKAGFCRLFIPGFAEMAAPLYPLTKPGTLFNWGPDQQKAYQEIKQALLTAPALGLPDLTKPFELFVDEKQGYAKGVLTQKLGPWRRPVAYLSKKLDPVAAGWPPCLRMVAAIAVLRKDAGKLTMGQPLVILAPHAVEALVKQPPDRWLSNARMTHYQAMLLDTDRVQFGPVVALNPATLLPLPEEGAPHDCLEILAETHGTRPDLTDQPIPDADHTWYTDGSSFLQEGQRKAGAAVTTETEVIWARALPAGTSAQRAELIALTQALKMAEGKRLNVYTDSRYAFATAHIHGEIYRRRGWLTSEGREIKNKSEILALLKALFLPKRLSIIHCLGHQKGDSAEARGNRLADQAAREAAIKTPPDTSTLLAGKRTADGSEFEKRTADGSEFESPKKKAKVE

SEQ ID NO: 6707 - protein, 2091 aa, synthetic construct
MPAAKRVKLDGGDKKYSIGLDIGTNSVGWAVITDEYKVPSKKFKVLGNTDRHSIKKNLIGALLFDSGETAEATRLKRTARRRYTRRKNRICYLQEIFSNEMAKVDDSFFHRLEESFLVEEDKKHERHPIFGNIVDEVAYHEKYPTIYHLRKKLVDSTDKADLRLIYLALAHMIKFRGHFLIEGDLNPDNSDVDKLFIQLVQTYNQLFEENPINASGVDAKAILSARLSKSRRLENLIAQLPGEKKNGLFGNLIALSLGLTPNFKSNFDLAEDAKLQLSKDTYDDDLDNLLAQIGDQYADLFLAAKNLSDAILLSDILRVNTEITKAPLSASMIKRYDEHHQDLTLLKALVRQQLPEKYKEIFFDQSKNGYAGYIDGGASQEEFYKFIKPILEKMDGTEELLVKLNREDLLRKQRTFDNGSIPHQIHLGELHAILRRQEDFYPFLKDNREKIEKILTFRIPYYVGPLARGNSRFAWMTRKSEETITPWNFEEVVDKGASAQSFIERMTNFDKNLPNEKVLPKHSLLYEYFTVYNELTKVKYVTEGMRKPAFLSGEQKKAIVDLLFKTNRKVTVKQLKEDYFKKIECFDSVEISGVEDRFNASLGTYHDLLKIIKDKDFLDNEENEDILEDIVLTLTLFEDREMIEERLKTYAHLFDDKVMKQLKRRRYTGWGRLSRKLINGIRDKQSGKTILDFLKSDGFANRNFMQLIHDDSLTFKEDIQKAQVSGQGDSLHEHIANLAGSPAIKKGILQTVKVVDELVKVMGRHKPENIVIEMARENQTTQKGQKNSRERMKRIEEGIKELGSQILKEHPVENTQLQNEKLYLYYLQNGRDMYVDQELDINRLSDYDVDHIVPQSFLKDDSIDNKVLTRSDKARGKSDNVPSEEVVKKMKNYWRQLLNAKLITQRKFDNLTKAERGGLSELDKAGFIKRQLVETRQITKHVAQILDSRMNTKYDENDKLIREVKVITLKSKLVSDFRKDFQFYKVREINNYHHAHDAYLNAVVGTALIKKYPKLESEFVYGDYKVYDVRKMIAKSEQEIGKATAKYFFYSNIMNFFKTEITLANGEIRKRPLIETNGETGEIVWDKGRDFATVRKVLSMPQVNIVKKTEVQTGGFSKESILPKRNSDKLIARKKDWDPKKYGGFDSPTVAYSVLVVAKVEKGKSKKLKSVKELLGITIMERSSFEKNPIDFLEAKGYKEVKKDLIIKLPKYSLFELENGRKRMLASAGELQKGNELALPSKYVNFLYLASHYEKLKGSPEDNEQKQLFVEQHKHYLDEIIEQISEFSKRVILADANLDKVLSAYNKHRDKPIREQAENIIHLFTLTNLGAPAAFKYFDTTIDRKRYTSTKEVLDATLIHQSITGLYETRIDLSQLGGDGGGGGPAPGGTLGIEDEYRLHETSTEPDVSLGSTWLSDFPQAWAETGGMGLAVRQAPLIIPLKATSTPVSIQQYPMSHEARLGIKPHIQRLLDQGILVPCQSPWNTPLLPVKKPGTNDYRPVQDLREVNKRVEDIHPTVPNPYNLLSGLPPSHQWYTVLDLKDAFFCLRLHPTSQPLFAFEWRDPGMGISGQLTWTRLPQGFKNSPTLFNEALHRDLADFRIQHPDLILLQYVDDILLAATSELDCQQGTRALLQTLGDLGYRASAKKAQICQKQVKYLGYLLREGQRWLTEARKETVMGQPVPKTPRQLREFLGTAGFCRLWIPGFAEMAAPLYPLTKPGTLFSWGPDQQKAYQEIKQALLTAPALGLPDLTKPFELFVDEKQGYAKGVLTQKLGPWRRPVAYLSKKLDPVAAGWPPCLRMVAAIAVLTKDAGKLTMGQPLVILAPHAVEALVKQPPDRWLSNARMTHYQAMLLDTDRVQFGPVVALNPATLLPLPEEGAPHDCLEILAETHGTRPDLTDQPIPDADHTWYTDGSSFLQEGQRKAGAAVTTETEVIWAGALPAGTSAQRAELIALTQALKMAEGKRLNVYTDSRYAFATAHIHGEIYRRRGWLTSEGREIKNKSEILALLKALFLPKRLSIIHCLGHQKGDSAEARGNRLADQAAREAAIKTPPDTSTLLAGKRTADGSEFEKRTADGSEFESPKKKAKVE

SEQ ID NO: 6708 - protein, 2091 aa, synthetic construct
MPAAKRVKLDGGDKKYSIGLDIGTNSVGWAVITDEYKVPSKKFKVLGNTDRHSIKKNLIGALLFDSGETAEATRLKRTARRRYTRRKNRICYLQEIFSNEMAKVDDSFFHRLEESFLVEEDKKHERHPIFGNIVDEVAYHEKYPTIYHLRKKLVDSTDKADLRLIYLALAHMIKFRGHFLIEGDLNPDNSDVDKLFIQLVQTYNQLFEENPINASGVDAKAILSARLSKSRRLENLIAQLPGEKKNGLFGNLIALSLGLTPNFKSNFDLAEDAKLQLSKDTYDDDLDNLLAQIGDQYADLFLAAKNLSDAILLSDILRVNTEITKAPLSASMIKRYDEHHQDLTLLKALVRQQLPEKYKEIFFDQSKNGYAGYIDGGASQEEFYKFIKPILEKMDGTEELLVKLNREDLLRKQRTFDNGSIPHQIHLGELHAILRRQEDFYPFLKDNREKIEKILTFRIPYYVGPLARGNSRFAWMTRKSEETITPWNFEEVVDKGASAQSFIERMTNFDKNLPNEKVLPKHSLLYEYFTVYNELTKVKYVTEGMRKPAFLSGEQKKAIVDLLFKTNRKVTVKQLKEDYFKKIECFDSVEISGVEDRFNASLGTYHDLLKIIKDKDFLDNEENEDILEDIVLTLTLFEDREMIEERLKTYAHLFDDKVMKQLKRRRYTGWGRLSRKLINGIRDKQSGKTILDFLKSDGFANRNFMQLIHDDSLTFKEDIQKAQVSGQGDSLHEHIANLAGSPAIKKGILQTVKVVDELVKVMGRHKPENIVIEMARENQTTQKGQKNSRERMKRIEEGIKELGSQILKEHPVENTQLQNEKLYLYYLQNGRDMYVDQELDINRLSDYDVDHIVPQSFLKDDSIDNKVLTRSDKARGKSDNVPSEEVVKKMKNYWRQLLNAKLITQRKFDNLTKAERGGLSELDKAGFIKRQLVETRQITKHVAQILDSRMNTKYDENDKLIREVKVITLKSKLVSDFRKDFQFYKVREINNYHHAHDAYLNAVVGTALIKKYPKLESEFVYGDYKVYDVRKMIAKSEQEIGKATAKYFFYSNIMNFFKTEITLANGEIRKRPLIETNGETGEIVWDKGRDFATVRKVLSMPQVNIVKKTEVQTGGFSKESILPKRNSDKLIARKKDWDPKKYGGFDSPTVAYSVLVVAKVEKGKSKKLKSVKELLGITIMERSSFEKNPIDFLEAKGYKEVKKDLIIKLPKYSLFELENGRKRMLASAGELQKGNELALPSKYVNFLYLASHYEKLKGSPEDNEQKQLFVEQHKHYLDEIIEQISEFSKRVILADANLDKVLSAYNKHRDKPIREQAENIIHLFTLTNLGAPAAFKYFDTTIDRKRYTSTKEVLDATLIHQSITGLYETRIDLSQLGGDGGGGGPAPGGTLNIEDEHRLHETSKEPDVSLGSTWLSDFPQAWAETGGMGLAVRQAPLIIPLKATSTPVSIKQYPMSQEARLGIKPHIQRLLDQGILVPCQSPWNTPLLPVKKPGTNDYRPVQDLREVNKRVEDIHPTVPNPYNLLSGLPPSHQWYTVLDLKDAFFCLRLHPTSQPLFAFEWRDPEMGISGQLTWTRLPQGFKNSPTLFNEALHRDLADFRIQHPDLILLQYVDDLLLAATSELDCQQGTRALLQTLGNLGYRASAKKAQICQKQVKYLGYLLKEGQRWLTEARKETVMGQPTPKTPRQLREFLGTAGFCRLWIPGFAEMAAPLYPLTKPGTLFNWGPDQQKAYQEIKQALLTAPALGLPDLTKPFELFVDEKQGYAKGVLTQKLGPWRRPVAYLSKKLDPVAAGWPPCLRMVAAIAVLTKDAGKLTMGQPLVILAPHAVEALVKQPPDRWLSNARMTHYQALLLDTDRVQFGPVVALNPATLLPLPEEGLQHNCLDILAEAHGTRPDLTDQPLPDADHTWYTDGSSLLQEGQRKAGAAVTTETEVIWAKALPAGTSAQRAELIALTQALKMAEGKKLNVYTDSRYAFATAHIHGEIYRRRGWLTSEGKEIKNKDEILALLKALFLPKRLSIIHCPGHQKGHSAEARGNRMADQAARKAAITETPDTSTLLAGKRTADGSEFEKRTADGSEFESPKKKAKVE

SEQ ID NO: 6709 - protein, 2091 aa, synthetic construct; identical to SEQ ID NO: 6708

SEQ ID NO: 6710 - protein, 2085 aa, synthetic construct
MPAAKRVKLDGGDKKYSIGLDIGTNSVGWAVITDEYKVPSKKFKVLGNTDRHSIKKNLIGALLFDSGETAEATRLKRTARRRYTRRKNRICYLQEIFSNEMAKVDDSFFHRLEESFLVEEDKKHERHPIFGNIVDEVAYHEKYPTIYHLRKKLVDSTDKADLRLIYLALAHMIKFRGHFLIEGDLNPDNSDVDKLFIQLVQTYNQLFEENPINASGVDAKAILSARLSKSRRLENLIAQLPGEKKNGLFGNLIALSLGLTPNFKSNFDLAEDAKLQLSKDTYDDDLDNLLAQIGDQYADLFLAAKNLSDAILLSDILRVNTEITKAPLSASMIKRYDEHHQDLTLLKALVRQQLPEKYKEIFFDQSKNGYAGYIDGGASQEEFYKFIKPILEKMDGTEELLVKLNREDLLRKQRTFDNGSIPHQIHLGELHAILRRQEDFYPFLKDNREKIEKILTFRIPYYVGPLARGNSRFAWMTRKSEETITPWNFEEVVDKGASAQSFIERMTNFDKNLPNEKVLPKHSLLYEYFTVYNELTKVKYVTEGMRKPAFLSGEQKKAIVDLLFKTNRKVTVKQLKEDYFKKIECFDSVEISGVEDRFNASLGTYHDLLKIIKDKDFLDNEENEDILEDIVLTLTLFEDREMIEERLKTYAHLFDDKVMKQLKRRRYTGWGRLSRKLINGIRDKQSGKTILDFLKSDGFANRNFMQLIHDDSLTFKEDIQKAQVSGQGDSLHEHIANLAGSPAIKKGILQTVKVVDELVKVMGRHKPENIVIEMARENQTTQKGQKNSRERMKRIEEGIKELGSQILKEHPVENTQLQNEKLYLYYLQNGRDMYVDQELDINRLSDYDVDHIVPQSFLKDDSIDNKVLTRSDKARGKSDNVPSEEVVKKMKNYWRQLLNAKLITQRKFDNLTKAERGGLSELDKAGFIKRQLVETRQITKHVAQILDSRMNTKYDENDKLIREVKVITLKSKLVSDFRKDFQFYKVREINNYHHAHDAYLNAVVGTALIKKYPKLESEFVYGDYKVYDVRKMIAKSEQEIGKATAKYFFYSNIMNFFKTEITLANGEIRKRPLIETNGETGEIVWDKGRDFATVRKVLSMPQVNIVKKTEVQTGGFSKESILPKRNSDKLIARKKDWDPKKYGGFDSPTVAYSVLVVAKVEKGKSKKLKSVKELLGITIMERSSFEKNPIDFLEAKGYKEVKKDLIIKLPKYSLFELENGRKRMLASAGELQKGNELALPSKYVNFLYLASHYEKLKGSPEDNEQKQLFVEQHKHYLDEIIEQISEFSKRVILADANLDKVLSAYNKHRDKPIREQAENIIHLFTLTNLGAPAAFKYFDTTIDRKRYTSTKEVLDATLIHQSITGLYETRIDLSQLGGDGGGGGPAPGGTLQLDDEYRLYSPLVKPDQNIQFWLEQFPQAWAETAGMGLAKQVPPQVIQLKASATPVSVRQYPLSKEAQEGIRPHVQRLIQQGILVPVQSPWNTPLLPVRKPGTNDYRPVQDLREVNKRVQDIHPTVPNPYNLLCALPPQRSWYTVLDLKDAFFCLRLHPTSQPLFAFEWRDPGTGRTGQLTWTRLPQGFKNSPTIFDEALHRDLANFRIQHPQVTLLQYVDDLLLAGATKQDCLEGTKALLLELSDLGYRASAKKAQICRREVTYLGYSLRDGQRWLTEARKKTVVQIPAPTTAKQVREFLGTAGFCRLWIPGFATLAAPLYPLTKEKGEFSWAPEHQKAFDAIKKALLSAPALALPDVTKPFTLYVDERKGVARGVLTQTLGPWRRPVAYLSKKLDPVASGWPVCLKAIAAVAILVKDADKLTLGQNITVIAPHALENIVRQPPDRWMTNARMTHYQSLLLTERVTFAPPAALNPATLLPEETDEPVTHDCHQLLIEETGVRKDLTDIPLTGEVLTWFTDGSSYVVEGKRMAGAAVVDGTRTIWASSLPEGTSAQKAELMALTQALRLAEGKSINIYTDSRYAFATAHVHGAIYKQRGLLTSAGREIKNKEEILSLLEALHLPKRLAIIHCPGHQKAKDPISRGNQMADRVAKQAAQGVNLLAGKRTADGSEFEKRTADGSEFESPKKKAKVE

SEQ ID NO: 6711 - protein, 2085 aa, synthetic construct; identical to SEQ ID NO: 6710

SEQ ID NO: 6712 - protein, 2171 aa, synthetic construct
MPAAKRVKLDGGDKKYSIGLDIGTNSVGWAVITDEYKVPSKKFKVLGNTDRHSIKKNLIGALLFDSGETAEATRLKRTARRRYTRRKNRICYLQEIFSNEMAKVDDSFFHRLEESFLVEEDKKHERHPIFGNIVDEVAYHEKYPTIYHLRKKLVDSTDKADLRLIYLALAHMIKFRGHFLIEGDLNPDNSDVDKLFIQLVQTYNQLFEENPINASGVDAKAILSARLSKSRRLENLIAQLPGEKKNGLFGNLIALSLGLTPNFKSNFDLAEDAKLQLSKDTYDDDLDNLLAQIGDQYADLFLAAKNLSDAILLSDILRVNTEITKAPLSASMIKRYDEHHQDLTLLKALVRQQLPEKYKEIFFDQSKNGYAGYIDGGASQEEFYKFIKPILEKMDGTEELLVKLNREDLLRKQRTFDNGSIPHQIHLGELHAILRRQEDFYPFLKDNREKIEKILTFRIPYYVGPLARGNSRFAWMTRKSEETITPWNFEEVVDKGASAQSFIERMTNFDKNLPNEKVLPKHSLLYEYFTVYNELTKVKYVTEGMRKPAFLSGEQKKAIVDLLFKTNRKVTVKQLKEDYFKKIECFDSVEISGVEDRFNASLGTYHDLLKIIKDKDFLDNEENEDILEDIVLTLTLFEDREMIEERLKTYAHLFDDKVMKQLKRRRYTGWGRLSRKLINGIRDKQSGKTILDFLKSDGFANRNFMQLIHDDSLTFKEDIQKAQVSGQGDSLHEHIANLAGSPAIKKGILQTVKVVDELVKVMGRHKPENIVIEMARENQTTQKGQKNSRERMKRIEEGIKELGSQILKEHPVENTQLQNEKLYLYYLQNGRDMYVDQELDINRLSDYDVDHIVPQSFLKDDSIDNKVLTRSDKARGKSDNVPSEEVVKKMKNYWRQLLNAKLITQRKFDNLTKAERGGLSELDKAGFIKRQLVETRQITKHVAQILDSRMNTKYDENDKLIREVKVITLKSKLVSDFRKDFQFYKVREINNYHHAHDAYLNAVVGTALIKKYPKLESEFVYGDYKVYDVRKMIAKSEQEIGKATAKYFFYSNIMNFFKTEITLANGEIRKRPLIETNGETGEIVWDKGRDFATVRKVLSMPQVNIVKKTEVQTGGFSKESILPKRNSDKLIARKKDWDPKKYGGFDSPTVAYSVLVVAKVEKGKSKKLKSVKELLGITIMERSSFEKNPIDFLEAKGYKEVKKDLIIKLPKYSLFELENGRKRMLASAGELQKGNELALPSKYVNFLYLASHYEKLKGSPEDNEQKQLFVEQHKHYLDEIIEQISEFSKRVILADANLDKVLSAYNKHRDKPIREQAENIIHLFTLTNLGAPAAFKYFDTTIDRKRYTSTKEVLDATLIHQSITGLYETRIDLSQLGGDGGGGGPAPGGMDPLQLLQPLEAEIKGTKLKAHWNSGATITCVPEAFLEDERPIQTMLIKTIHGEKQQDVYYLTFKVQGRKVEAEVLASPYDYILLNPSDVPWLMKKPLQLTVLVPLHEYQERLLQQTALPKEQKELLQKLFLKYDALWQHWENQVGHRRIKPHNIATGTLAPRPQKQYPINPKAKPSIQIVIDDLLKQGVLIQQNSTMNTPVYPVPKPDGKWRMVLDYREVNKTIPLIAAQNQHSAGILSSIYRGKYKTTLDLTNGFWAHPITPESYWLTAFTWQGKQYCWTRLPQGFLNSPALFNADVVDLLKEIPNVQAYVDDIYISHDDPQEHLEQLEKIFSILLNAGYVVSLKKSEIAQREVEFLGFNITKEGRGLTDTFKQKLLNITPPKDLKQLQSILGKLNFARNFIPNYSELVKPLYTIVAPANGKFISWTEDNSNQLQHIISVLNQADNLEERNPETRLIIKVNSSPSAGYIRYYNEGSKRPIMYVNYIFSKAEAKFTQTEKLLTTMHKGLIKAMDLAMGQEILVYSPIVSMTKIQRTPLPERKALPVRWITWMTYLEDPRIQFHYDKSLPELQQIPNVTEDVIAKTKHPSEFAMVFYTDGSAIKHPDVNKSHSAGMGIAQVQFIPEYKIVHQWSIPLGDHTAQLAEIAAVEFACKKALKISGPVLIVTDSFYVAESANKELPYWKSNGFLNNKKKPLRHVSKWKSIAECLQLKPDIIIMHEKGHQQPMTTLHTEGNNLADKLATQGSYVVHAGKRTADGSEFEKRTADGSEFESPKKKAKVE

SEQ ID NO: 6713 - protein, 2082 aa, synthetic construct
MPAAKRVKLDGGDKKYSIGLDIGTNSVGWAVITDEYKVPSKKFKVLGNTDRHSIKKNLIGALLFDSGETAEATRLKRTARRRYTRRKNRICYLQEIFSNEMAKVDDSFFHRLEESFLVEEDKKHERHPIFGNIVDEVAYHEKYPTIYHLRKKLVDSTDKADLRLIYLALAHMIKFRGHFLIEGDLNPDNSDVDKLFIQLVQTYNQLFEENPINASGVDAKAILSARLSKSRRLENLIAQLPGEKKNGLFGNLIALSLGLTPNFKSNFDLAEDAKLQLSKDTYDDDLDNLLAQIGDQYADLFLAAKNLSDAILLSDILRVNTEITKAPLSASMIKRYDEHHQDLTLLKALVRQQLPEKYKEIFFDQSKNGYAGYIDGGASQEEFYKFIKPILEKMDGTEELLVKLNREDLLRKQRTFDNGSIPHQIHLGELHAILRRQEDFYPFLKDNREKIEKILTFRIPYYVGPLARGNSRFAWMTRKSEETITPWNFEEVVDKGASAQSFIERMTNFDKNLPNEKVLPKHSLLYEYFTVYNELTKVKYVTEGMRKPAFLSGEQKKAIVDLLFKTNRKVTVKQLKEDYFKKIECFDSVEISGVEDRFNASLGTYHDLLKIIKDKDFLDNEENEDILEDIVLTLTLFEDREMIEERLKTYAHLFDDKVMKQLKRRRYTGWGRLSRKLINGIRDKQSGKTILDFLKSDGFANRNFMQLIHDDSLTFKEDIQKAQVSGQGDSLHEHIANLAGSPAIKKGILQTVKVVDELVKVMGRHKPENIVIEMARENQTTQKGQKNSRERMKRIEEGIKELGSQILKEHPVENTQLQNEKLYLYYLQNGRDMYVDQELDINRLSDYDVDHIVPQSFLKDDSIDNKVLTRSDKARGKSDNVPSEEVVKKMKNYWRQLLNAKLITQRKFDNLTKAERGGLSELDKAGFIKRQLVETRQITKHVAQILDSRMNTKYDENDKLIREVKVITLKSKLVSDFRKDFQFYKVREINNYHHAHDAYLNAVVGTALIKKYPKLESEFVYGDYKVYDVRKMIAKSEQEIGKATAKYFFYSNIMNFFKTEITLANGEIRKRPLIETNGETGEIVWDKGRDFATVRKVLSMPQVNIVKKTEVQTGGFSKESILPKRNSDKLIARKKDWDPKKYGGFDSPTVAYSVLVVAKVEKGKSKKLKSVKELLGITIMERSSFEKNPIDFLEAKGYKEVKKDLIIKLPKYSLFELENGRKRMLASAGELQKGNELALPSKYVNFLYLASHYEKLKGSPEDNEQKQLFVEQHKHYLDEIIEQISEFSKRVILADANLDKVLSAYNKHRDKPIREQAENIIHLFTLTNLGAPAAFKYFDTTIDRKRYTSTKEVLDATLIHQSITGLYETRIDLSQLGGDGGGGGPAPGGIPWLMKKPLQLTTLVPLQEYEERLLKQTMLTGSYKEKLQSLFLKYDALWQHWENQVGHRRIKPHHIATGTVNPRPQKQYPINPKAKASIQTVINDLLKQGVLIQQNSIMNTPVYPVPKPDGKWRMVLDYREVNKTIPLIAAQNQHSAGILSSIFRGKYKTTLDLSNGFWAHSITPESYWLTAFTWLGQQYCWTRLPQGFLNSPALFNADVVDLLKEVPNVQVYVDDIYISHDDPREHLEQLEKVFSLLLNAGYVVSLKKSEIAQHEVEFLGFNITKEGRGLTETFKQKLLNITPPRDLKQLQSILGLLNFARNFIPNFSELVKPLYNIIATAPGKYITWTTDNSQQLQNIISMLNSAENLEERNPEVRLIMKVNTSPSAGYIRFYNEFAKRPIMYLNYVYTKAEVKFTNTEKLLTTIHKGLIKALDLGMGQEILVYSPIVSMTKIQKTPLPERKALPIRWITWMSYLEDPRIQFHYDKTLPELQQVPTVTDDIIAKIKHPSEFSMVFYTDGSAIKHPNVNKSHNAGMGIAQVQFKPEFTVINTWSIPLGDHTAQLAEVAAVEFACKKALKIDGPVLIVTDSFYVAESVNKELPYWQSNGFFNNKKKPLKHVSKWKSIADCIQLKPDIIIIHEKGHQPTASTFHTEGNNLADKLATQGSYVVNAGKRTADGSEFEKRTADGSEFESPKKKAKVE

SEQ ID NO: 6714 - protein, 2171 aa, synthetic construct
MPAAKRVKLDGGDKKYSIGLDIGTNSVGWAVITDEYKVPSKKFKVLGNTDRHSIKKNLIGALLFDSGETAEATRLKRTARRRYTRRKNRICYLQEIFSNEMAKVDDSFFHRLEESFLVEEDKKHERHPIFGNIVDEVAYHEKYPTIYHLRKKLVDSTDKADLRLIYLALAHMIKFRGHFLIEGDLNPDNSDVDKLFIQLVQTYNQLFEENPINASGVDAKAILSARLSKSRRLENLIAQLPGEKKNGLFGNLIALSLGLTPNFKSNFDLAEDAKLQLSKDTYDDDLDNLLAQIGDQYADLFLAAKNLSDAILLSDILRVNTEITKAPLSASMIKRYDEHHQDLTLLKALVRQQLPEKYKEIFFDQSKNGYAGYIDGGASQEEFYKFIKPILEKMDGTEELLVKLNREDLLRKQRTFDNGSIPHQIHLGELHAILRRQEDFYPFLKDNREKIEKILTFRIPYYVGPLARGNSRFAWMTRKSEETITPWNFEEVVDKGASAQSFIERMTNFDKNLPNEKVLPKHSLLYEYFTVYNELTKVKYVTEGMRKPAFLSGEQKKAIVDLLFKTNRKVTVKQLKEDYFKKIECFDSVEISGVEDRFNASLGTYHDLLKIIKDKDFLDNEENEDILEDIVLTLTLFEDREMIEERLKTYAHLFDDKVMKQLKRRRYTGWGRLSRKLINGIRDKQSGKTILDFLKSDGFANRNFMQLIHDDSLTFKEDIQKAQVSGQGDSLHEHIANLAGSPAIKKGILQTVKVVDELVKVMGRHKPENIVIEMARENQTTQKGQKNSRERMKRIEEGIKELGSQILKEHPVENTQLQNEKLYLYYLQNGRDMYVDQELDINRLSDYDVDHIVPQSFLKDDSIDNKVLTRSDKARGKSDNVPSEEVVKKMKNYWRQLLNAKLITQRKFDNLTKAERGGLSELDKAGFIKRQLVETRQITKHVAQILDSRMNTKYDENDKLIREVKVITLKSKLVSDFRKDFQFYKVREINNYHHAHDAYLNAVVGTALIKKYPKLESEFVYGDYKVYDVRKMIAKSEQEIGKATAKYFFYSNIMNFFKTEITLANGEIRKRPLIETNGETGEIVWDKGRDFATVRKVLSMPQVNIVKKTEVQTGGFSKESILPKRNSDKLIARKKDWDPKKYGGFDSPTVAYSVLVVAKVEKGKSKKLKSVKELLGITIMERSSFEKNPIDFLEAKGYKEVKKDLIIKLPKYSLFELENGRKRMLASAGELQKGNELALPSKYVNFLYLASHYEKLKGSPEDNEQKQLFVEQHKHYLDEIIEQISEFSKRVILADANLDKVLSAYNKHRDKPIREQAENIIHLFTLTNLGAPAAFKYFDTTIDRKRYTSTKEVLDATLIHQSITGLYETRIDLSQLGGDGGGGGPAPGGMNPLQLLQPLPAEVKGTKLLAHWNSGATITCIPESFLEDEQPIKQTLIKTIHGEKQQNVYYLTFKVKGRKVEAEVIASPYEYILLSPTDVPWLTQQPLQLTILVPLQEYQDRILNKTALPEEQKQQLKALFTKYDNLWQHWENQVGHRKIRPHNIATGDYPPRPQKQYPINPKAKPSIQIVIDDLLKQGVLTPQNSTMNTPVYPVPKPDGRWRMVLDYREVNKTIPLTAAQNQHSAGILATIVRQKYKTTLDLANGFWAHPITPDSYWLTAFTWQGKQYCWTRLPQGFLNSPALFTADAVDLLKEVPNVQVYVDDIYLSHDNPHEHIQQLEKVFQILLQAGYVVSLKKSEIGQRTVEFLGFNITKEGRGLTDTFKTKLLNVTPPKDLKQLQSILGLLNFARNFIPNFAELVQTLYNLIASSKGKYIEWTEDNTKQLNKVIEALNTASNLEERLPDQRLVIKVNTSPSAGYVRYYNESGKKPIMYLNYVFSKAELKFSMLEKLLTTMHKALIKAMDLAMGQEILVYSPIVSMTKIQKTPLPERKALPIRWITWMTYLEDPRIQFHYDKTLPELKHIPDVYTSSIPPLKHPSQYEGVFCTDGSAIKSPDPTKSNNAGMGIVHAIYNPEYKILNQWSIPLGHHTAQMAEIAAVEFACKKALKVPGPVLVITDSFYVAESANKELPYWKSNGFVNNKKEPLKHISKWKSIAECLSIKPDITIQHEKGHQPINTSIHTEGNALADKLATQGSYVVNAGKRTADGSEFEKRTADGSEFESPKKKAKVE

SEQ ID NO: 6715 - protein, 2089 aa, synthetic construct
MPAAKRVKLDGGDKKYSIGLDIGTNSVGWAVITDEYKVPSKKFKVLGNTDRHSIKKNLIGALLFDSGETAEATRLKRTARRRYTRRKNRICYLQEIFSNEMAKVDDSFFHRLEESFLVEEDKKHERHPIFGNIVDEVAYHEKYPTIYHLRKKLVDSTDKADLRLIYLALAHMIKFRGHFLIEGDLNPDNSDVDKLFIQLVQTYNQLFEENPINASGVDAKAILSARLSKSRRLENLIAQLPGEKKNGLFGNLIALSLGLTPNFKSNFDLAEDAKLQLSKDTYDDDLDNLLAQIGDQYADLFLAAKNLSDAILLSDILRVNTEITKAPLSASMIKRYDEHHQDLTLLKALVRQQLPEKYKEIFFDQSKNGYAGYIDGGASQEEFYKFIKPILEKMDGTEELLVKLNREDLLRKQRTFDNGSIPHQIHLGELHAILRRQEDFYPFLKDNREKIEKILTFRIPYYVGPLARGNSRFAWMTRKSEETITPWNFEEVVDKGASAQSFIERMTNFDKNLPNEKVLPKHSLLYEYFTVYNELTKVKYVTEGMRKPAFLSGEQKKAIVDLLFKTNRKVTVKQLKEDYFKKIECFDSVEISGVEDRFNASLGTYHDLLKIIKDKDFLDNEENEDILEDIVLTLTLFEDREMIEERLKTYAHLFDDKVMKQLKRRRYTGWGRLSRKLINGIRDKQSGKTILDFLKSDGFANRNFMQLIHDDSLTFKEDIQKAQVSGQGDSLHEHIANLAGSPAIKKGILQTVKVVDELVKVMGRHKPENIVIEMARENQTTQKGQKNSRERMKRIEEGIKELGSQILKEHPVENTQLQNEKLYLYYLQNGRDMYVDQELDINRLSDYDVDHIVPQSFLKDDSIDNKVLTRSDKARGKSDNVPSEEVVKKMKNYWRQLLNAKLITQRKFDNLTKAERGGLSELDKAGFIKRQLVETRQITKHVAQILDSRMNTKYDENDKLIREVKVITLKSKLVSDFRKDFQFYKVREINNYHHAHDAYLNAVVGTALIKKYPKLESEFVYGDYKVYDVRKMIAKSEQEIGKATAKYFFYSNIMNFFKTEITLANGEIRKRPLIETNGETGEIVWDKGRDFATVRKVLSMPQVNIVKKTEVQTGGFSKESILPKRNSDKLIARKKDWDPKKYGGFDSPTVAYSVLVVAKVEKGKSKKLKSVKELLGITIMERSSFEKNPIDFLEAKGYKEVKKDLIIKLPKYSLFELENGRKRMLASAGELQKGNELALPSKYVNFLYLASHYEKLKGSPEDNEQKQLFVEQHKHYLDEIIEQISEFSKRVILADANLDKVLSAYNKHRDKPIREQAENIIHLFTLTNLGAPAAFKYFDTTIDRKRYTSTKEVLDATLIHQSITGLYETRIDLSQLGGDGGGGGPAPGGVLNLEEEYRLHEKPVPSSIDPSWLQLFPTVWAERAGMGLANQVPPVVVELRSGASPVAVRQYPMSKEAREGIRPHIQRFLDLGVLVPCQSPWNTPLLPVKKPGTNDYRPVQDLREINKRVQDIHPTVPNPYNLLSSLPPSHTWYSVLDLKDAFFCLKLHPNSQPLFAFEWRDPEKGNTGQLTWTRLPQGFKNSPTLFNEALHRDLAPFRALNPQVVLLQYVDDLLVAAPTYRDCKEGTQKLLQELSKLGYRVSAKKAQLCQKEVTYLGYLLKEGKRWLTPARKATVMKIPPPTTPRQVREFLGTAGFCRLWIPGFASLAAPLYPLTKPSIPFIWTEEHQKAFDRIKEALLSAPALALPDLTKPFTLYVDERAGVARGVLTQTLGPWRRPVAYLSKKLDPVASGWPTCLKAVAAVALLLKDADKLTLGQNVTVIASHSLESIVRQPPDRWMTNARMTHYQSLLLNERVSFAPPAVLNPATLLPVESEATPVHRCSEILAEETGTRRDLKDQPLPGVPAWYTDGSSFIAEGKRRAGAAIVDGKRTVWASSLPEGTSAQKAELVALTQALRLAEGKDINIYTDSRYAFATAHIHGAIYKQRGWLTSAGKDIKNKEEILALLEAIHLPKRVAIIHCPGHQKGNDPVATGNRRADEAAKQAALSTRVLAETTKPAGKRTADGSEFEKRTADGSEFESPKKKAKVE

SEQ ID NO: 6716 - protein, 2091 aa, synthetic construct
MPAAKRVKLDGGDKKYSIGLDIGTNSVGWAVITDEYKVPSKKFKVLGNTDRHSIKKNLIGALLFDSGETAEATRLKRTARRRYTRRKNRICYLQEIFSNEMAKVDDSFFHRLEESFLVEEDKKHERHPIFGNIVDEVAYHEKYPTIYHLRKKLVDSTDKADLRLIYLALAHMIKFRGHFLIEGDLNPDNSDVDKLFIQLVQTYNQLFEENPINASGVDAKAILSARLSKSRRLENLIAQLPGEKKNGLFGNLIALSLGLTPNFKSNFDLAEDAKLQLSKDTYDDDLDNLLAQIGDQYADLFLAAKNLSDAILLSDILRVNTEITKAPLSASMIKRYDEHHQDLTLLKALVRQQLPEKYKEIFFDQSKNGYAGYIDGGASQEEFYKFIKPILEKMDGTEELLVKLNREDLLRKQRTFDNGSIPHQIHLGELHAILRRQEDFYPFLKDNREKIEKILTFRIPYYVGPLARGNSRFAWMTRKSEETITPWNFEEVVDKGASAQSFIERMTNFDKNLPNEKVLPKHSLLYEYFTVYNELTKVKYVTEGMRKPAFLSGEQKKAIVDLLFKTNRKVTVKQLKEDYFKKIECFDSVEISGVEDRFNASLGTYHDLLKIIKDKDFLDNEENEDILEDIVLTLTLFEDREMIEERLKTYAHLFDDKVMKQLKRRRYTGWGRLSRKLINGIRDKQSGKTILDFLKSDGFANRNFMQLIHDDSLTFKEDIQKAQVSGQGDSLHEHIANLAGSPAIKKGILQTVKVVDELVKVMGRHKPENIVIEMARENQTTQKGQKNSRERMKRIEEGIKELGSQILKEHPVENTQLQNEKLYLYYLQNGRDMYVDQELDINRLSDYDVDHIVPQSFLKDDSIDNKVLTRSDKARGKSDNVPSEEVVKKMKNYWRQLLNAKLITQRKFDNLTKAERGGLSELDKAGFIKRQLVETRQITKHVAQILDSRMNTKYDENDKLIREVKVITLKSKLVSDFRKDFQFYKVREINNYHHAHDAYLNAVVGTALIKKYPKLESEFVYGDYKVYDVRKMIAKSEQEIGKATAKYFFYSNIMNFFKTEITLANGEIRKRPLIETNGETGEIVWDKGRDFATVRKVLSMPQVNIVKKTEVQTGGFSKESILPKRNSDKLIARKKDWDPKKYGGFDSPTVAYSVLVVAKVEKGKSKKLKSVKELLGITIMERSSFEKNPIDFLEAKGYKEVKKDLIIKLPKYSLFELENGRKRMLASAGELQKGNELALPSKYVNFLYLASHYEKLKGSPEDNEQKQLFVEQHKHYLDEIIEQISEFSKRVILADANLDKVLSAYNKHRDKPIREQAENIIHLFTLTNLGAPAAFKYFDTTIDRKRYTSTKEVLDATLIHQSITGLYETRIDLSQLGGDGGGGGPAPGGTLNIEDEYRLHETSKEPDVPLGSTWLSDFPQAWAETGGMGLAVRQAPLIIPLKATSTPVSIKQYPMSQEARLGIKPHIQRLLDQGILVPCQSPWNTPLLPVKKPGTNDYRPVQDLREVNKRVEDIHPTVPNPYNLLSGLPPSHQWYTVLDLKDAFFCLRLHPTSQPLFAFEWRDPEMGISGQLTWTRLPQGFKNSPTLFNEALHRDLADFRIQHPDLILLQYVDDLLLAATSEQDCQRGTRALLQTLGNLGYRASAKKAQICQKQVKYLGYLLKEGQRWLTEARKETVMGQPTPKTPRQLREFLGTAGFCRLWIPGFAEMAAPLYPLTKPGTLFNWGPDQQKAYQEIKQALLTAPALGLPDLTKPFELFVDEKQGYAKGVLTQKLGPWRRPVAYLSKKLDPVAAGWPPCLRMVAAIAVLTKDAGKLTMGQPLVILAPHAVEALVKQPPDRWLSNARMTHYQAMLLDTDRVQFGPVVALNPATLLPLPEKEAPHDCLEILAETHGTRPDLTDQPIPDADYTWYTDGSSFLQEGQRRAGAAVTTETEVIWARALPAGTSAQRAELIALTQALKMAEGKKLNVYTDSRYAFATAHVHGEIYRRRGWLTSEGREIKNKNEILALLKALFLPKRLSIIHCPGHQKGNSAEARGNRMADQAAREAAMKAVLETSTLLAGKRTADGSEFEKRTADGSEFESPKKKAKVE

SEQ ID NO: 6717 - protein, 2091 aa, synthetic construct
MPAAKRVKLDGGDKKYSIGLDIGTNSVGWAVITDEYKVPSKKFKVLGNTDRHSIKKNLIGALLFDSGETAEATRLKRTARRRYTRRKNRICYLQEIFSNEMAKVDDSFFHRLEESFLVEEDKKHERHPIFGNIVDEVAYHEKYPTIYHLRKKLVDSTDKADLRLIYLALAHMIKFRGHFLIEGDLNPDNSDVDKLFIQLVQTYNQLFEENPINASGVDAKAILSARLSKSRRLENLIAQLPGEKKNGLFGNLIALSLGLTPNFKSNFDLAEDAKLQLSKDTYDDDLDNLLAQIGDQYADLFLAAKNLSDAILLSDILRVNTEITKAPLSASMIKRYDEHHQDLTLLKALVRQQLPEKYKEIFFDQSKNGYAGYIDGGASQEEFYKFIKPILEKMDGTEELLVKLNREDLLRKQRTFDNGSIPHQIHLGELHAILRRQEDFYPFLKDNREKIEKILTFRIPYYVGPLARGNSRFAWMTRKSEETITPWNFEEVVDKGASAQSFIERMTNFDKNLPNEKVLPKHSLLYEYFTVYNELTKVKYVTEGMRKPAFLSGEQKKAIVDLLFKTNRKVTVKQLKEDYFKKIECFDSVEISGVEDRFNASLGTYHDLLKIIKDKDFLDNEENEDILEDIVLTLTLFEDREMIEERLKTYAHLFDDKVMKQLKRRRYTGWGRLSRKLINGIRDKQSGKTILDFLKSDGFANRNFMQLIHDDSLTFKEDIQKAQVSGQGDSLHEHIANLAGSPAIKKGILQTVKVVDELVKVMGRHKPENIVIEMARENQTTQKGQKNSRERMKRIEEGIKELGSQILKEHPVENTQLQNEKLYLYYLQNGRDMYVDQELDINRLSDYDVDHIVPQSFLKDDSIDNKVLTRSDKARGKSDNVPSEEVVKKMKNYWRQLLNAKLITQRKFDNLTKAERGGLSELDKAGFIKRQLVETRQITKHVAQILDSRMNTKYDENDKLIREVKVITLKSKLVSDFRKDFQFYKVREINNYHHAHDAYLNAVVGTALIKKYPKLESEFVYGDYKVYDVRKMIAKSEQEIGKATAKYFFYSNIMNFFKTEITLANGEIRKRPLIETNGETGEIVWDKGRDFATVRKVLSMPQVNIVKKTEVQTGGFSKESILPKRNSDKLIARKKDWDPKKYGGFDSPTVAYSVLVVAKVEKGKSKKLKSVKELLGITIMERSSFEKNPIDFLEAKGYKEVKKDLIIKLPKYSLFELENGRKRMLASAGELQKGNELALPSKYVNFLYLASHYEKLKGSPEDNEQKQLFVEQHKHYLDEIIEQISEFSKRVILADANLDKVLSAYNKHRDKPIREQAENIIHLFTLTNLGAPAAFKYFDTTIDRKRYTSTKEVLDATLIHQSITGLYETRIDLSQLGGDGGGGGPAPGGTLNIEDEYRLHETSKEPDVPLGSTWLSDFPQAWAETGGMGLAVRQAPLIIPLKATSTPVSIKQYPMSQEARLGIKPHIQRLLDQGILVPCQSPWNTPLLPVKKPGTNDYRPVQDLREVNKRVEDIHPTVPNPYNLLSGLPPSHQWYTVLDLKDAFFCLRLHPTSQPLFAFEWRDPEMGISGQLTWTRLPQGFKNSPTLFNEALHRDLADFRIQHPDLILLQYVDDLLLAATSEQDCQRGTRALLQTLGNLGYRASAKKAQICQKQVKYLGYLLKEGQRWLTEARKETVMGQPTPKTPRQLREFLGKAGFCRLFIPGFAEMAAPLYPLTKPGTLFNWGPDQQKAYQEIKQALLTAPALGLPDLTKPFELFVDEKQGYAKGVLTQKLGPWRRPVAYLSKKLDPVAAGWPPCLRMVAAIAVLTKDAGKLTMGQPLVILAPHAVEALVKQPPDRWLSNARMTHYQAMLLDTDRVQFGPVVALNPATLLPLPEKEAPHDCLEILAETHGTRPDLTDQPIPDADYTWYTDGSSFLQEGQRRAGAAVTTETEVIWARALPAGTSAQRAELIALTQALKMAEGKKLNVYTDSRYAFATAHVHGEIYRRRGWLTSEGREIKNKNEILALLKALFLPKRLSIIHCPGHQKGNSAEARGNRMADQAAREAAMKAVLETSTLLAGKRTADGSEFEKRTADGSEFESPKKKAKVE

SEQ ID NO: 6718 - protein, 2122 aa, synthetic construct
MPAAKRVKLDGGDKKYSIGLDIGTNSVGWAVITDEYKVPSKKFKVLGNTDRHSIKKNLIGALLFDSGETAEATRLKRTARRRYTRRKNRICYLQEIFSNEMAKVDDSFFHRLEESFLVEEDKKHERHPIFGNIVDEVAYHEKYPTIYHLRKKLVDSTDKADLRLIYLALAHMIKFRGHFLIEGDLNPDNSDVDKLFIQLVQTYNQLFEENPINASGVDAKAILSARLSKSRRLENLIAQLPGEKKNGLFGNLIALSLGLTPNFKSNFDLAEDAKLQLSKDTYDDDLDNLLAQIGDQYADLFLAAKNLSDAILLSDILRVNTEITKAPLSASMIKRYDEHHQDLTLLKALVRQQLPEKYKEIFFDQSKNGYAGYIDGGASQEEFYKFIKPILEKMDGTEELLVKLNREDLLRKQRTFDNGSIPHQIHLGELHAILRRQEDFYPFLKDNREKIEKILTFRIPYYVGPLARGNSRFAWMTRKSEETITPWNFEEVVDKGASAQSFIERMTNFDKNLPNEKVLPKHSLLYEYFTVYNELTKVKYVTEGMRKPAFLSGEQKKAIVDLLFKTNRKVTVKQLKEDYFKKIECFDSVEISGVEDRFNASLGTYHDLLKIIKDKDFLDNEENEDILEDIVLTLTLFEDREMIEERLKTYAHLFDDKVMKQLKRRRYTGWGRLSRKLINGIRDKQSGKTILDFLKSDGFANRNFMQLIHDDSLTFKEDIQKAQVSGQGDSLHEHIANLAGSPAIKKGILQTVKVVDELVKVMGRHKPENIVIEMARENQTTQKGQKNSRERMKRIEEGIKELGSQILKEHPVENTQLQNEKLYLYYLQNGRDMYVDQELDINRLSDYDVDHIVPQSFLKDDSIDNKVLTRSDKARGKSDNVPSEEVVKKMKNYWRQLLNAKLITQRKFDNLTKAERGGLSELDKAGFIKRQLVETRQITKHVAQILDSRMNTKYDENDKLIREVKVITLKSKLVSDFRKDFQFYKVREINNYHHAHDAYLNAVVGTALIKKYPKLESEFVYGDYKVYDVRKMIAKSEQEIGKATAKYFFYSNIMNFFKTEITLANGEIRKRPLIETNGETGEIVWDKGRDFATVRKVLSMPQVNIVKKTEVQTGGFSKESILPKRNSDKLIARKKDWDPKKYGGFDSPTVAYSVLVVAKVEKGKSKKLKSVKELLGITIMERSSFEKNPIDFLEAKGYKEVKKDLIIKLPKYSLFELENGRKRMLASAGELQKGNELALPSKYVNFLYLASHYEKLKGSPEDNEQKQLFVEQHKHYLDEIIEQISEFSKRVILADANLDKVLSAYNKHRDKPIREQAENIIHLFTLTNLGAPAAFKYFDTTIDRKRYTSTKEVLDATLIHQSITGLYETRIDLSQLGGDGGPAPGGGGGLLGRDLLTKLKAQIQFSTEGPQVTWEDRPAMCLVLNLEEEYRLHEKPVPPSIDPSWLQLFPMVWAEKAGMGLANQVPPVVVELKSDASPVAVRQYPMSKEAREGIRPHIQRFLDLGILVPCQSPWNTPLLPVKKPGTNDYRPVQDLREVNKRVQDIHPTVPNPYNLLSSLPPSHTWYSVLDLKDAFFCLKLHPNSQPLFAFEWRDPEKGNTGQLTWTRLPQGFKNSPTLFNEALHRDLASFRALNPQVVMLQYVDDLLVAAPTYRDCKEGTRRLLQELSKLGYRVSAKKAQLCREEVTYLGYLLKGGKRWLTPARKATVMKIPTPTTPRQVREFLGTAGFCRLWIPGFASLAAPLYPLTRPKVPFTWTEAHQEAFGRIKEALLSAPALALPDLTKPFALYVDEKEGVARGVLTQTLGPWRRPVAYLSKKLDPVASGWPTCLKAIAAVALLLKDADKLTLGQNVLVIAPHNLESIVRQPPDRWMTNARMTHYQSLLLNERVSFAPPAILNPATLLPVESDDTPIHICSEILAEETGTRPDLRDQPLPGVPAWYTDGSSFIMDGRRQAGAAIVDNKRTVWASNLPEGTSAQKAELIALTQALRLAEGKSINIYTDSRYAFATAHVHGAIYKQRGWLTSAGKDIKNKEEILALLEAIHLPKRVAIIHCPGHQRGTDPVATGNRKADEAAKQAAQSTRILTETTKNAGKRTADGSEFEKRTADGSEFESPKKKAKVE

SEQ ID NO: 6719 - protein, 2122 aa, synthetic construct
MPAAKRVKLDGGDKKYSIGLDIGTNSVGWAVITDEYKVPSKKFKVLGNTDRHSIKKNLIGALLFDSGETAEATRLKRTARRRYTRRKNRICYLQEIFSNEMAKVDDSFFHRLEESFLVEEDKKHERHPIFGNIVDEVAYHEKYPTIYHLRKKLVDSTDKADLRLIYLALAHMIKFRGHFLIEGDLNPDNSDVDKLFIQLVQTYNQLFEENPINASGVDAKAILSARLSKSRRLENLIAQLPGEKKNGLFGNLIALSLGLTPNFKSNFDLAEDAKLQLSKDTYDDDLDNLLAQIGDQYADLFLAAKNLSDAILLSDILRVNTEITKAPLSASMIKRYDEHHQDLTLLKALVRQQLPEKYKEIFFDQSKNGYAGYIDGGASQEEFYKFIKPILEKMDGTEELLVKLNREDLLRKQRTFDNGSIPHQIHLGELHAILRRQEDFYPFLKDNREKIEKILTFRIPYYVGPLARGNSRFAWMTRKSEETITPWNFEEVVDKGASAQSFIERMTNFDKNLPNEKVLPKHSLLYEYFTVYNELTKVKYVTEGMRKPAFLSGEQKKAIVDLLFKTNRKVTVKQLKEDYFKKIECFDSVEISGVEDRFNASLGTYHDLLKIIKDKDFLDNEENEDILEDIVLTLTLFEDREMIEERLKTYAHLFDDKVMKQLKRRRYTGWGRLSRKLINGIRDKQSGKTILDFLKSDGFANRNFMQLIHDDSLTFKEDIQKAQVSGQGDSLHEHIANLAGSPAIKKGILQTVKVVDELVKVMGRHKPENIVIEMARENQTTQKGQKNSRERMKRIEEGIKELGSQILKEHPVENTQLQNEKLYLYYLQNGRDMYVDQELDINRLSDYDVDHIVPQSFLKDDSIDNKVLTRSDKARGKSDNVPSEEVVKKMKNYWRQLLNAKLITQRKFDNLTKAERGGLSELDKAGFIKRQLVETRQITKHVAQILDSRMNTKYDENDKLIREVKVITLKSKLVSDFRKDFQFYKVREINNYHHAHDAYLNAVVGTALIKKYPKLESEFVYGDYKVYDVRKMIAKSEQEIGKATAKYFFYSNIMNFFKTEITLANGEIRKRPLIETNGETGEIVWDKGRDFATVRKVLSMPQVNIVKKTEVQTGGFSKESILPKRNSDKLIARKKDWDPKKYGGFDSPTVAYSVLVVAKVEKGKSKKLKSVKELLGITIMERSSFEKNPIDFLEAKGYKEVKKDLIIKLPKYSLFELENGRKRMLASAGELQKGNELALPSKYVNFLYLASHYEKLKGSPEDNEQKQLFVEQHKHYLDEIIEQISEFSKRVILADANLDKVLSAYNKHRDKPIREQAENIIHLFTLTNLGAPAAFKYFDTTIDRKRYTSTKEVLDATLIHQSITGLYETRIDLSQLGGDGGPAPGGGGGLLGRDLLTKLKAQIQFSTEGPQVTWEDRPAMCLVLNLEEEYRLHEKPVPPSIDPSWLQLFPMVWAEKAGMGLANQVPPVVVELKSDASPVAVRQYPMSKEAREGIRPHIQRFLDLGILVPCQSPWNTPLLPVKKPGTNDYRPVQDLREVNKRVQDIHPTVPNPYNLLSSLPPSHTWYSVLDLKDAFFCLKLHPNSQPLFAFEWRDPEKGNTGQLTWTRLPQGFKNSPTLFNEALHRDLASFRALNPQVVMLQYVDDLLVAAPTYRDCKEGTRRLLQELSKLGYRVSAKKAQLCREEVTYLGYLLKGGKRWLTPARKATVMKIPTPTTPRQVREFLGKAGFCRLFIPGFASLAAPLYPLTRPKVPFTWTEAHQEAFGRIKEALLSAPALALPDLTKPFALYVDEKEGVARGVLTQTLGPWRRPVAYLSKKLDPVASGWPTCLKAIAAVALLLKDADKLTLGQNVLVIAPHNLESIVRQPPDRWMTNARMTHYQSLLLNERVSFAPPAILNPATLLPVESDDTPIHICSEILAEETGTRPDLRDQPLPGVPAWYTDGSSFIMDGRRQAGAAIVDNKRTVWASNLPEGTSAQKAELIALTQALRLAEGKSINIYTDSRYAFATAHVHGAIYKQRGWLTSAGKDIKNKEEILALLEAIHLPKRVAIIHCPGHQRGTDPVATGNRKADEAAKQAAQSTRILTETTKNAGKRTADGSEFEKRTADGSEFESPKKKAKVE

SEQ ID NO: 6720 - protein, 2213 aa, synthetic construct
MPAAKRVKLDGGDKKYSIGLDIGTNSVGWAVITDEYKVPSKKFKVLGNTDRHSIKKNLIGALLFDSGETAEATRLKRTARRRYTRRKNRICYLQEIFSNEMAKVDDSFFHRLEESFLVEEDKKHERHPIFGNIVDEVAYHEKYPTIYHLRKKLVDSTDKADLRLIYLALAHMIKFRGHFLIEGDLNPDNSDVDKLFIQLVQTYNQLFEENPINASGVDAKAILSARLSKSRRLENLIAQLPGEKKNGLFGNLIALSLGLTPNFKSNFDLAEDAKLQLSKDTYDDDLDNLLAQIGDQYADLFLAAKNLSDAILLSDILRVNTEITKAPLSASMIKRYDEHHQDLTLLKALVRQQLPEKYKEIFFDQSKNGYAGYIDGGASQEEFYKFIKPILEKMDGTEELLVKLNREDLLRKQRTFDNGSIPHQIHLGELHAILRRQEDFYPFLKDNREKIEKILTFRIPYYVGPLARGNSRFAWMTRKSEETITPWNFEEVVDKGASAQSFIERMTNFDKNLPNEKVLPKHSLLYEYFTVYNELTKVKYVTEGMRKPAFLSGEQKKAIVDLLFKTNRKVTVKQLKEDYFKKIECFDSVEISGVEDRFNASLGTYHDLLKIIKDKDFLDNEENEDILEDIVLTLTLFEDREMIEERLKTYAHLFDDKVMKQLKRRRYTGWGRLSRKLINGIRDKQSGKTILDFLKSDGFANRNFMQLIHDDSLTFKEDIQKAQVSGQGDSLHEHIANLAGSPAIKKGILQTVKVVDELVKVMGRHKPENIVIEMARENQTTQKGQKNSRERMKRIEEGIKELGSQILKEHPVENTQLQNEKLYLYYLQNGRDMYVDQELDINRLSDYDVDHIVPQSFLKDDSIDNKVLTRSDKARGKSDNVPSEEVVKKMKNYWRQLLNAKLITQRKFDNLTKAERGGLSELDKAGFIKRQLVETRQITKHVAQILDSRMNTKYDENDKLIREVKVITLKSKLVSDFRKDFQFYKVREINNYHHAHDAYLNAVVGTALIKKYPKLESEFVYGDYKVYDVRKMIAKSEQEIGKATAKYFFYSNIMNFFKTEITLANGEIRKRPLIETNGETGEIVWDKGRDFATVRKVLSMPQVNIVKKTEVQTGGFSKESILPKRNSDKLIARKKDWDPKKYGGFDSPTVAYSVLVVAKVEKGKSKKLKSVKELLGITIMERSSFEKNPIDFLEAKGYKEVKKDLIIKLPKYSLFELENGRKRMLASAGELQKGNELALPSKYVNFLYLASHYEKLKGSPEDNEQKQLFVEQHKHYLDEIIEQISEFSKRVILADANLDKVLSAYNKHRDKPIREQAENIIHLFTLTNLGAPAAFKYFDTTIDRKRYTSTKEVLDATLIHQSITGLYETRIDLSQLGGDGGPAPGGGGGTLGDQGSRGSDPLPEPRVTLTVEGIPTEFLVNTGAEHSVLTKPMGKMGSKRTVVAGATGSKVYPWTTKRLLKIGQKQVTHSFLVIPECPAPLLGRDLLTKLKAQIQFSTEGPQVTWEDRPAMCLVLNLEEEYRLHEKPVPPSIDPSWLQLFPMVWAEKAGMGLANQVPPVVVELKSDASPVAVRQYPMSKEAREGIRPHIQRFLDLGILVPCQSPWNTPLLPVKKPGTNDYRPVQDLREVNKRVQDIHPTVPNPYNLLSSLPPSHTWYSVLDLKDAFFCLKLHPNSQPLFAFEWRDPEKGNTGQLTWTRLPQGFKNSPTLFNEALHRDLASFRALNPQVVMLQYVDDLLVAAPTYRDCKEGTRRLLQELSKLGYRVSAKKAQLCREEVTYLGYLLKGGKRWLTPARKATVMKIPTPTTPRQVREFLGTAGFCRLWIPGFASLAAPLYPLTRPKVPFTWTEAHQEAFGRIKEALLSAPALALPDLTKPFALYVDEKEGVARGVLTQTLGPWRRPVAYLSKKLDPVASGWPTCLKAIAAVALLLKDADKLTLGQNVLVIAPHNLESIVRQPPDRWMTNARMTHYQSLLLNERVSFAPPAILNPATLLPVESDDTPIHICSEILAEETGTRPDLRDQPLPGVPAWYTDGSSFIMDGRRQAGAAIVDNKRTVWASNLPEGTSAQKAELIALTQALRLAEGKSINIYTDSRYAFATAHVHGAIYKQRGWLTSAGKDIKNKEEILALLEAIHLPKRVAIIHCPGHQRGTDPVATGNRKADEAAKQAAQSTRILTETTKNAGKRTADGSEFEKRTADGSEFESPKKKAKVE

SEQ ID NO: 6721 - protein, 2091 aa, synthetic construct
MPAAKRVKLDGGDKKYSIGLDIGTNSVGWAVITDEYKVPSKKFKVLGNTDRHSIKKNLIGALLFDSGETAEATRLKRTARRRYTRRKNRICYLQEIFSNEMAKVDDSFFHRLEESFLVEEDKKHERHPIFGNIVDEVAYHEKYPTIYHLRKKLVDSTDKADLRLIYLALAHMIKFRGHFLIEGDLNPDNSDVDKLFIQLVQTYNQLFEENPINASGVDAKAILSARLSKSRRLENLIAQLPGEKKNGLFGNLIALSLGLTPNFKSNFDLAEDAKLQLSKDTYDDDLDNLLAQIGDQYADLFLAAKNLSDAILLSDILRVNTEITKAPLSASMIKRYDEHHQDLTLLKALVRQQLPEKYKEIFFDQSKNGYAGYIDGGASQEEFYKFIKPILEKMDGTEELLVKLNREDLLRKQRTFDNGSIPHQIHLGELHAILRRQEDFYPFLKDNREKIEKILTFRIPYYVGPLARGNSRFAWMTRKSEETITPWNFEEVVDKGASAQSFIERMTNFDKNLPNEKVLPKHSLLYEYFTVYNELTKVKYVTEGMRKPAFLSGEQKKAIVDLLFKTNRKVTVKQLKEDYFKKIECFDSVEISGVEDRFNASLGTYHDLLKIIKDKDFLDNEENEDILEDIVLTLTLFEDREMIEERLKTYAHLFDDKVMKQLKRRRYTGWGRLSRKLINGIRDKQSGKTILDFLKSDGFANRNFMQLIHDDSLTFKEDIQKAQVSGQGDSLHEHIANLAGSPAIKKGILQTVKVVDELVKVMGRHKPENIVIEMARENQTTQKGQKNSRERMKRIEEGIKELGSQILKEHPVENTQLQNEKLYLYYLQNGRDMYVDQELDINRLSDYDVDHIVPQSFLKDDSIDNKVLTRSDKARGKSDNVPSEEVVKKMKNYWRQLLNAKLITQRKFDNLTKAERGGLSELDKAGFIKRQLVETRQITKHVAQILDSRMNTKYDENDKLIREVKVITLKSKLVSDFRKDFQFYKVREINNYHHAHDAYLNAVVGTALIKKYPKLESEFVYGDYKVYDVRKMIAKSEQEIGKATAKYFFYSNIMNFFKTEITLANGEIRKRPLIETNGETGEIVWDKGRDFATVRKVLSMPQVNIVKKTEVQTGGFSKESILPKRNSDKLIARKKDWDPKKYGGFDSPTVAYSVLVVAKVEKGKSKKLKSVKELLGITIMERSSFEKNPIDFLEAKGYKEVKKDLIIKLPKYSLFELENGRKRMLASAGELQKGNELALPSKYVNFLYLASHYEKLKGSPEDNEQKQLFVEQHKHYLDEIIEQISEFSKRVILADANLDKVLSAYNKHRDKPIREQAENIIHLFTLTNLGAPAAFKYFDTTIDRKRYTSTKEVLDATLIHQSITGLYETRIDLSQLGGDGGPAPGGGGGTLGIEDEYRLHETSTEPDVSLGSTWLSDFPQAWAETGGMGLAVRQAPLIIPLKATSTPVSIQQYPMSHEARLGIKPHIQRLLDQGILVPCQSPWNTPLLPVKKPGTNDYRPVQDLREVNKRVEDIHPTVPNPYNLLSGLPPSHQWYTVLDLKDAFFCLRLHPTSQPLFAFEWRDPGMGISGQLTWTRLPQGFKNSPTLFNEALHRDLADFRIQHPDLILLQYVDDILLAATSELDCQQGTRALLQTLGDLGYRASAKKAQICQKQVKYLGYLLREGQRWLTEARKETVMGQPVPKTPRQLREFLGTAGFCRLWIPGFAEMAAPLYPLTKPGTLFSWGPDQQKAYQEIKQALLTAPALGLPDLTKPFELFVDEKQGYAKGVLTQKLGPWRRPVAYLSKKLDPVAAGWPPCLRMVAAIAVLTKDAGKLTMGQPLVILAPHAVEALVKQPPDRWLSNARMTHYQAMLLDTDRVQFGPVVALNPATLLPLPEEGAPHDCLEILAETHGTRPDLTDQPIPDADHTWYTDGSSFLQEGQRKAGAAVTTETEVIWAGALPAGTSAQRAELIALTQALKMAEGKRLNVYTDSRYAFATAHIHGEIYRRRGWLTSEGREIKNKSEILALLKALFLPKRLSIIHCLGHQKGDSAEARGNRLADQAAREAAIKTPPDTSTLLAGKRTADGSEFEKRTADGSEFESPKKKAKVE

SEQ ID NO: 6722 - protein, 2085 aa, synthetic construct
MPAAKRVKLDGGDKKYSIGLDIGTNSVGWAVITDEYKVPSKKFKVLGNTDRHSIKKNLIGALLFDSGETAEATRLKRTARRRYTRRKNRICYLQEIFSNEMAKVDDSFFHRLEESFLVEEDKKHERHPIFGNIVDEVAYHEKYPTIYHLRKKLVDSTDKADLRLIYLALAHMIKFRGHFLIEGDLNPDNSDVDKLFIQLVQTYNQLFEENPINASGVDAKAILSARLSKSRRLENLIAQLPGEKKNGLFGNLIALSLGLTPNFKSNFDLAEDAKLQLSKDTYDDDLDNLLAQIGDQYADLFLAAKNLSDAILLSDILRVNTEITKAPLSASMIKRYDEHHQDLTLLKALVRQQLPEKYKEIFFDQSKNGYAGYIDGGASQEEFYKFIKPILEKMDGTEELLVKLNREDLLRKQRTFDNGSIPHQIHLGELHAILRRQEDFYPFLKDNREKIEKILTFRIPYYVGPLARGNSRFAWMTRKSEETITPWNFEEVVDKGASAQSFIERMTNFDKNLPNEKVLPKHSLLYEYFTVYNELTKVKYVTEGMRKPAFLSGEQKKAIVDLLFKTNRKVTVKQLKEDYFKKIECFDSVEISGVEDRFNASLGTYHDLLKIIKDKDFLDNEENEDILEDIVLTLTLFEDREMIEERLKTYAHLFDDKVMKQLKRRRYTGWGRLSRKLINGIRDKQSGKTILDFLKSDGFANRNFMQLIHDDSLTFKEDIQKAQVSGQGDSLHEHIANLAGSPAIKKGILQTVKVVDELVKVMGRHKPENIVIEMARENQTTQKGQKNSRERMKRIEEGIKELGSQILKEHPVENTQLQNEKLYLYYLQNGRDMYVDQELDINRLSDYDVDHIVPQSFLKDDSIDNKVLTRSDKARGKSDNVPSEEVVKKMKNYWRQLLNAKLITQRKFDNLTKAERGGLSELDKAGFIKRQLVETRQITKHVAQILDSRMNTKYDENDKLIREVKVITLKSKLVSDFRKDFQFYKVREINNYHHAHDAYLNAVVGTALIKKYPKLESEFVYGDYKVYDVRKMIAKSEQEIGKATAKYFFYSNIMNFFKTEITLANGEIRKRPLIETNGETGEIVWDKGRDFATVRKVLSMPQVNIVKKTEVQTGGFSKESILPKRNSDKLIARKKDWDPKKYGGFDSPTVAYSVLVVAKVEKGKSKKLKSVKELLGITIMERSSFEKNPIDFLEAKGYKEVKKDLIIKLPKYSLFELENGRKRMLASAGELQKGNELALPSKYVNFLYLASHYEKLKGSPEDNEQKQLFVEQHKHYLDEIIEQISEFSKRVILADANLDKVLSAYNKHRDKPIREQAENIIHLFTLTNLGAPAAFKYFDTTIDRKRYTSTKEVLDATLIHQSITGLYETRIDLSQLGGDGGPAPGGGGGTLQLDDEYRLYSPLVKPDQNIQFWLEQFPQAWAETAGMGLAKQVPPQVIQLKASATPVSVRQYPLSKEAQEGIRPHVQRLIQQGILVPVQSPWNTPLLPVRKPGTNDYRPVQDLREVNKRVQDIHPTVPNPYNLLCALPPQRSWYTVLDLKDAFFCLRLHPTSQPLFAFEWRDPGTGRTGQLTWTRLPQGFKNSPTIFDEALHRDLANFRIQHPQVTLLQYVDDLLLAGATKQDCLEGTKALLLELSDLGYRASAKKAQICRREVTYLGYSLRDGQRWLTEARKKTVVQIPAPTTAKQVREFLGTAGFCRLWIPGFATLAAPLYPLTKEKGEFSWAPEHQKAFDAIKKALLSAPALALPDVTKPFTLYVDERKGVARGVLTQTLGPWRRPVAYLSKKLDPVASGWPVCLKAIAAVAILVKDADKLTLGQNITVIAPHALENIVRQPPDRWMTNARMTHYQSLLLTERVTFAPPAALNPATLLPEETDEPVTHDCHQLLIEETGVRKDLTDIPLTGEVLTWFTDGSSYVVEGKRMAGAAVVDGTRTIWASSLPEGTSAQKAELMALTQALRLAEGKSINIYTDSRYAFATAHVHGAIYKQRGLLTSAGREIKNKEEILSLLEALHLPKRLAIIHCPGHQKAKDPISRGNQMADRVAKQAAQGVNLLAGKRTADGSEFEKRTADGSEFESPKKKAKVE

SEQ ID NO: 6723 - protein, 2082 aa, synthetic construct
MPAAKRVKLDGGDKKYSIGLDIGTNSVGWAVITDEYKVPSKKFKVLGNTDRHSIKKNLIGALLFDSGETAEATRLKRTARRRYTRRKNRICYLQEIFSNEMAKVDDSFFHRLEESFLVEEDKKHERHPIFGNIVDEVAYHEKYPTIYHLRKKLVDSTDKADLRLIYLALAHMIKFRGHFLIEGDLNPDNSDVDKLFIQLVQTYNQLFEENPINASGVDAKAILSARLSKSRRLENLIAQLPGEKKNGLFGNLIALSLGLTPNFKSNFDLAEDAKLQLSKDTYDDDLDNLLAQIGDQYADLFLAAKNLSDAILLSDILRVNTEITKAPLSASMIKRYDEHHQDLTLLKALVRQQLPEKYKEIFFDQSKNGYAGYIDGGASQEEFYKFIKPILEKMDGTEELLVKLNREDLLRKQRTFDNGSIPHQIHLGELHAILRRQEDFYPFLKDNREKIEKILTFRIPYYVGPLARGNSRFAWMTRKSEETITPWNFEEVVDKGASAQSFIERMTNFDKNLPNEKVLPKHSLLYEYFTVYNELTKVKYVTEGMRKPAFLSGEQKKAIVDLLFKTNRKVTVKQLKEDYFKKIECFDSVEISGVEDRFNASLGTYHDLLKIIKDKDFLDNEENEDILEDIVLTLTLFEDREMIEERLKTYAHLFDDKVMKQLKRRRYTGWGRLSRKLINGIRDKQSGKTILDFLKSDGFANRNFMQLIHDDSLTFKEDIQKAQVSGQGDSLHEHIANLAGSPAIKKGILQTVKVVDELVKVMGRHKPENIVIEMARENQTTQKGQKNSRERMKRIEEGIKELGSQILKEHPVENTQLQNEKLYLYYLQNGRDMYVDQELDINRLSDYDVDHIVPQSFLKDDSIDNKVLTRSDKARGKSDNVPSEEVVKKMKNYWRQLLNAKLITQRKFDNLTKAERGGLSELDKAGFIKRQLVETRQITKHVAQILDSRMNTKYDENDKLIREVKVITLKSKLVSDFRKDFQFYKVREINNYHHAHDAYLNAVVGTALIKKYPKLESEFVYGDYKVYDVRKMIAKSEQEIGKATAKYFFYSNIMNFFKTEITLANGEIRKRPLIETNGETGEIVWDKGRDFATVRKVLSMPQVNIVKKTEVQTGGFSKESILPKRNSDKLIARKKDWDPKKYGGFDSPTVAYSVLVVAKVEKGKSKKLKSVKELLGITIMERSSFEKNPIDFLEAKGYKEVKKDLIIKLPKYSLFELENGRKRMLASAGELQKGNELALPSKYVNFLYLASHYEKLKGSPEDNEQKQLFVEQHKHYLDEIIEQISEFSKRVILADANLDKVLSAYNKHRDKPIREQAENIIHLFTLTNLGAPAAFKYFDTTIDRKRYTSTKEVLDATLIHQSITGLYETRIDLSQLGGDGGPAPGGGGGIPWLMKKPLQLTTLVPLQEYEERLLKQTMLTGSYKEKLQSLFLKYDALWQHWENQVGHRRIKPHHIATGTVNPRPQKQYPINPKAKASIQTVINDLLKQGVLIQQNSIMNTPVYPVPKPDGKWRMVLDYREVNKTIPLIAAQNQHSAGILSSIFRGKYKTTLDLSNGFWAHSITPESYWLTAFTWLGQQYCWTRLPQGFLNSPALFNADVVDLLKEVPNVQVYVDDIYISHDDPREHLEQLEKVFSLLLNAGYVVSLKKSEIAQHEVEFLGFNITKEGRGLTETFKQKLLNITPPRDLKQLQSILGLLNFARNFIPNFSELVKPLYNIIATAPGKYITWTTDNSQQLQNIISMLNSAENLEERNPEVRLIMKVNTSPSAGYIRFYNEFAKRPIMYLNYVYTKAEVKFTNTEKLLTTIHKGLIKALDLGMGQEILVYSPIVSMTKIQKTPLPERKALPIRWITWMSYLEDPRIQFHYDKTLPELQQVPTVTDDIIAKIKHPSEFSMVFYTDGSAIKHPNVNKSHNAGMGIAQVQFKPEFTVINTWSIPLGDHTAQLAEVAAVEFACKKALKIDGPVLIVTDSFYVAESVNKELPYWQSNGFFNNKKKPLKHVSKWKSIADCIQLKPDIIIIHEKGHQPTASTFHTEGNNLADKLATQGSYVVNAGKRTADGSEFEKRTADGSEFESPKKKAKVE

SEQ ID NO: 6724 - protein, 2082 aa, synthetic construct
MPAAKRVKLDGGDKKYSIGLDIGTNSVGWAVITDEYKVPSKKFKVLGNTDRHSIKKNLIGALLFDSGETAEATRLKRTARRRYTRRKNRICYLQEIFSNEMAKVDDSFFHRLEESFLVEEDKKHERHPIFGNIVDEVAYHEKYPTIYHLRKKLVDSTDKADLRLIYLALAHMIKFRGHFLIEGDLNPDNSDVDKLFIQLVQTYNQLFEENPINASGVDAKAILSARLSKSRRLENLIAQLPGEKKNGLFGNLIALSLGLTPNFKSNFDLAEDAKLQLSKDTYDDDLDNLLAQIGDQYADLFLAAKNLSDAILLSDILRVNTEITKAPLSASMIKRYDEHHQDLTLLKALVRQQLPEKYKEIFFDQSKNGYAGYIDGGASQEEFYKFIKPILEKMDGTEELLVKLNREDLLRKQRTFDNGSIPHQIHLGELHAILRRQEDFYPFLKDNREKIEKILTFRIPYYVGPLARGNSRFAWMTRKSEETITPWNFEEVVDKGASAQSFIERMTNFDKNLPNEKVLPKHSLLYEYFTVYNELTKVKYVTEGMRKPAFLSGEQKKAIVDLLFKTNRKVTVKQLKEDYFKKIECFDSVEISGVEDRFNASLGTYHDLLKIIKDKDFLDNEENEDILEDIVLTLTLFEDREMIEERLKTYAHLFDDKVMKQLKRRRYTGWGRLSRKLINGIRDKQSGKTILDFLKSDGFANRNFMQLIHDDSLTFKEDIQKAQVSGQGDSLHEHIANLAGSPAIKKGILQTVKVVDELVKVMGRHKPENIVIEMARENQTTQKGQKNSRERMKRIEEGIKELGSQILKEHPVENTQLQNEKLYLYYLQNGRDMYVDQELDINRLSDYDVDHIVPQSFLKDDSIDNKVLTRSDKARGKSDNVPSEEVVKKMKNYWRQLLNAKLITQRKFDNLTKAERGGLSELDKAGFIKRQLVETRQITKHVAQILDSRMNTKYDENDKLIREVKVITLKSKLVSDFRKDFQFYKVREINNYHHAHDAYLNAVVGTALIKKYPKLESEFVYGDYKVYDVRKMIAKSEQEIGKATAKYFFYSNIMNFFKTEITLANGEIRKRPLIETNGETGEIVWDKGRDFATVRKVLSMPQVNIVKKTEVQTGGFSKESILPKRNSDKLIARKKDWDPKKYGGFDSPTVAYSVLVVAKVEKGKSKKLKSVKELLGITIMERSSFEKNPIDFLEAKGYKEVKKDLIIKLPKYSLFELENGRKRMLASAGELQKGNELALPSKYVNFLYLASHYEKLKGSPEDNEQKQLFVEQHKHYLDEIIEQISEFSKRVILADANLDKVLSAYNKHRDKPIREQAENIIHLFTLTNLGAPAAFKYFDTTIDRKRYTSTKEVLDATLIHQSITGLYETRIDLSQLGGDGGPAPGGGGGIPWLMKKPLQLTTLVPLQEYEERLLKQTMLTGSYKEKLQSLFLKYDALWQHWENQVGHRRIKPHHIATGTVNPRPQKQYPINPKAKASIQTVINDLLKQGVLIQQNSIMNTPVYPVPKPDGKWRMVLDYREVNKTIPLIAAQNQHSAGILSSIFRGKYKTTLDLSNGFWAHSITPESYWLTAFTWLGQQYCWTRLPQGFLNSPALFNADVVDLLKEVPNVQVYVDDIYISHDDPREHLEQLEKVFSLLLNAGYVVSLKKSEIAQHEVEFLGFNITKEGRGLTETFKQKLLNITPPRDLKQLQSILGKLNFARNFIPNFSELVKPLYNIIATAPGKYITWTTDNSQQLQNIISMLNSAENLEERNPEVRLIMKVNTSPSAGYIRFYNEFAKRPIMYLNYVYTKAEVKFTNTEKLLTTIHKGLIKALDLGMGQEILVYSPIVSMTKIQKTPLPERKALPIRWITWMSYLEDPRIQFHYDKTLPELQQVPTVTDDIIAKIKHPSEFSMVFYTDGSAIKHPNVNKSHNAGMGIAQVQFKPEFTVINTWSIPLGDHTAQLAEVAAVEFACKKALKIDGPVLIVTDSFYVAESVNKELPYWQSNGFFNNKKKPLKHVSKWKSIADCIQLKPDIIIIHEKGHQPTASTFHTEGNNLADKLATQGSYVVNAGKRTADGSEFEKRTADGSEFESPKKKAKVE

SEQ ID NO: 6725 - protein, 2091 aa, synthetic construct
MPAAKRVKLDGGDKKYSIGLDIGTNSVGWAVITDEYKVPSKKFKVLGNTDRHSIKKNLIGALLFDSGETAEATRLKRTARRRYTRRKNRICYLQEIFSNEMAKVDDSFFHRLEESFLVEEDKKHERHPIFGNIVDEVAYHEKYPTIYHLRKKLVDSTDKADLRLIYLALAHMIKFRGHFLIEGDLNPDNSDVDKLFIQLVQTYNQLFEENPINASGVDAKAILSARLSKSRRLENLIAQLPGEKKNGLFGNLIALSLGLTPNFKSNFDLAEDAKLQLSKDTYDDDLDNLLAQIGDQYADLFLAAKNLSDAILLSDILRVNTEITKAPLSASMIKRYDEHHQDLTLLKALVRQQLPEKYKEIFFDQSKNGYAGYIDGGASQEEFYKFIKPILEKMDGTEELLVKLNREDLLRKQRTFDNGSIPHQIHLGELHAILRRQEDFYPFLKDNREKIEKILTFRIPYYVGPLARGNSRFAWMTRKSEETITPWNFEEVVDKGASAQSFIERMTNFDKNLPNEKVLPKHSLLYEYFTVYNELTKVKYVTEGMRKPAFLSGEQKKAIVDLLFKTNRKVTVKQLKEDYFKKIECFDSVEISGVEDRFNASLGTYHDLLKIIKDKDFLDNEENEDILEDIVLTLTLFEDREMIEERLKTYAHLFDDKVMKQLKRRRYTGWGRLSRKLINGIRDKQSGKTILDFLKSDGFANRNFMQLIHDDSLTFKEDIQKAQVSGQGDSLHEHIANLAGSPAIKKGILQTVKVVDELVKVMGRHKPENIVIEMARENQTTQKGQKNSRERMKRIEEGIKELGSQILKEHPVENTQLQNEKLYLYYLQNGRDMYVDQELDINRLSDYDVDHIVPQSFLKDDSIDNKVLTRSDKARGKSDNVPSEEVVKKMKNYWRQLLNAKLITQRKFDNLTKAERGGLSELDKAGFIKRQLVETRQITKHVAQILDSRMNTKYDENDKLIREVKVITLKSKLVSDFRKDFQFYKVREINNYHHAHDAYLNAVVGTALIKKYPKLESEFVYGDYKVYDVRKMIAKSEQEIGKATAKYFFYSNIMNFFKTEITLANGEIRKRPLIETNGETGEIVWDKGRDFATVRKVLSMPQVNIVKKTEVQTGGFSKESILPKRNSDKLIARKKDWDPKKYGGFDSPTVAYSVLVVAKVEKGKSKKLKSVKELLGITIMERSSFEKNPIDFLEAKGYKEVKKDLIIKLPKYSLFELENGRKRMLASAGELQKGNELALPSKYVNFLYLASHYEKLKGSPEDNEQKQLFVEQHKHYLDEIIEQISEFSKRVILADANLDKVLSAYNKHRDKPIREQAENIIHLFTLTNLGAPAAFKYFDTTIDRKRYTSTKEVLDATLIHQSITGLYETRIDLSQLGGDGGPAPGGGGGTLNIEDEYRLHETSKEPDVPLGSTWLSDFPQAWAETGGMGLAVRQAPLIIPLKATSTPVSIKQYPMSQEARLGIKPHIQRLLDQGILVPCQSPWNTPLLPVKKPGTNDYRPVQDLREVNKRVEDIHPTVPNPYNLLSGLPPSHQWYTVLDLKDAFFCLRLHPTSQPLFAFEWRDPEMGISGQLTWTRLPQGFKNSPTLFNEALHRDLADFRIQHPDLILLQYVDDLLLAATSEQDCQRGTRALLQTLGNLGYRASAKKAQICQKQVKYLGYLLKEGQRWLTEARKETVMGQPTPKTPRQLREFLGTAGFCRLWIPGFAEMAAPLYPLTKPGTLFNWGPDQQKAYQEIKQALLTAPALGLPDLTKPFELFVDEKQGYAKGVLTQKLGPWRRPVAYLSKKLDPVAAGWPPCLRMVAAIAVLTKDAGKLTMGQPLVILAPHAVEALVKQPPDRWLSNARMTHYQAMLLDTDRVQFGPVVALNPATLLPLPEKEAPHDCLEILAETHGTRPDLTDQPIPDADYTWYTDGSSFLQEGQRRAGAAVTTETEVIWARALPAGTSAQRAELIALTQALKMAEGKKLNVYTDSRYAFATAHVHGEIYRRRGWLTSEGREIKNKNEILALLKALFLPKRLSIIHCPGHQKGNSAEARGNRMADQAAREAAMKAVLETSTLLAGKRTADGSEFEKRTADGSEFESPKKKAKVE

SEQ ID NO: 6726 - protein, 2091 aa, synthetic construct
MPAAKRVKLDGGDKKYSIGLDIGTNSVGWAVITDEYKVPSKKFKVLGNTDRHSIKKNLIGALLFDSGETAEATRLKRTARRRYTRRKNRICYLQEIFSNEMAKVDDSFFHRLEESFLVEEDKKHERHPIFGNIVDEVAYHEKYPTIYHLRKKLVDSTDKADLRLIYLALAHMIKFRGHFLIEGDLNPDNSDVDKLFIQLVQTYNQLFEENPINASGVDAKAILSARLSKSRRLENLIAQLPGEKKNGLFGNLIALSLGLTPNFKSNFDLAEDAKLQLSKDTYDDDLDNLLAQIGDQYADLFLAAKNLSDAILLSDILRVNTEITKAPLSASMIKRYDEHHQDLTLLKALVRQQLPEKYKEIFFDQSKNGYAGYIDGGASQEEFYKFIKPILEKMDGTEELLVKLNREDLLRKQRTFDNGSIPHQIHLGELHAILRRQEDFYPFLKDNREKIEKILTFRIPYYVGPLARGNSRFAWMTRKSEETITPWNFEEVVDKGASAQSFIERMTNFDKNLPNEKVLPKHSLLYEYFTVYNELTKVKYVTEGMRKPAFLSGEQKKAIVDLLFKTNRKVTVKQLKEDYFKKIECFDSVEISGVEDRFNASLGTYHDLLKIIKDKDFLDNEENEDILEDIVLTLTLFEDREMIEERLKTYAHLFDDKVMKQLKRRRYTGWGRLSRKLINGIRDKQSGKTILDFLKSDGFANRNFMQLIHDDSLTFKEDIQKAQVSGQGDSLHEHIANLAGSPAIKKGILQTVKVVDELVKVMGRHKPENIVIEMARENQTTQKGQKNSRERMKRIEEGIKELGSQILKEHPVENTQLQNEKLYLYYLQNGRDMYVDQELDINRLSDYDVDHIVPQSFLKDDSIDNKVLTRSDKARGKSDNVPSEEVVKKMKNYWRQLLNAKLITQRKFDNLTKAERGGLSELDKAGFIKRQLVETRQITKHVAQILDSRMNTKYDENDKLIREVKVITLKSKLVSDFRKDFQFYKVREINNYHHAHDAYLNAVVGTALIKKYPKLESEFVYGDYKVYDVRKMIAKSEQEIGKATAKYFFYSNIMNFFKTEITLANGEIRKRPLIETNGETGEIVWDKGRDFATVRKVLSMPQVNIVKKTEVQTGGFSKESILPKRNSDKLIARKKDWDPKKYGGFDSPTVAYSVLVVAKVEKGKSKKLKSVKELLGITIMERSSFEKNPIDFLEAKGYKEVKKDLIIKLPKYSLFELENGRKRMLASAGELQKGNELALPSKYVNFLYLASHYEKLKGSPEDNEQKQLFVEQHKHYLDEIIEQISEFSKRVILADANLDKVLSAYNKHRDKPIREQAENIIHLFTLTNLGAPAAFKYFDTTIDRKRYTSTKEVLDATLIHQSITGLYETRIDLSQLGGDGGPAPGGGGGTLNIEDEYRLHETSKEPDVPLGSTWLSDFPQAWAETGGMGLAVRQAPLIIPLKATSTPVSIKQYPMSQEARLGIKPHIQRLLDQGILVPCQSPWNTPLLPVKKPGTNDYRPVQDLREVNKRVEDIHPTVPNPYNLLSGLPPSHQWYTVLDLKDAFFCLRLHPTSQPLFAFEWRDPEMGISGQLTWTRLPQGFKNSPTLFNEALHRDLADFRIQHPDLILLQYVDDLLLAATSEQDCQRGTRALLQTLGNLGYRASAKKAQICQKQVKYLGYLLKEGQRWLTEARKETVMGQPTPKTPRQLREFLGKAGFCRLFIPGFAEMAAPLYPLTKPGTLFNWGPDQQKAYQEIKQALLTAPALGLPDLTKPFELFVDEKQGYAKGVLTQKLGPWRRPVAYLSKKLDPVAAGWPPCLRMVAAIAVLTKDAGKLTMGQPLVILAPHAVEALVKQPPDRWLSNARMTHYQAMLLDTDRVQFGPVVALNPATLLPLPEKEAPHDCLEILAETHGTRPDLTDQPIPDADYTWYTDGSSFLQEGQRRAGAAVTTETEVIWARALPAGTSAQRAELIALTQALKMAEGKKLNVYTDSRYAFATAHVHGEIYRRRGWLTSEGREIKNKNEILALLKALFLPKRLSIIHCPGHQKGNSAEARGNRMADQAAREAAMKAVLETSTLLAGKRTADGSEFEKRTADGSEFESPKKKAKVE

SEQ ID NO: 6727 - protein, 2095 aa, synthetic construct
MPAAKRVKLDGGDKKYSIGLDIGTNSVGWAVITDEYKVPSKKFKVLGNTDRHSIKKNLIGALLFDSGETAEATRLKRTARRRYTRRKNRICYLQEIFSNEMAKVDDSFFHRLEESFLVEEDKKHERHPIFGNIVDEVAYHEKYPTIYHLRKKLVDSTDKADLRLIYLALAHMIKFRGHFLIEGDLNPDNSDVDKLFIQLVQTYNQLFEENPINASGVDAKAILSARLSKSRRLENLIAQLPGEKKNGLFGNLIALSLGLTPNFKSNFDLAEDAKLQLSKDTYDDDLDNLLAQIGDQYADLFLAAKNLSDAILLSDILRVNTEITKAPLSASMIKRYDEHHQDLTLLKALVRQQLPEKYKEIFFDQSKNGYAGYIDGGASQEEFYKFIKPILEKMDGTEELLVKLNREDLLRKQRTFDNGSIPHQIHLGELHAILRRQEDFYPFLKDNREKIEKILTFRIPYYVGPLARGNSRFAWMTRKSEETITPWNFEEVVDKGASAQSFIERMTNFDKNLPNEKVLPKHSLLYEYFTVYNELTKVKYVTEGMRKPAFLSGEQKKAIVDLLFKTNRKVTVKQLKEDYFKKIECFDSVEISGVEDRFNASLGTYHDLLKIIKDKDFLDNEENEDILEDIVLTLTLFEDREMIEERLKTYAHLFDDKVMKQLKRRRYTGWGRLSRKLINGIRDKQSGKTILDFLKSDGFANRNFMQLIHDDSLTFKEDIQKAQVSGQGDSLHEHIANLAGSPAIKKGILQTVKVVDELVKVMGRHKPENIVIEMARENQTTQKGQKNSRERMKRIEEGIKELGSQILKEHPVENTQLQNEKLYLYYLQNGRDMYVDQELDINRLSDYDVDHIVPQSFLKDDSIDNKVLTRSDKARGKSDNVPSEEVVKKMKNYWRQLLNAKLITQRKFDNLTKAERGGLSELDKAGFIKRQLVETRQITKHVAQILDSRMNTKYDENDKLIREVKVITLKSKLVSDFRKDFQFYKVREINNYHHAHDAYLNAVVGTALIKKYPKLESEFVYGDYKVYDVRKMIAKSEQEIGKATAKYFFYSNIMNFFKTEITLANGEIRKRPLIETNGETGEIVWDKGRDFATVRKVLSMPQVNIVKKTEVQTGGFSKESILPKRNSDKLIARKKDWDPKKYGGFDSPTVAYSVLVVAKVEKGKSKKLKSVKELLGITIMERSSFEKNPIDFLEAKGYKEVKKDLIIKLPKYSLFELENGRKRMLASAGELQKGNELALPSKYVNFLYLASHYEKLKGSPEDNEQKQLFVEQHKHYLDEIIEQISEFSKRVILADANLDKVLSAYNKHRDKPIREQAENIIHLFTLTNLGAPAAFKYFDTTIDRKRYTSTKEVLDATLIHQSITGLYETRIDLSQLGGDGGGSSEAAAKGGTAPLEEEYRLFLEAPIQNVTLLEQWKREIPKVWAEINPPGLASTQAPIHVQLLSTALPVRVRQYPITLEAKRSLRETIRKFRAAGILRPVHSPWNTPLLPVRKSGTSEYRMVQDLREVNKRVETIHPTVPNPYTLLSLLPPDRIWYSVLDLKDAFFCIPLAPESQLIFAFEWADAEEGESGQLTWTRLPQGFKNSPTLFNEALNRDLQGFRLDHPSVSLLQYVDDLLIAADTQAACLSATRDLLMTLAELGYRVSGKKAQLCQEEVTYLGFKIHKGSRSLSNSRTQAILQIPVPKTKRQVREFLGTIGYCRLWIPGFAELAQPLYAATRPGNDPLVWGEKEEEAFQSLKLALTQPPALALPSLDKPFQLFVEETSGAAKGVLTQALGPWKRPVAYLSKRLDPVAAGWPRCLRAIAAAALLTREASKLTFGQDIEITSSHNLESLLRSPPDKWLTNARITQYQVLLLDPPRVRFKQTAALNPATLLPETDDTLPIHHCLDTLDSLTSTRPDLTDQPLAQAEATLFTDGSSYIRDGKRYAGAAVVTLDSVIWAEPLPIGTSAQKAELIALTKALEWSKDKSVNIYTDSRYAFATLHVHGMIYRERGWLTAGGKAIKNAPEILALLTAVWLPKRVAVMHCKGHQKDDAPTSTGNRRADEVAREVAIRPLSTQATISAGKRTADGSEFEKRTADGSEFESPKKKAKVE

SEQ ID NO: 6728 - protein, 2099 aa, synthetic construct
MPAAKRVKLDGGDKKYSIGLDIGTNSVGWAVITDEYKVPSKKFKVLGNTDRHSIKKNLIGALLFDSGETAEATRLKRTARRRYTRRKNRICYLQEIFSNEMAKVDDSFFHRLEESFLVEEDKKHERHPIFGNIVDEVAYHEKYPTIYHLRKKLVDSTDKADLRLIYLALAHMIKFRGHFLIEGDLNPDNSDVDKLFIQLVQTYNQLFEENPINASGVDAKAILSARLSKSRRLENLIAQLPGEKKNGLFGNLIALSLGLTPNFKSNFDLAEDAKLQLSKDTYDDDLDNLLAQIGDQYADLFLAAKNLSDAILLSDILRVNTEITKAPLSASMIKRYDEHHQDLTLLKALVRQQLPEKYKEIFFDQSKNGYAGYIDGGASQEEFYKFIKPILEKMDGTEELLVKLNREDLLRKQRTFDNGSIPHQIHLGELHAILRRQEDFYPFLKDNREKIEKILTFRIPYYVGPLARGNSRFAWMTRKSEETITPWNFEEVVDKGASAQSFIERMTNFDKNLPNEKVLPKHSLLYEYFTVYNELTKVKYVTEGMRKPAFLSGEQKKAIVDLLFKTNRKVTVKQLKEDYFKKIECFDSVEISGVEDRFNASLGTYHDLLKIIKDKDFLDNEENEDILEDIVLTLTLFEDREMIEERLKTYAHLFDDKVMKQLKRRRYTGWGRLSRKLINGIRDKQSGKTILDFLKSDGFANRNFMQLIHDDSLTFKEDIQKAQVSGQGDSLHEHIANLAGSPAIKKGILQTVKVVDELVKVMGRHKPENIVIEMARENQTTQKGQKNSRERMKRIEEGIKELGSQILKEHPVENTQLQNEKLYLYYLQNGRDMYVDQELDINRLSDYDVDHIVPQSFLKDDSIDNKVLTRSDKARGKSDNVPSEEVVKKMKNYWRQLLNAKLITQRKFDNLTKAERGGLSELDKAGFIKRQLVETRQITKHVAQILDSRMNTKYDENDKLIREVKVITLKSKLVSDFRKDFQFYKVREINNYHHAHDAYLNAVVGTALIKKYPKLESEFVYGDYKVYDVRKMIAKSEQEIGKATAKYFFYSNIMNFFKTEITLANGEIRKRPLIETNGETGEIVWDKGRDFATVRKVLSMPQVNIVKKTEVQTGGFSKESILPKRNSDKLIARKKDWDPKKYGGFDSPTVAYSVLVVAKVEKGKSKKLKSVKELLGITIMERSSFEKNPIDFLEAKGYKEVKKDLIIKLPKYSLFELENGRKRMLASAGELQKGNELALPSKYVNFLYLASHYEKLKGSPEDNEQKQLFVEQHKHYLDEIIEQISEFSKRVILADANLDKVLSAYNKHRDKPIREQAENIIHLFTLTNLGAPAAFKYFDTTIDRKRYTSTKEVLDATLIHQSITGLYETRIDLSQLGGDGGGSSEAAAKGGTVSLQDEHRLFDIPVTTSLPDVWLQDFPQAWAETGGLGRAKCQAPIIIDLKPTAVPVSIKQYPMSLEAHMGIRQHIIKFLELGVLRPCRSPWNTPLLPVKKPGTQDYRPVQDLREINKRTVDIHPTVPNPYNLLSTLKPDYSWYTVLDLKDAFFCLPLAPQSQELFAFEWKDPERGISGQLTWTRLPQGFKNSPTLFNEALHRDLTDFRTQHPEVTLLQYVDDLLLAAPTKKACTQGTRHLLQELGEKGYRASAKKAQICQTKVTYLGYILSEGKRWLTPGRIETVARIPPPRNPREVREFLGTAGFCRLWIPGFAELAAPLYALTKPSTPFTWQTEHQLAFEALKKALLSAPALGLPDTSKPFTLFLDERQGIAKGVLTQKLGPWKRPVAYLSKKLDPVAAGWPPCLRIMAATAMLVKDSAKLTLGQPLTVITPHTLEAIVRQPPDRWITNARLTHYQALLLDTDRVQFGPPVTLNPATLLPVPENQPSPHDCRQVLAETHGTREDLKDQELPDADHTWYTDGSSYLDSGTRRAGAAVVDGHNTIWAQSLPPGTSAQKAELIALTKALELSKGKKANIYTDSRYAFATAHTHGSIYERRGWLTSEGKEIKNKAEIIALLKALFLPQEVAIIHCPGHQKGQDPVAVGNRQADRVARQAAMAEVLTLATEPDNTSHITAGKRTADGSEFEKRTADGSEFESPKKKAKVE

SEQ ID NO: 6729 - protein, 2124 aa, synthetic construct
MPAAKRVKLDGGDKKYSIGLDIGTNSVGWAVITDEYKVPSKKFKVLGNTDRHSIKKNLIGALLFDSGETAEATRLKRTARRRYTRRKNRICYLQEIFSNEMAKVDDSFFHRLEESFLVEEDKKHERHPIFGNIVDEVAYHEKYPTIYHLRKKLVDSTDKADLRLIYLALAHMIKFRGHFLIEGDLNPDNSDVDKLFIQLVQTYNQLFEENPINASGVDAKAILSARLSKSRRLENLIAQLPGEKKNGLFGNLIALSLGLTPNFKSNFDLAEDAKLQLSKDTYDDDLDNLLAQIGDQYADLFLAAKNLSDAILLSDILRVNTEITKAPLSASMIKRYDEHHQDLTLLKALVRQQLPEKYKEIFFDQSKNGYAGYIDGGASQEEFYKFIKPILEKMDGTEELLVKLNREDLLRKQRTFDNGSIPHQIHLGELHAILRRQEDFYPFLKDNREKIEKILTFRIPYYVGPLARGNSRFAWMTRKSEETITPWNFEEVVDKGASAQSFIERMTNFDKNLPNEKVLPKHSLLYEYFTVYNELTKVKYVTEGMRKPAFLSGEQKKAIVDLLFKTNRKVTVKQLKEDYFKKIECFDSVEISGVEDRFNASLGTYHDLLKIIKDKDFLDNEENEDILEDIVLTLTLFEDREMIEERLKTYAHLFDDKVMKQLKRRRYTGWGRLSRKLINGIRDKQSGKTILDFLKSDGFANRNFMQLIHDDSLTFKEDIQKAQVSGQGDSLHEHIANLAGSPAIKKGILQTVKVVDELVKVMGRHKPENIVIEMARENQTTQKGQKNSRERMKRIEEGIKELGSQILKEHPVENTQLQNEKLYLYYLQNGRDMYVDQELDINRLSDYDVDHIVPQSFLKDDSIDNKVLTRSDKARGKSDNVPSEEVVKKMKNYWRQLLNAKLITQRKFDNLTKAERGGLSELDKAGFIKRQLVETRQITKHVAQILDSRMNTKYDENDKLIREVKVITLKSKLVSDFRKDFQFYKVREINNYHHAHDAYLNAVVGTALIKKYPKLESEFVYGDYKVYDVRKMIAKSEQEIGKATAKYFFYSNIMNFFKTEITLANGEIRKRPLIETNGETGEIVWDKGRDFATVRKVLSMPQVNIVKKTEVQTGGFSKESILPKRNSDKLIARKKDWDPKKYGGFDSPTVAYSVLVVAKVEKGKSKKLKSVKELLGITIMERSSFEKNPIDFLEAKGYKEVKKDLIIKLPKYSLFELENGRKRMLASAGELQKGNELALPSKYVNFLYLASHYEKLKGSPEDNEQKQLFVEQHKHYLDEIIEQISEFSKRVILADANLDKVLSAYNKHRDKPIREQAENIIHLFTLTNLGAPAAFKYFDTTIDRKRYTSTKEVLDATLIHQSITGLYETRIDLSQLGGDGGGSSEAAAKGGLLGRDLLTKLKAQIQFSTEGPQVTWEDRPAMCLVLNLEEEYRLHEKPVPPSIDPSWLQLFPMVWAEKAGMGLANQVPPVVVELKSDASPVAVRQYPMSKEAREGIRPHIQRFLDLGILVPCQSPWNTPLLPVKKPGTNDYRPVQDLREVNKRVQDIHPTVPNPYNLLSSLPPSHTWYSVLDLKDAFFCLKLHPNSQPLFAFEWRDPEKGNTGQLTWTRLPQGFKNSPTLFNEALHRDLASFRALNPQVVMLQYVDDLLVAAPTYRDCKEGTRRLLQELSKLGYRVSAKKAQLCREEVTYLGYLLKGGKRWLTPARKATVMKIPTPTTPRQVREFLGTAGFCRLWIPGFASLAAPLYPLTRPKVPFTWTEAHQEAFGRIKEALLSAPALALPDLTKPFALYVDEKEGVARGVLTQTLGPWRRPVAYLSKKLDPVASGWPTCLKAIAAVALLLKDADKLTLGQNVLVIAPHNLESIVRQPPDRWMTNARMTHYQSLLLNERVSFAPPAILNPATLLPVESDDTPIHICSEILAEETGTRPDLRDQPLPGVPAWYTDGSSFIMDGRRQAGAAIVDNKRTVWASNLPEGTSAQKAELIALTQALRLAEGKSINIYTDSRYAFATAHVHGAIYKQRGWLTSAGKDIKNKEEILALLEAIHLPKRVAIIHCPGHQRGTDPVATGNRKADEAAKQAAQSTRILTETTKNAGKRTADGSEFEKRTADGSEFESPKKKAKVE

SEQ ID NO: 6730 - protein, 2093 aa, synthetic construct
MPAAKRVKLDGGDKKYSIGLDIGTNSVGWAVITDEYKVPSKKFKVLGNTDRHSIKKNLIGALLFDSGETAEATRLKRTARRRYTRRKNRICYLQEIFSNEMAKVDDSFFHRLEESFLVEEDKKHERHPIFGNIVDEVAYHEKYPTIYHLRKKLVDSTDKADLRLIYLALAHMIKFRGHFLIEGDLNPDNSDVDKLFIQLVQTYNQLFEENPINASGVDAKAILSARLSKSRRLENLIAQLPGEKKNGLFGNLIALSLGLTPNFKSNFDLAEDAKLQLSKDTYDDDLDNLLAQIGDQYADLFLAAKNLSDAILLSDILRVNTEITKAPLSASMIKRYDEHHQDLTLLKALVRQQLPEKYKEIFFDQSKNGYAGYIDGGASQEEFYKFIKPILEKMDGTEELLVKLNREDLLRKQRTFDNGSIPHQIHLGELHAILRRQEDFYPFLKDNREKIEKILTFRIPYYVGPLARGNSRFAWMTRKSEETITPWNFEEVVDKGASAQSFIERMTNFDKNLPNEKVLPKHSLLYEYFTVYNELTKVKYVTEGMRKPAFLSGEQKKAIVDLLFKTNRKVTVKQLKEDYFKKIECFDSVEISGVEDRFNASLGTYHDLLKIIKDKDFLDNEENEDILEDIVLTLTLFEDREMIEERLKTYAHLFDDKVMKQLKRRRYTGWGRLSRKLINGIRDKQSGKTILDFLKSDGFANRNFMQLIHDDSLTFKEDIQKAQVSGQGDSLHEHIANLAGSPAIKKGILQTVKVVDELVKVMGRHKPENIVIEMARENQTTQKGQKNSRERMKRIEEGIKELGSQILKEHPVENTQLQNEKLYLYYLQNGRDMYVDQELDINRLSDYDVDHIVPQSFLKDDSIDNKVLTRSDKARGKSDNVPSEEVVKKMKNYWRQLLNAKLITQRKFDNLTKAERGGLSELDKAGFIKRQLVETRQITKHVAQILDSRMNTKYDENDKLIREVKVITLKSKLVSDFRKDFQFYKVREINNYHHAHDAYLNAVVGTALIKKYPKLESEFVYGDYKVYDVRKMIAKSEQEIGKATAKYFFYSNIMNFFKTEITLANGEIRKRPLIETNGETGEIVWDKGRDFATVRKVLSMPQVNIVKKTEVQTGGFSKESILPKRNSDKLIARKKDWDPKKYGGFDSPTVAYSVLVVAKVEKGKSKKLKSVKELLGITIMERSSFEKNPIDFLEAKGYKEVKKDLIIKLPKYSLFELENGRKRMLASAGELQKGNELALPSKYVNFLYLASHYEKLKGSPEDNEQKQLFVEQHKHYLDEIIEQISEFSKRVILADANLDKVLSAYNKHRDKPIREQAENIIHLFTLTNLGAPAAFKYFDTTIDRKRYTSTKEVLDATLIHQSITGLYETRIDLSQLGGDGGGSSEAAAKGGTLNLEDEYRLYETSAEPEVSPGSTWLSDFPQAWAETGGMGLAVRQAPLIIPLKATSTPVSIKQYPMSQEAKLGIKPHIQRLLDQGILVPCQSPWNTPLLPVKKPGTNDYRPVQDLREVNKRVEDIHPTVPNPYNLLSGLPPSHRWYTVLDLKDAFFCLRLHPTSQPLFAFEWRDPGMGISGQLTWTRLPQGFKNSPTLFNEALHRDLADFRIQHPDLILLQYVDDILLAATSELDCQQGTRALLLTLGNLGYRASAKKAQLCQKQVKYLGYLLKEGQRWLTEARKETVMGQPTPKTPRQLREFLGTAGFCRLWIPGFAEMAAPLYPLTKPGTLFNWGPDQQKAYQEIKQALLTAPALGLPDLTKPFELFVDEKQGYAKGVLTQKLGPWRRPVAYLSKKLDPVAAGWPPCLRMVAAIAVLRKDAGKLTMGQPLVILAPHAVEALVKQPPDRWLSNARMTHYQAMLLDTDRVQFGPVVALNPATLLPLPEEGAPHDCLEILAETHGTRPDLTDQPIPDADHTWYTDGSSFLQEGQRKAGAAVTTETEVIWARALPAGTSAQRAELIALTQALKMAEGKRLNVYTDSRYAFATAHIHGEIYRRRGWLTSEGREIKNKSEILALLKALFLPKRLSIIHCLGHQKGDSAEARGNRLADQAAREAAIKTPPDTSTLLAGKRTADGSEFEKRTADGSEFESPKKKAKVE

SEQ ID NO: 6731 - protein, 2093 aa, synthetic construct
MPAAKRVKLDGGDKKYSIGLDIGTNSVGWAVITDEYKVPSKKFKVLGNTDRHSIKKNLIGALLFDSGETAEATRLKRTARRRYTRRKNRICYLQEIFSNEMAKVDDSFFHRLEESFLVEEDKKHERHPIFGNIVDEVAYHEKYPTIYHLRKKLVDSTDKADLRLIYLALAHMIKFRGHFLIEGDLNPDNSDVDKLFIQLVQTYNQLFEENPINASGVDAKAILSARLSKSRRLENLIAQLPGEKKNGLFGNLIALSLGLTPNFKSNFDLAEDAKLQLSKDTYDDDLDNLLAQIGDQYADLFLAAKNLSDAILLSDILRVNTEITKAPLSASMIKRYDEHHQDLTLLKALVRQQLPEKYKEIFFDQSKNGYAGYIDGGASQEEFYKFIKPILEKMDGTEELLVKLNREDLLRKQRTFDNGSIPHQIHLGELHAILRRQEDFYPFLKDNREKIEKILTFRIPYYVGPLARGNSRFAWMTRKSEETITPWNFEEVVDKGASAQSFIERMTNFDKNLPNEKVLPKHSLLYEYFTVYNELTKVKYVTEGMRKPAFLSGEQKKAIVDLLFKTNRKVTVKQLKEDYFKKIECFDSVEISGVEDRFNASLGTYHDLLKIIKDKDFLDNEENEDILEDIVLTLTLFEDREMIEERLKTYAHLFDDKVMKQLKRRRYTGWGRLSRKLINGIRDKQSGKTILDFLKSDGFANRNFMQLIHDDSLTFKEDIQKAQVSGQGDSLHEHIANLAGSPAIKKGILQTVKVVDELVKVMGRHKPENIVIEMARENQTTQKGQKNSRERMKRIEEGIKELGSQILKEHPVENTQLQNEKLYLYYLQNGRDMYVDQELDINRLSDYDVDHIVPQSFLKDDSIDNKVLTRSDKARGKSDNVPSEEVVKKMKNYWRQLLNAKLITQRKFDNLTKAERGGLSELDKAGFIKRQLVETRQITKHVAQILDSRMNTKYDENDKLIREVKVITLKSKLVSDFRKDFQFYKVREINNYHHAHDAYLNAVVGTALIKKYPKLESEFVYGDYKVYDVRKMIAKSEQEIGKATAKYFFYSNIMNFFKTEITLANGEIRKRPLIETNGETGEIVWDKGRDFATVRKVLSMPQVNIVKKTEVQTGGFSKESILPKRNSDKLIARKKDWDPKKYGGFDSPTVAYSVLVVAKVEKGKSKKLKSVKELLGITIMERSSFEKNPIDFLEAKGYKEVKKDLIIKLPKYSLFELENGRKRMLASAGELQKGNELALPSKYVNFLYLASHYEKLKGSPEDNEQKQLFVEQHKHYLDEIIEQISEFSKRVILADANLDKVLSAYNKHRDKPIREQAENIIHLFTLTNLGAPAAFKYFDTTIDRKRYTSTKEVLDATLIHQSITGLYETRIDLSQLGGDGGGSSEAAAKGGTLNIEDEYRLHETSKEPDVPLGSTWLSDFPQAWAETGGMGLAVRQAPLIIPLKATSTPVSIKQYPMSQEARLGIKPHIQRLLDQGILVPCQSPWNTPLLPVKKPGTNDYRPVQDLREVNKRVEDIHPTVPNPYNLLSGLPPSHQWYTVLDLKDAFFCLRLHPTSQPLFAFEWRDPEMGISGQLTWTRLPQGFKNSPTLFNEALHRDLADFRIQHPDLILLQYVDDLLLAATSEQDCQRGTRALLQTLGNLGYRASAKKAQICQKQVKYLGYLLKEGQRWLTEARKETVMGQPTPKTPRQLREFLGKAGFCRLFIPGFAEMAAPLYPLTKPGTLFNWGPDQQKAYQEIKQALLTAPALGLPDLTKPFELFVDEKQGYAKGVLTQKLGPWRRPVAYLSKKLDPVAAGWPPCLRMVAAIAVLTKDAGKLTMGQPLVILAPHAVEALVKQPPDRWLSNARMTHYQAMLLDTDRVQFGPVVALNPATLLPLPEKEAPHDCLEILAETHGTRPDLTDQPIPDADYTWYTDGSSFLQEGQRRAGAAVTTETEVIWARALPAGTSAQRAELIALTQALKMAEGKKLNVYTDSRYAFATAHVHGEIYRRRGWLTSEGREIKNKNEILALLKALFLPKRLSIIHCPGHQKGNSAEARGNRMADQAAREAAMKAVLETSTLLAGKRTADGSEFEKRTADGSEFESPKKKAKVE

SEQ ID NO: 6732 - protein, 2095 aa, synthetic construct
MPAAKRVKLDGGDKKYSIGLDIGTNSVGWAVITDEYKVPSKKFKVLGNTDRHSIKKNLIGALLFDSGETAEATRLKRTARRRYTRRKNRICYLQEIFSNEMAKVDDSFFHRLEESFLVEEDKKHERHPIFGNIVDEVAYHEKYPTIYHLRKKLVDSTDKADLRLIYLALAHMIKFRGHFLIEGDLNPDNSDVDKLFIQLVQTYNQLFEENPINASGVDAKAILSARLSKSRRLENLIAQLPGEKKNGLFGNLIALSLGLTPNFKSNFDLAEDAKLQLSKDTYDDDLDNLLAQIGDQYADLFLAAKNLSDAILLSDILRVNTEITKAPLSASMIKRYDEHHQDLTLLKALVRQQLPEKYKEIFFDQSKNGYAGYIDGGASQEEFYKFIKPILEKMDGTEELLVKLNREDLLRKQRTFDNGSIPHQIHLGELHAILRRQEDFYPFLKDNREKIEKILTFRIPYYVGPLARGNSRFAWMTRKSEETITPWNFEEVVDKGASAQSFIERMTNFDKNLPNEKVLPKHSLLYEYFTVYNELTKVKYVTEGMRKPAFLSGEQKKAIVDLLFKTNRKVTVKQLKEDYFKKIECFDSVEISGVEDRFNASLGTYHDLLKIIKDKDFLDNEENEDILEDIVLTLTLFEDREMIEERLKTYAHLFDDKVMKQLKRRRYTGWGRLSRKLINGIRDKQSGKTILDFLKSDGFANRNFMQLIHDDSLTFKEDIQKAQVSGQGDSLHEHIANLAGSPAIKKGILQTVKVVDELVKVMGRHKPENIVIEMARENQTTQKGQKNSRERMKRIEEGIKELGSQILKEHPVENTQLQNEKLYLYYLQNGRDMYVDQELDINRLSDYDVDHIVPQSFLKDDSIDNKVLTRSDKARGKSDNVPSEEVVKKMKNYWRQLLNAKLITQRKFDNLTKAERGGLSELDKAGFIKRQLVETRQITKHVAQILDSRMNTKYDENDKLIREVKVITLKSKLVSDFRKDFQFYKVREINNYHHAHDAYLNAVVGTALIKKYPKLESEFVYGDYKVYDVRKMIAKSEQEIGKATAKYFFYSNIMNFFKTEITLANGEIRKRPLIETNGETGEIVWDKGRDFATVRKVLSMPQVNIVKKTEVQTGGFSKESILPKRNSDKLIARKKDWDPKKYGGFDSPTVAYSVLVVAKVEKGKSKKLKSVKELLGITIMERSSFEKNPIDFLEAKGYKEVKKDLIIKLPKYSLFELENGRKRMLASAGELQKGNELALPSKYVNFLYLASHYEKLKGSPEDNEQKQLFVEQHKHYLDEIIEQISEFSKRVILADANLDKVLSAYNKHRDKPIREQAENIIHLFTLTNLGAPAAFKYFDTTIDRKRYTSTKEVLDATLIHQSITGLYETRIDLSQLGGDGGEAAAKGSSGGTAPLEEEYRLFLEAPIQNVTLLEQWKREIPKVWAEINPPGLASTQAPIHVQLLSTALPVRVRQYPITLEAKRSLRETIRKFRAAGILRPVHSPWNTPLLPVRKSGTSEYRMVQDLREVNKRVETIHPTVPNPYTLLSLLPPDRIWYSVLDLKDAFFCIPLAPESQLIFAFEWADAEEGESGQLTWTRLPQGFKNSPTLFNEALNRDLQGFRLDHPSVSLLQYVDDLLIAADTQAACLSATRDLLMTLAELGYRVSGKKAQLCQEEVTYLGFKIHKGSRSLSNSRTQAILQIPVPKTKRQVREFLGTIGYCRLWIPGFAELAQPLYAATRPGNDPLVWGEKEEEAFQSLKLALTQPPALALPSLDKPFQLFVEETSGAAKGVLTQALGPWKRPVAYLSKRLDPVAAGWPRCLRAIAAAALLTREASKLTFGQDIEITSSHNLESLLRSPPDKWLTNARITQYQVLLLDPPRVRFKQTAALNPATLLPETDDTLPIHHCLDTLDSLTSTRPDLTDQPLAQAEATLFTDGSSYIRDGKRYAGAAVVTLDSVIWAEPLPIGTSAQKAELIALTKALEWSKDKSVNIYTDSRYAFATLHVHGMIYRERGWLTAGGKAIKNAPEILALLTAVWLPKRVAVMHCKGHQKDDAPTSTGNRRADEVAREVAIRPLSTQATISAGKRTADGSEFEKRTADGSEFESPKKKAKVE

SEQ ID NO: 6733 - protein, 2095 aa, synthetic construct
MPAAKRVKLDGGDKKYSIGLDIGTNSVGWAVITDEYKVPSKKFKVLGNTDRHSIKKNLIGALLFDSGETAEATRLKRTARRRYTRRKNRICYLQEIFSNEMAKVDDSFFHRLEESFLVEEDKKHERHPIFGNIVDEVAYHEKYPTIYHLRKKLVDSTDKADLRLIYLALAHMIKFRGHFLIEGDLNPDNSDVDKLFIQLVQTYNQLFEENPINASGVDAKAILSARLSKSRRLENLIAQLPGEKKNGLFGNLIALSLGLTPNFKSNFDLAEDAKLQLSKDTYDDDLDNLLAQIGDQYADLFLAAKNLSDAILLSDILRVNTEITKAPLSASMIKRYDEHHQDLTLLKALVRQQLPEKYKEIFFDQSKNGYAGYIDGGASQEEFYKFIKPILEKMDGTEELLVKLNREDLLRKQRTFDNGSIPHQIHLGELHAILRRQEDFYPFLKDNREKIEKILTFRIPYYVGPLARGNSRFAWMTRKSEETITPWNFEEVVDKGASAQSFIERMTNFDKNLPNEKVLPKHSLLYEYFTVYNELTKVKYVTEGMRKPAFLSGEQKKAIVDLLFKTNRKVTVKQLKEDYFKKIECFDSVEISGVEDRFNASLGTYHDLLKIIKDKDFLDNEENEDILEDIVLTLTLFEDREMIEERLKTYAHLFDDKVMKQLKRRRYTGWGRLSRKLINGIRDKQSGKTILDFLKSDGFANRNFMQLIHDDSLTFKEDIQKAQVSGQGDSLHEHIANLAGSPAIKKGILQTVKVVDELVKVMGRHKPENIVIEMARENQTTQKGQKNSRERMKRIEEGIKELGSQILKEHPVENTQLQNEKLYLYYLQNGRDMYVDQELDINRLSDYDVDHIVPQSFLKDDSIDNKVLTRSDKARGKSDNVPSEEVVKKMKNYWRQLLNAKLITQRKFDNLTKAERGGLSELDKAGFIKRQLVETRQITKHVAQILDSRMNTKYDENDKLIREVKVITLKSKLVSDFRKDFQFYKVREINNYHHAHDAYLNAVVGTALIKKYPKLESEFVYGDYKVYDVRKMIAKSEQEIGKATAKYFFYSNIMNFFKTEITLANGEIRKRPLIETNGETGEIVWDKGRDFATVRKVLSMPQVNIVKKTEVQTGGFSKESILPKRNSDKLIARKKDWDPKKYGGFDSPTVAYSVLVVAKVEKGKSKKLKSVKELLGITIMERSSFEKNPIDFLEAKGYKEVKKDLIIKLPKYSLFELENGRKRMLASAGELQKGNELALPSKYVNFLYLASHYEKLKGSPEDNEQKQLFVEQHKHYLDEIIEQISEFSKRVILADANLDKVLSAYNKHRDKPIREQAENIIHLFTLTNLGAPAAFKYFDTTIDRKRYTSTKEVLDATLIHQSITGLYETRIDLSQLGGDGGEAAAKGSSGGTAPLEEEYRLFLEAPIQNVTLLEQWKREIPKVWAEINPPGLASTQAPIHVQLLSTALPVRVRQYPITLEAKRSLRETIRKFRAAGILRPVHSPWNTPLLPVRKSGTSEYRMVQDLREVNKRVETIHPTVPNPYTLLSLLPPDRIWYSVLDLKDAFFCIPLAPESQLIFAFEWADAEEGESGQLTWTRLPQGFKNSPTLFNEALNRDLQGFRLDHPSVSLLQYVDDLLIAADTQAACLSATRDLLMTLAELGYRVSGKKAQLCQEEVTYLGFKIHKGSRSLSNSRTQAILQIPVPKTKRQVREFLGKIGYCRLFIPGFAELAQPLYAATRPGNDPLVWGEKEEEAFQSLKLALTQPPALALPSLDKPFQLFVEETSGAAKGVLTQALGPWKRPVAYLSKRLDPVAAGWPRCLRAIAAAALLTREASKLTFGQDIEITSSHNLESLLRSPPDKWLTNARITQYQVLLLDPPRVRFKQTAALNPATLLPETDDTLPIHHCLDTLDSLTSTRPDLTDQPLAQAEATLFTDGSSYIRDGKRYAGAAVVTLDSVIWAEPLPIGTSAQKAELIALTKALEWSKDKSVNIYTDSRYAFATLHVHGMIYRERGWLTAGGKAIKNAPEILALLTAVWLPKRVAVMHCKGHQKDDAPTSTGNRRADEVAREVAIRPLSTQATISAGKRTADGSEFEKRTADGSEFESPKKKAKVE

SEQ ID NO: 6734 - protein, 2092 aa, synthetic construct
MPAAKRVKLDGGDKKYSIGLDIGTNSVGWAVITDEYKVPSKKFKVLGNTDRHSIKKNLIGALLFDSGETAEATRLKRTARRRYTRRKNRICYLQEIFSNEMAKVDDSFFHRLEESFLVEEDKKHERHPIFGNIVDEVAYHEKYPTIYHLRKKLVDSTDKADLRLIYLALAHMIKFRGHFLIEGDLNPDNSDVDKLFIQLVQTYNQLFEENPINASGVDAKAILSARLSKSRRLENLIAQLPGEKKNGLFGNLIALSLGLTPNFKSNFDLAEDAKLQLSKDTYDDDLDNLLAQIGDQYADLFLAAKNLSDAILLSDILRVNTEITKAPLSASMIKRYDEHHQDLTLLKALVRQQLPEKYKEIFFDQSKNGYAGYIDGGASQEEFYKFIKPILEKMDGTEELLVKLNREDLLRKQRTFDNGSIPHQIHLGELHAILRRQEDFYPFLKDNREKIEKILTFRIPYYVGPLARGNSRFAWMTRKSEETITPWNFEEVVDKGASAQSFIERMTNFDKNLPNEKVLPKHSLLYEYFTVYNELTKVKYVTEGMRKPAFLSGEQKKAIVDLLFKTNRKVTVKQLKEDYFKKIECFDSVEISGVEDRFNASLGTYHDLLKIIKDKDFLDNEENEDILEDIVLTLTLFEDREMIEERLKTYAHLFDDKVMKQLKRRRYTGWGRLSRKLINGIRDKQSGKTILDFLKSDGFANRNFMQLIHDDSLTFKEDIQKAQVSGQGDSLHEHIANLAGSPAIKKGILQTVKVVDELVKVMGRHKPENIVIEMARENQTTQKGQKNSRERMKRIEEGIKELGSQILKEHPVENTQLQNEKLYLYYLQNGRDMYVDQELDINRLSDYDVDHIVPQSFLKDDSIDNKVLTRSDKARGKSDNVPSEEVVKKMKNYWRQLLNAKLITQRKFDNLTKAERGGLSELDKAGFIKRQLVETRQITKHVAQILDSRMNTKYDENDKLIREVKVITLKSKLVSDFRKDFQFYKVREINNYHHAHDAYLNAVVGTALIKKYPKLESEFVYGDYKVYDVRKMIAKSEQEIGKATAKYFFYSNIMNFFKTEITLANGEIRKRPLIETNGETGEIVWDKGRDFATVRKVLSMPQVNIVKKTEVQTGGFSKESILPKRNSDKLIARKKDWDPKKYGGFDSPTVAYSVLVVAKVEKGKSKKLKSVKELLGITIMERSSFEKNPIDFLEAKGYKEVKKDLIIKLPKYSLFELENGRKRMLASAGELQKGNELALPSKYVNFLYLASHYEKLKGSPEDNEQKQLFVEQHKHYLDEIIEQISEFSKRVILADANLDKVLSAYNKHRDKPIREQAENIIHLFTLTNLGAPAAFKYFDTTIDRKRYTSTKEVLDATLIHQSITGLYETRIDLSQLGGDGGEAAAKGSSGGTLQLEEEYRLFEPESTQKQEMDIWLKNFPQAWAETGGMGTAHCQAPVLIQLKATATPISIRQYPMPHEAYQGIKPHIRRMLDQGILKPCQSPWNTPLLPVKKPGTEDYRPVQDLREVNKRVEDIHPTVPNPYNLLSTLPPSHPWYTVLDLKDAFFCLRLHSESQLLFAFEWRDPEIGLSGQLTWTRLPQGFKNSPTLFNEALHSDLADFRVRYPALVLLQYVDDLLLAAATRTECLEGTKALLETLGNKGYRASAKKAQICLQEVTYLGYSLKDGQRWLTKARKEAILSIPVPKNSRQVREFLGKAGYCRLFIPGFAELAAPLYPLTRPGTLFQWGTEQQLAFEDIKKALLSSPALGLPDITKPFELFIDENSGFAKGVLVQKLGPWKRPVAYLSKKLDTVASGWPPCLRMVAAIAILVKDAGKLTLGQPLTILTSHPVEALVRQPPNKWLSNARMTHYQAMLLDAERVHFGPTVSLNPATLLPLPSGGNHHDCLQILAETHGTRPDLTDQPLPDADLTWYTDGSSFIRNGEREAGAAVTTESEVIWAAPLPPGTSAQRAELIALTQALKMAEGKKLTVYTDSRYAFATTHVHGEIYRRRGWLTSEGKEIKNKNEILALLEALFLPKRLSIIHCPGHQKGDSPQAKGNRLADDTAKKAATETHSSLTVLPAGKRTADGSEFEKRTADGSEFESPKKKAKVE

SEQ ID NO: 6735 - protein, 2091 aa, synthetic construct
MPAAKRVKLDGGDKKYSIGLDIGTNSVGWAVITDEYKVPSKKFKVLGNTDRHSIKKNLIGALLFDSGETAEATRLKRTARRRYTRRKNRICYLQEIFSNEMAKVDDSFFHRLEESFLVEEDKKHERHPIFGNIVDEVAYHEKYPTIYHLRKKLVDSTDKADLRLIYLALAHMIKFRGHFLIEGDLNPDNSDVDKLFIQLVQTYNQLFEENPINASGVDAKAILSARLSKSRRLENLIAQLPGEKKNGLFGNLIALSLGLTPNFKSNFDLAEDAKLQLSKDTYDDDLDNLLAQIGDQYADLFLAAKNLSDAILLSDILRVNTEITKAPLSASMIKRYDEHHQDLTLLKALVRQQLPEKYKEIFFDQSKNGYAGYIDGGASQEEFYKFIKPILEKMDGTEELLVKLNREDLLRKQRTFDNGSIPHQIHLGELHAILRRQEDFYPFLKDNREKIEKILTFRIPYYVGPLARGNSRFAWMTRKSEETITPWNFEEVVDKGASAQSFIERMTNFDKNLPNEKVLPKHSLLYEYFTVYNELTKVKYVTEGMRKPAFLSGEQKKAIVDLLFKTNRKVTVKQLKEDYFKKIECFDSVEISGVEDRFNASLGTYHDLLKIIKDKDFLDNEENEDILEDIVLTLTLFEDREMIEERLKTYAHLFDDKVMKQLKRRRYTGWGRLSRKLINGIRDKQSGKTILDFLKSDGFANRNFMQLIHDDSLTFKEDIQKAQVSGQGDSLHEHIANLAGSPAIKKGILQTVKVVDELVKVMGRHKPENIVIEMARENQTTQKGQKNSRERMKRIEEGIKELGSQILKEHPVENTQLQNEKLYLYYLQNGRDMYVDQELDINRLSDYDVDHIVPQSFLKDDSIDNKVLTRSDKARGKSDNVPSEEVVKKMKNYWRQLLNAKLITQRKFDNLTKAERGGLSELDKAGFIKRQLVETRQITKHVAQILDSRMNTKYDENDKLIREVKVITLKSKLVSDFRKDFQFYKVREINNYHHAHDAYLNAVVGTALIKKYPKLESEFVYGDYKVYDVRKMIAKSEQEIGKATAKYFFYSNIMNFFKTEITLANGEIRKRPLIETNGETGEIVWDKGRDFATVRKVLSMPQVNIVKKTEVQTGGFSKESILPKRNSDKLIARKKDWDPKKYGGFDSPTVAYSVLVVAKVEKGKSKKLKSVKELLGITIMERSSFEKNPIDFLEAKGYKEVKKDLIIKLPKYSLFELENGRKRMLASAGELQKGNELALPSKYVNFLYLASHYEKLKGSPEDNEQKQLFVEQHKHYLDEIIEQISEFSKRVILADANLDKVLSAYNKHRDKPIREQAENIIHLFTLTNLGAPAAFKYFDTTIDRKRYTSTKEVLDATLIHQSITGLYETRIDLSQLGGDGGEAAAKGSSGGVLNLEEEYRLHEKPVPSSIDPSWLQLFPTVWAERAGMGLANQVPPVVVELRSGASPVAVRQYPMSKEAREGIRPHIQKFLDLGVLVPCRSPWNTPLLPVKKPGTNDYRPVQDLREINKRVQDIHPTVPNPYNLLSSLPPSYTWYSVLDLKDAFFCLRLHPNSQPLFAFEWKDPEKGNTGQLTWTRLPQGFKNSPTLFNEALHRDLAPFRALNPQVVLLQYVDDLLVAAPTYEDCKKGTQKLLQELSKLGYRVSAKKAQLCQREVTYLGYLLKEGKRWLTPARKATVMKIPVPTTPRQVREFLGKAGFCRLFIPGFASLAAPLYPLTKPSIPFIWTEEHQQAFDHIKKALLSAPALALPDLTKPFTLYIDERAGVARGVLTQTLGPWRRPVAYLSKKLDPVASGWPTCLKAVAAVALLLKDADKLTLGQNVTVIASHSLESIVRQPPDRWMTNARMTHYQSLLLNERVSFAPPAVLNPATLLPVESEATPVHRCSEILAEETGTRRDLEDQPLPGVPTWYTDGSSFITEGKRRAGAPIVDGKRTVWASSLPEGTSAQKAELVALTQALRLAEGKNINIYTDSRYAFATAHIHGAIYKQRGWLTSAGKDIKNKEEILALLEAIHLPRRVAIIHCPGHQRGSNPVATGNRRADEAAKQAALSTRVLAGTTKPAGKRTADGSEFEKRTADGSEFESPKKKAKVE

SEQ ID NO: 6736 - protein, 2215 aa, synthetic construct
MPAAKRVKLDGGDKKYSIGLDIGTNSVGWAVITDEYKVPSKKFKVLGNTDRHSIKKNLIGALLFDSGETAEATRLKRTARRRYTRRKNRICYLQEIFSNEMAKVDDSFFHRLEESFLVEEDKKHERHPIFGNIVDEVAYHEKYPTIYHLRKKLVDSTDKADLRLIYLALAHMIKFRGHFLIEGDLNPDNSDVDKLFIQLVQTYNQLFEENPINASGVDAKAILSARLSKSRRLENLIAQLPGEKKNGLFGNLIALSLGLTPNFKSNFDLAEDAKLQLSKDTYDDDLDNLLAQIGDQYADLFLAAKNLSDAILLSDILRVNTEITKAPLSASMIKRYDEHHQDLTLLKALVRQQLPEKYKEIFFDQSKNGYAGYIDGGASQEEFYKFIKPILEKMDGTEELLVKLNREDLLRKQRTFDNGSIPHQIHLGELHAILRRQEDFYPFLKDNREKIEKILTFRIPYYVGPLARGNSRFAWMTRKSEETITPWNFEEVVDKGASAQSFIERMTNFDKNLPNEKVLPKHSLLYEYFTVYNELTKVKYVTEGMRKPAFLSGEQKKAIVDLLFKTNRKVTVKQLKEDYFKKIECFDSVEISGVEDRFNASLGTYHDLLKIIKDKDFLDNEENEDILEDIVLTLTLFEDREMIEERLKTYAHLFDDKVMKQLKRRRYTGWGRLSRKLINGIRDKQSGKTILDFLKSDGFANRNFMQLIHDDSLTFKEDIQKAQVSGQGDSLHEHIANLAGSPAIKKGILQTVKVVDELVKVMGRHKPENIVIEMARENQTTQKGQKNSRERMKRIEEGIKELGSQILKEHPVENTQLQNEKLYLYYLQNGRDMYVDQELDINRLSDYDVDHIVPQSFLKDDSIDNKVLTRSDKARGKSDNVPSEEVVKKMKNYWRQLLNAKLITQRKFDNLTKAERGGLSELDKAGFIKRQLVETRQITKHVAQILDSRMNTKYDENDKLIREVKVITLKSKLVSDFRKDFQFYKVREINNYHHAHDAYLNAVVGTALIKKYPKLESEFVYGDYKVYDVRKMIAKSEQEIGKATAKYFFYSNIMNFFKTEITLANGEIRKRPLIETNGETGEIVWDKGRDFATVRKVLSMPQVNIVKKTEVQTGGFSKESILPKRNSDKLIARKKDWDPKKYGGFDSPTVAYSVLVVAKVEKGKSKKLKSVKELLGITIMERSSFEKNPIDFLEAKGYKEVKKDLIIKLPKYSLFELENGRKRMLASAGELQKGNELALPSKYVNFLYLASHYEKLKGSPEDNEQKQLFVEQHKHYLDEIIEQISEFSKRVILADANLDKVLSAYNKHRDKPIREQAENIIHLFTLTNLGAPAAFKYFDTTIDRKRYTSTKEVLDATLIHQSITGLYETRIDLSQLGGDGGEAAAKGSSGGTLGDQGSRGSDPLPEPRVTLTVEGIPTEFLVNTGAEHSVLTKPMGKMGSKRTVVAGATGSKVYPWTTKRLLKIGQKQVTHSFLVIPECPAPLLGRDLLTKLKAQIQFSTEGPQVTWEDRPAMCLVLNLEEEYRLHEKPVPPSIDPSWLQLFPMVWAEKAGMGLANQVPPVVVELKSDASPVAVRQYPMSKEAREGIRPHIQRFLDLGILVPCQSPWNTPLLPVKKPGTNDYRPVQDLREVNKRVQDIHPTVPNPYNLLSSLPPSHTWYSVLDLKDAFFCLKLHPNSQPLFAFEWRDPEKGNTGQLTWTRLPQGFKNSPTLFNEALHRDLASFRALNPQVVMLQYVDDLLVAAPTYRDCKEGTRRLLQELSKLGYRVSAKKAQLCREEVTYLGYLLKGGKRWLTPARKATVMKIPTPTTPRQVREFLGKAGFCRLFIPGFASLAAPLYPLTRPKVPFTWTEAHQEAFGRIKEALLSAPALALPDLTKPFALYVDEKEGVARGVLTQTLGPWRRPVAYLSKKLDPVASGWPTCLKAIAAVALLLKDADKLTLGQNVLVIAPHNLESIVRQPPDRWMTNARMTHYQSLLLNERVSFAPPAILNPATLLPVESDDTPIHICSEILAEETGTRPDLRDQPLPGVPAWYTDGSSFIMDGRRQAGAAIVDNKRTVWASNLPEGTSAQKAELIALTQALRLAEGKSINIYTDSRYAFATAHVHGAIYKQRGWLTSAGKDIKNKEEILALLEAIHLPKRVAIIHCPGHQRGTDPVATGNRKADEAAKQAAQSTRILTETTKNAGKRTADGSEFEKRTADGSEFESPKKKAKVE

SEQ ID NO: 6737 - protein, 2093 aa, synthetic construct
MPAAKRVKLDGGDKKYSIGLDIGTNSVGWAVITDEYKVPSKKFKVLGNTDRHSIKKNLIGALLFDSGETAEATRLKRTARRRYTRRKNRICYLQEIFSNEMAKVDDSFFHRLEESFLVEEDKKHERHPIFGNIVDEVAYHEKYPTIYHLRKKLVDSTDKADLRLIYLALAHMIKFRGHFLIEGDLNPDNSDVDKLFIQLVQTYNQLFEENPINASGVDAKAILSARLSKSRRLENLIAQLPGEKKNGLFGNLIALSLGLTPNFKSNFDLAEDAKLQLSKDTYDDDLDNLLAQIGDQYADLFLAAKNLSDAILLSDILRVNTEITKAPLSASMIKRYDEHHQDLTLLKALVRQQLPEKYKEIFFDQSKNGYAGYIDGGASQEEFYKFIKPILEKMDGTEELLVKLNREDLLRKQRTFDNGSIPHQIHLGELHAILRRQEDFYPFLKDNREKIEKILTFRIPYYVGPLARGNSRFAWMTRKSEETITPWNFEEVVDKGASAQSFIERMTNFDKNLPNEKVLPKHSLLYEYFTVYNELTKVKYVTEGMRKPAFLSGEQKKAIVDLLFKTNRKVTVKQLKEDYFKKIECFDSVEISGVEDRFNASLGTYHDLLKIIKDKDFLDNEENEDILEDIVLTLTLFEDREMIEERLKTYAHLFDDKVMKQLKRRRYTGWGRLSRKLINGIRDKQSGKTILDFLKSDGFANRNFMQLIHDDSLTFKEDIQKAQVSGQGDSLHEHIANLAGSPAIKKGILQTVKVVDELVKVMGRHKPENIVIEMARENQTTQKGQKNSRERMKRIEEGIKELGSQILKEHPVENTQLQNEKLYLYYLQNGRDMYVDQELDINRLSDYDVDHIVPQSFLKDDSIDNKVLTRSDKARGKSDNVPSEEVVKKMKNYWRQLLNAKLITQRKFDNLTKAERGGLSELDKAGFIKRQLVETRQITKHVAQILDSRMNTKYDENDKLIREVKVITLKSKLVSDFRKDFQFYKVREINNYHHAHDAYLNAVVGTALIKKYPKLESEFVYGDYKVYDVRKMIAKSEQEIGKATAKYFFYSNIMNFFKTEITLANGEIRKRPLIETNGETGEIVWDKGRDFATVRKVLSMPQVNIVKKTEVQTGGFSKESILPKRNSDKLIARKKDWDPKKYGGFDSPTVAYSVLVVAKVEKGKSKKLKSVKELLGITIMERSSFEKNPIDFLEAKGYKEVKKDLIIKLPKYSLFELENGRKRMLASAGELQKGNELALPSKYVNFLYLASHYEKLKGSPEDNEQKQLFVEQHKHYLDEIIEQISEFSKRVILADANLDKVLSAYNKHRDKPIREQAENIIHLFTLTNLGAPAAFKYFDTTIDRKRYTSTKEVLDATLIHQSITGLYETRIDLSQLGGDGGEAAAKGSSGGTLNLEDEYRLYETSAEPEVSPGSTWLSDFPQAWAETGGMGLAVRQAPLIIPLKATSTPVSIKQYPMSQEAKLGIKPHIQRLLDQGILVPCQSPWNTPLLPVKKPGTNDYRPVQDLREVNKRVEDIHPTVPNPYNLLSGLPPSHRWYTVLDLKDAFFCLRLHPTSQPLFAFEWRDPGMGISGQLTWTRLPQGFKNSPTLFNEALHRDLADFRIQHPDLILLQYVDDILLAATSELDCQQGTRALLLTLGNLGYRASAKKAQLCQKQVKYLGYLLKEGQRWLTEARKETVMGQPTPKTPRQLREFLGTAGFCRLWIPGFAEMAAPLYPLTKPGTLFNWGPDQQKAYQEIKQALLTAPALGLPDLTKPFELFVDEKQGYAKGVLTQKLGPWRRPVAYLSKKLDPVAAGWPPCLRMVAAIAVLRKDAGKLTMGQPLVILAPHAVEALVKQPPDRWLSNARMTHYQAMLLDTDRVQFGPVVALNPATLLPLPEEGAPHDCLEILAETHGTRPDLTDQPIPDADHTWYTDGSSFLQEGQRKAGAAVTTETEVIWARALPAGTSAQRAELIALTQALKMAEGKRLNVYTDSRYAFATAHIHGEIYRRRGWLTSEGREIKNKSEILALLKALFLPKRLSIIHCLGHQKGDSAEARGNRLADQAAREAAIKTPPDTSTLLAGKRTADGSEFEKRTADGSEFESPKKKAKVE

SEQ ID NO: 6738 - protein, 2093 aa, synthetic construct; identical to SEQ ID NO: 4512

SEQ ID NO: 6739 - protein, 2093 aa, synthetic construct
MPAAKRVKLDGGDKKYSIGLDIGTNSVGWAVITDEYKVPSKKFKVLGNTDRHSIKKNLIGALLFDSGETAEATRLKRTARRRYTRRKNRICYLQEIFSNEMAKVDDSFFHRLEESFLVEEDKKHERHPIFGNIVDEVAYHEKYPTIYHLRKKLVDSTDKADLRLIYLALAHMIKFRGHFLIEGDLNPDNSDVDKLFIQLVQTYNQLFEENPINASGVDAKAILSARLSKSRRLENLIAQLPGEKKNGLFGNLIALSLGLTPNFKSNFDLAEDAKLQLSKDTYDDDLDNLLAQIGDQYADLFLAAKNLSDAILLSDILRVNTEITKAPLSASMIKRYDEHHQDLTLLKALVRQQLPEKYKEIFFDQSKNGYAGYIDGGASQEEFYKFIKPILEKMDGTEELLVKLNREDLLRKQRTFDNGSIPHQIHLGELHAILRRQEDFYPFLKDNREKIEKILTFRIPYYVGPLARGNSRFAWMTRKSEETITPWNFEEVVDKGASAQSFIERMTNFDKNLPNEKVLPKHSLLYEYFTVYNELTKVKYVTEGMRKPAFLSGEQKKAIVDLLFKTNRKVTVKQLKEDYFKKIECFDSVEISGVEDRFNASLGTYHDLLKIIKDKDFLDNEENEDILEDIVLTLTLFEDREMIEERLKTYAHLFDDKVMKQLKRRRYTGWGRLSRKLINGIRDKQSGKTILDFLKSDGFANRNFMQLIHDDSLTFKEDIQKAQVSGQGDSLHEHIANLAGSPAIKKGILQTVKVVDELVKVMGRHKPENIVIEMARENQTTQKGQKNSRERMKRIEEGIKELGSQILKEHPVENTQLQNEKLYLYYLQNGRDMYVDQELDINRLSDYDVDHIVPQSFLKDDSIDNKVLTRSDKARGKSDNVPSEEVVKKMKNYWRQLLNAKLITQRKFDNLTKAERGGLSELDKAGFIKRQLVETRQITKHVAQILDSRMNTKYDENDKLIREVKVITLKSKLVSDFRKDFQFYKVREINNYHHAHDAYLNAVVGTALIKKYPKLESEFVYGDYKVYDVRKMIAKSEQEIGKATAKYFFYSNIMNFFKTEITLANGEIRKRPLIETNGETGEIVWDKGRDFATVRKVLSMPQVNIVKKTEVQTGGFSKESILPKRNSDKLIARKKDWDPKKYGGFDSPTVAYSVLVVAKVEKGKSKKLKSVKELLGITIMERSSFEKNPIDFLEAKGYKEVKKDLIIKLPKYSLFELENGRKRMLASAGELQKGNELALPSKYVNFLYLASHYEKLKGSPEDNEQKQLFVEQHKHYLDEIIEQISEFSKRVILADANLDKVLSAYNKHRDKPIREQAENIIHLFTLTNLGAPAAFKYFDTTIDRKRYTSTKEVLDATLIHQSITGLYETRIDLSQLGGDGGEAAAKGSSGGTLGIEDEYRLHETSTEPDVSLGSTWLSDFPQAWAETGGMGLAVRQAPLIIPLKATSTPVSIQQYPMSHEARLGIKPHIQRLLDQGILVPCQSPWNTPLLPVKKPGTNDYRPVQDLREVNKRVEDIHPTVPNPYNLLSGLPPSHQWYTVLDLKDAFFCLRLHPTSQPLFAFEWRDPGMGISGQLTWTRLPQGFKNSPTLFDEALHRDLADFRIQHPDLILLQYVDDILLAATSELDCQQGTRALLQTLGDLGYRASAKKAQICQKQVKYLGYLLREGQRWLTEARKETVMGQPVPKTPRQLREFLGTAGFCRLWIPGFAEMAAPLYPLTKTGTLFSWGPDQQKAYQEIKQALLTAPALGLPDLTKPFELFVDEKQGYAKGVLTQKLGPWRRPVAYLSKKLDPVAAGWPPCLRMVAAIAVLTKDAGKLTMGQPLVILAPHAVEALVKQPPDRWLSNARMTHYQAMLLDTDRVQFGPVVALNPATLLPLPEEGAPHDCLEILAETHGTRPDLTDQPIPDADHTWYTDGSSFLQEGQRKAGAAVTTETEVIWAGALPAGTSAQRAELIALTQALKMAEGKRLNVYTDSRYAFATAHIHGEIYRRRGLLTSEGREIKNKSEILALLKALFLPKRLSIIHCLGHQKGDSAEARGNRLADQAAREAAIKTPPDTSTLLAGKRTADGSEFEKRTADGSEFESPKKKAKVE

SEQ ID NO: 6740 - protein, 2093 aa, synthetic construct
MPAAKRVKLDGGDKKYSIGLDIGTNSVGWAVITDEYKVPSKKFKVLGNTDRHSIKKNLIGALLFDSGETAEATRLKRTARRRYTRRKNRICYLQEIFSNEMAKVDDSFFHRLEESFLVEEDKKHERHPIFGNIVDEVAYHEKYPTIYHLRKKLVDSTDKADLRLIYLALAHMIKFRGHFLIEGDLNPDNSDVDKLFIQLVQTYNQLFEENPINASGVDAKAILSARLSKSRRLENLIAQLPGEKKNGLFGNLIALSLGLTPNFKSNFDLAEDAKLQLSKDTYDDDLDNLLAQIGDQYADLFLAAKNLSDAILLSDILRVNTEITKAPLSASMIKRYDEHHQDLTLLKALVRQQLPEKYKEIFFDQSKNGYAGYIDGGASQEEFYKFIKPILEKMDGTEELLVKLNREDLLRKQRTFDNGSIPHQIHLGELHAILRRQEDFYPFLKDNREKIEKILTFRIPYYVGPLARGNSRFAWMTRKSEETITPWNFEEVVDKGASAQSFIERMTNFDKNLPNEKVLPKHSLLYEYFTVYNELTKVKYVTEGMRKPAFLSGEQKKAIVDLLFKTNRKVTVKQLKEDYFKKIECFDSVEISGVEDRFNASLGTYHDLLKIIKDKDFLDNEENEDILEDIVLTLTLFEDREMIEERLKTYAHLFDDKVMKQLKRRRYTGWGRLSRKLINGIRDKQSGKTILDFLKSDGFANRNFMQLIHDDSLTFKEDIQKAQVSGQGDSLHEHIANLAGSPAIKKGILQTVKVVDELVKVMGRHKPENIVIEMARENQTTQKGQKNSRERMKRIEEGIKELGSQILKEHPVENTQLQNEKLYLYYLQNGRDMYVDQELDINRLSDYDVDHIVPQSFLKDDSIDNKVLTRSDKARGKSDNVPSEEVVKKMKNYWRQLLNAKLITQRKFDNLTKAERGGLSELDKAGFIKRQLVETRQITKHVAQILDSRMNTKYDENDKLIREVKVITLKSKLVSDFRKDFQFYKVREINNYHHAHDAYLNAVVGTALIKKYPKLESEFVYGDYKVYDVRKMIAKSEQEIGKATAKYFFYSNIMNFFKTEITLANGEIRKRPLIETNGETGEIVWDKGRDFATVRKVLSMPQVNIVKKTEVQTGGFSKESILPKRNSDKLIARKKDWDPKKYGGFDSPTVAYSVLVVAKVEKGKSKKLKSVKELLGITIMERSSFEKNPIDFLEAKGYKEVKKDLIIKLPKYSLFELENGRKRMLASAGELQKGNELALPSKYVNFLYLASHYEKLKGSPEDNEQKQLFVEQHKHYLDEIIEQISEFSKRVILADANLDKVLSAYNKHRDKPIREQAENIIHLFTLTNLGAPAAFKYFDTTIDRKRYTSTKEVLDATLIHQSITGLYETRIDLSQLGGDGGEAAAKGSSGGTLNIEDEYRLHEISTEPDVSPGSTWLSDFPQAWAETGGMGLAVRQAPLIIPLKATSTPVSIKQYPMSQEAKLGIKPHIQRLLDQGILVPCQSPWNTPLLPVKKPGTNDYRPVQGLREVNKRVEDIHPTVPNPYNLLSGLPTSHRWYTVLDLKDAFFCLRLHPTSQPLFASEWRDPGMGISGQLTWTRLPQGFKNSPTLFNEALHRGLADFRIQHPDLILLQYVDDLLLAATSELDCQQGTRALLKTLGNLGYRASAKKAQICQKQVKYLGYLLREGQRWLTEARKETVMGQPTPKTPRQLREFLGTAGFCRLWIPRFAEMAAPLYPLTKPGTLFNWGPDQQKAYHEIKQALLTAPALGLPDLTKPFELFVDEKQGYAKGVLTQKLGPWRRPVAYLSKKLDPVAAGWPPCLRMVAAIAVLTKDAGKLTMGQPLVILAPHAVEALVKQPPDRWLSNARMTHYQAMLLDTDRVQFGPVVALNPATLLPLPEEGAPHDCLEILAETHGTEPDLTDQPIPDADHTWYTDGSSFLQEGQRKAGAAVTTETEVIWARALPAGTSAQRAELIALTQALKMAEGKRLNVYTDSRYAFATAHIHGEIYKRRGWLTSEGREIKNKSEILALLKALFLPKRLSIIHCLGHQKGDSAEARGNRLADQAAREAAIKTPPDTSTLLAGKRTADGSEFEKRTADGSEFESPKKKAKVE

SEQ ID NO: 6741 - protein, 2087 aa, synthetic construct
MPAAKRVKLDGGDKKYSIGLDIGTNSVGWAVITDEYKVPSKKFKVLGNTDRHSIKKNLIGALLFDSGETAEATRLKRTARRRYTRRKNRICYLQEIFSNEMAKVDDSFFHRLEESFLVEEDKKHERHPIFGNIVDEVAYHEKYPTIYHLRKKLVDSTDKADLRLIYLALAHMIKFRGHFLIEGDLNPDNSDVDKLFIQLVQTYNQLFEENPINASGVDAKAILSARLSKSRRLENLIAQLPGEKKNGLFGNLIALSLGLTPNFKSNFDLAEDAKLQLSKDTYDDDLDNLLAQIGDQYADLFLAAKNLSDAILLSDILRVNTEITKAPLSASMIKRYDEHHQDLTLLKALVRQQLPEKYKEIFFDQSKNGYAGYIDGGASQEEFYKFIKPILEKMDGTEELLVKLNREDLLRKQRTFDNGSIPHQIHLGELHAILRRQEDFYPFLKDNREKIEKILTFRIPYYVGPLARGNSRFAWMTRKSEETITPWNFEEVVDKGASAQSFIERMTNFDKNLPNEKVLPKHSLLYEYFTVYNELTKVKYVTEGMRKPAFLSGEQKKAIVDLLFKTNRKVTVKQLKEDYFKKIECFDSVEISGVEDRFNASLGTYHDLLKIIKDKDFLDNEENEDILEDIVLTLTLFEDREMIEERLKTYAHLFDDKVMKQLKRRRYTGWGRLSRKLINGIRDKQSGKTILDFLKSDGFANRNFMQLIHDDSLTFKEDIQKAQVSGQGDSLHEHIANLAGSPAIKKGILQTVKVVDELVKVMGRHKPENIVIEMARENQTTQKGQKNSRERMKRIEEGIKELGSQILKEHPVENTQLQNEKLYLYYLQNGRDMYVDQELDINRLSDYDVDHIVPQSFLKDDSIDNKVLTRSDKARGKSDNVPSEEVVKKMKNYWRQLLNAKLITQRKFDNLTKAERGGLSELDKAGFIKRQLVETRQITKHVAQILDSRMNTKYDENDKLIREVKVITLKSKLVSDFRKDFQFYKVREINNYHHAHDAYLNAVVGTALIKKYPKLESEFVYGDYKVYDVRKMIAKSEQEIGKATAKYFFYSNIMNFFKTEITLANGEIRKRPLIETNGETGEIVWDKGRDFATVRKVLSMPQVNIVKKTEVQTGGFSKESILPKRNSDKLIARKKDWDPKKYGGFDSPTVAYSVLVVAKVEKGKSKKLKSVKELLGITIMERSSFEKNPIDFLEAKGYKEVKKDLIIKLPKYSLFELENGRKRMLASAGELQKGNELALPSKYVNFLYLASHYEKLKGSPEDNEQKQLFVEQHKHYLDEIIEQISEFSKRVILADANLDKVLSAYNKHRDKPIREQAENIIHLFTLTNLGAPAAFKYFDTTIDRKRYTSTKEVLDATLIHQSITGLYETRIDLSQLGGDGGEAAAKGSSGGTLQLDDEYRLYSPLVKPDQNIQFWLEQFPQAWAETAGMGLAKQVPPQVIQLKASATPVSVRQYPLSKEAQEGIRPHVQRLIQQGILVPVQSPWNTPLLPVRKPGTNDYRPVQDLREVNKRVQDIHPTVPNPYNLLCALPPQRSWYTVLDLKDAFFCLRLHPTSQPLFAFEWRDPGTGRTGQLTWTRLPQGFKNSPTIFDEALHRDLANFRIQHPQVTLLQYVDDLLLAGATKQDCLEGTKALLLELSDLGYRASAKKAQICRREVTYLGYSLRDGQRWLTEARKKTVVQIPAPTTAKQVREFLGTAGFCRLWIPGFATLAAPLYPLTKEKGEFSWAPEHQKAFDAIKKALLSAPALALPDVTKPFTLYVDERKGVARGVLTQTLGPWRRPVAYLSKKLDPVASGWPVCLKAIAAVAILVKDADKLTLGQNITVIAPHALENIVRQPPDRWMTNARMTHYQSLLLTERVTFAPPAALNPATLLPEETDEPVTHDCHQLLIEETGVRKDLTDIPLTGEVLTWFTDGSSYVVEGKRMAGAAVVDGTRTIWASSLPEGTSAQKAELMALTQALRLAEGKSINIYTDSRYAFATAHVHGAIYKQRGLLTSAGREIKNKEEILSLLEALHLPKRLAIIHCPGHQKAKDPISRGNQMADRVAKQAAQGVNLLAGKRTADGSEFEKRTADGSEFESPKKKAKVE

SEQ ID NO: 6742 - protein, 2014 aa, synthetic construct
MPAAKRVKLDGGDKKYSIGLDIGTNSVGWAVITDEYKVPSKKFKVLGNTDRHSIKKNLIGALLFDSGETAEATRLKRTARRRYTRRKNRICYLQEIFSNEMAKVDDSFFHRLEESFLVEEDKKHERHPIFGNIVDEVAYHEKYPTIYHLRKKLVDSTDKADLRLIYLALAHMIKFRGHFLIEGDLNPDNSDVDKLFIQLVQTYNQLFEENPINASGVDAKAILSARLSKSRRLENLIAQLPGEKKNGLFGNLIALSLGLTPNFKSNFDLAEDAKLQLSKDTYDDDLDNLLAQIGDQYADLFLAAKNLSDAILLSDILRVNTEITKAPLSASMIKRYDEHHQDLTLLKALVRQQLPEKYKEIFFDQSKNGYAGYIDGGASQEEFYKFIKPILEKMDGTEELLVKLNREDLLRKQRTFDNGSIPHQIHLGELHAILRRQEDFYPFLKDNREKIEKILTFRIPYYVGPLARGNSRFAWMTRKSEETITPWNFEEVVDKGASAQSFIERMTNFDKNLPNEKVLPKHSLLYEYFTVYNELTKVKYVTEGMRKPAFLSGEQKKAIVDLLFKTNRKVTVKQLKEDYFKKIECFDSVEISGVEDRFNASLGTYHDLLKIIKDKDFLDNEENEDILEDIVLTLTLFEDREMIEERLKTYAHLFDDKVMKQLKRRRYTGWGRLSRKLINGIRDKQSGKTILDFLKSDGFANRNFMQLIHDDSLTFKEDIQKAQVSGQGDSLHEHIANLAGSPAIKKGILQTVKVVDELVKVMGRHKPENIVIEMARENQTTQKGQKNSRERMKRIEEGIKELGSQILKEHPVENTQLQNEKLYLYYLQNGRDMYVDQELDINRLSDYDVDHIVPQSFLKDDSIDNKVLTRSDKARGKSDNVPSEEVVKKMKNYWRQLLNAKLITQRKFDNLTKAERGGLSELDKAGFIKRQLVETRQITKHVAQILDSRMNTKYDENDKLIREVKVITLKSKLVSDFRKDFQFYKVREINNYHHAHDAYLNAVVGTALIKKYPKLESEFVYGDYKVYDVRKMIAKSEQEIGKATAKYFFYSNIMNFFKTEITLANGEIRKRPLIETNGETGEIVWDKGRDFATVRKVLSMPQVNIVKKTEVQTGGFSKESILPKRNSDKLIARKKDWDPKKYGGFDSPTVAYSVLVVAKVEKGKSKKLKSVKELLGITIMERSSFEKNPIDFLEAKGYKEVKKDLIIKLPKYSLFELENGRKRMLASAGELQKGNELALPSKYVNFLYLASHYEKLKGSPEDNEQKQLFVEQHKHYLDEIIEQISEFSKRVILADANLDKVLSAYNKHRDKPIREQAENIIHLFTLTNLGAPAAFKYFDTTIDRKRYTSTKEVLDATLIHQSITGLYETRIDLSQLGGDGGEAAAKGSSGGPRSRAIDIPVPHADKISWKITDPVWVDQWPLTYEKTLAAIALVQEQLAAGHIEPTNSPWNTPIFIIKKKSGSWRLLQDLRAVNKVMVPMGALQPGLPSPVAPPLNYHKIVIDLKDCFFTIPLHPEDRPYFAFSVPQINFQSPMPRYQWKVLPQGMANSPTLCQKFVAAAIAPVRSQWPEAYILHYMDDILLACDSAEAAKACYAHIISCLTSYGLKIAPDKVQVSEPFSYLGFELHHQQVFTPRVCLKTDHLKTLNDFQKLLGDIQWLRPYLKLPTSALVPLNNILKPDPNPLSVRALTPEAKQSLALINKAIQNQSVQQISYNLPLVLLLLPTPHTPTAVFWQPNGTDPTKNGSPLLWLHLPASPSKVLLTYPSLLAMLIIKGRYTGRQLFGRDPHSIIIPYTQDQLTWLLQTSDEWAIALSSFTGDIDNHYPSDPVIQFAKLHQFIFPKITKCAPIPQATLVFTDGSSNGIAAYVIDNQPISIKSPYLSAQLVELYAILQVFTVLAHQPFNLYTDSAYIAQSVPLLETVPFIKSSTNATPLFSKLQQLILNRQHPFFIGHLRAHLNLPGPLAEGNALADAATQIFPIISDAGKRTADGSEFEKRTADGSEFESPKKKAKVE

SEQ ID NO: 6743 - protein, 2072 aa, synthetic construct
MPAAKRVKLDGGDKKYSIGLDIGTNSVGWAVITDEYKVPSKKFKVLGNTDRHSIKKNLIGALLFDSGETAEATRLKRTARRRYTRRKNRICYLQEIFSNEMAKVDDSFFHRLEESFLVEEDKKHERHPIFGNIVDEVAYHEKYPTIYHLRKKLVDSTDKADLRLIYLALAHMIKFRGHFLIEGDLNPDNSDVDKLFIQLVQTYNQLFEENPINASGVDAKAILSARLSKSRRLENLIAQLPGEKKNGLFGNLIALSLGLTPNFKSNFDLAEDAKLQLSKDTYDDDLDNLLAQIGDQYADLFLAAKNLSDAILLSDILRVNTEITKAPLSASMIKRYDEHHQDLTLLKALVRQQLPEKYKEIFFDQSKNGYAGYIDGGASQEEFYKFIKPILEKMDGTEELLVKLNREDLLRKQRTFDNGSIPHQIHLGELHAILRRQEDFYPFLKDNREKIEKILTFRIPYYVGPLARGNSRFAWMTRKSEETITPWNFEEVVDKGASAQSFIERMTNFDKNLPNEKVLPKHSLLYEYFTVYNELTKVKYVTEGMRKPAFLSGEQKKAIVDLLFKTNRKVTVKQLKEDYFKKIECFDSVEISGVEDRFNASLGTYHDLLKIIKDKDFLDNEENEDILEDIVLTLTLFEDREMIEERLKTYAHLFDDKVMKQLKRRRYTGWGRLSRKLINGIRDKQSGKTILDFLKSDGFANRNFMQLIHDDSLTFKEDIQKAQVSGQGDSLHEHIANLAGSPAIKKGILQTVKVVDELVKVMGRHKPENIVIEMARENQTTQKGQKNSRERMKRIEEGIKELGSQILKEHPVENTQLQNEKLYLYYLQNGRDMYVDQELDINRLSDYDVDHIVPQSFLKDDSIDNKVLTRSDKARGKSDNVPSEEVVKKMKNYWRQLLNAKLITQRKFDNLTKAERGGLSELDKAGFIKRQLVETRQITKHVAQILDSRMNTKYDENDKLIREVKVITLKSKLVSDFRKDFQFYKVREINNYHHAHDAYLNAVVGTALIKKYPKLESEFVYGDYKVYDVRKMIAKSEQEIGKATAKYFFYSNIMNFFKTEITLANGEIRKRPLIETNGETGEIVWDKGRDFATVRKVLSMPQVNIVKKTEVQTGGFSKESILPKRNSDKLIARKKDWDPKKYGGFDSPTVAYSVLVVAKVEKGKSKKLKSVKELLGITIMERSSFEKNPIDFLEAKGYKEVKKDLIIKLPKYSLFELENGRKRMLASAGELQKGNELALPSKYVNFLYLASHYEKLKGSPEDNEQKQLFVEQHKHYLDEIIEQISEFSKRVILADANLDKVLSAYNKHRDKPIREQAENIIHLFTLTNLGAPAAFKYFDTTIDRKRYTSTKEVLDATLIHQSITGLYETRIDLSQLGGDGGEAAAKGSSGGSCQTKNTLNIDEYLLQFPDQLWASLPTDIGRMLVPPITIKIKDNASLPSIRQYPLPKDKTEGLRPLISSLENQGILIKCHSPCNTPIFPIKKAGRDEYRMIHDLRAINNIVAPLTAVVASPTTVLSNLAPSLHWFTVIDLSNAFFSVPIHKDSQYLFAFTFEGHQYTWTVLPQGFIHSPTLFSQALYQSLHKIKFKISSEICIYMDDVLIASKDRDTNLKDTAVMLQHLASEGHKVSKKKLQLCQQEVVYLGQLLTPEGRKILPDRKVTVSQFQQPTTIRQIRAFLGLVGYCRHWIPEFSIHSKFLEKQLKKDTAEPFQLDDQQVEAFNKLKHAITTAPVLVVPDPAKPFQLYTSHSEHASIAVLTQKHAGRTRPIAFLSSKFDAIESGLPPCLKACASIHRSLTQADSFILGAPLIIYTTHAICTLLQRDRSQLVTASRFSKWEADLLRPELTFVACSAVSPAHLYMQSCENNIPPHDCVLLTHTISRPRPDLSDLPIPDPDMTLFSDGSYTTGRGGAAVVMHRPVTDDFIIIHQQPGGASAQTAELLALAAACHLATDKTVNIYTDSRYAYGVVHDFGHLWMHRGFVTSAGTPIKNHKEIEYLLKQIMKPKQVSVIKIEAHTKGVSMEVRGNAAADEAAKNAVFLVQRAGKRTADGSEFEKRTADGSEFESPKKKAKVE

SEQ ID NO: 6744 - protein, 2093 aa, synthetic construct
MPAAKRVKLDGGDKKYSIGLDIGTNSVGWAVITDEYKVPSKKFKVLGNTDRHSIKKNLIGALLFDSGETAEATRLKRTARRRYTRRKNRICYLQEIFSNEMAKVDDSFFHRLEESFLVEEDKKHERHPIFGNIVDEVAYHEKYPTIYHLRKKLVDSTDKADLRLIYLALAHMIKFRGHFLIEGDLNPDNSDVDKLFIQLVQTYNQLFEENPINASGVDAKAILSARLSKSRRLENLIAQLPGEKKNGLFGNLIALSLGLTPNFKSNFDLAEDAKLQLSKDTYDDDLDNLLAQIGDQYADLFLAAKNLSDAILLSDILRVNTEITKAPLSASMIKRYDEHHQDLTLLKALVRQQLPEKYKEIFFDQSKNGYAGYIDGGASQEEFYKFIKPILEKMDGTEELLVKLNREDLLRKQRTFDNGSIPHQIHLGELHAILRRQEDFYPFLKDNREKIEKILTFRIPYYVGPLARGNSRFAWMTRKSEETITPWNFEEVVDKGASAQSFIERMTNFDKNLPNEKVLPKHSLLYEYFTVYNELTKVKYVTEGMRKPAFLSGEQKKAIVDLLFKTNRKVTVKQLKEDYFKKIECFDSVEISGVEDRFNASLGTYHDLLKIIKDKDFLDNEENEDILEDIVLTLTLFEDREMIEERLKTYAHLFDDKVMKQLKRRRYTGWGRLSRKLINGIRDKQSGKTILDFLKSDGFANRNFMQLIHDDSLTFKEDIQKAQVSGQGDSLHEHIANLAGSPAIKKGILQTVKVVDELVKVMGRHKPENIVIEMARENQTTQKGQKNSRERMKRIEEGIKELGSQILKEHPVENTQLQNEKLYLYYLQNGRDMYVDQELDINRLSDYDVDHIVPQSFLKDDSIDNKVLTRSDKARGKSDNVPSEEVVKKMKNYWRQLLNAKLITQRKFDNLTKAERGGLSELDKAGFIKRQLVETRQITKHVAQILDSRMNTKYDENDKLIREVKVITLKSKLVSDFRKDFQFYKVREINNYHHAHDAYLNAVVGTALIKKYPKLESEFVYGDYKVYDVRKMIAKSEQEIGKATAKYFFYSNIMNFFKTEITLANGEIRKRPLIETNGETGEIVWDKGRDFATVRKVLSMPQVNIVKKTEVQTGGFSKESILPKRNSDKLIARKKDWDPKKYGGFDSPTVAYSVLVVAKVEKGKSKKLKSVKELLGITIMERSSFEKNPIDFLEAKGYKEVKKDLIIKLPKYSLFELENGRKRMLASAGELQKGNELALPSKYVNFLYLASHYEKLKGSPEDNEQKQLFVEQHKHYLDEIIEQISEFSKRVILADANLDKVLSAYNKHRDKPIREQAENIIHLFTLTNLGAPAAFKYFDTTIDRKRYTSTKEVLDATLIHQSITGLYETRIDLSQLGGDGGEAAAKGSSGGTLNIEDEYRLHETSKEPDVPLGSTWLSDFPQAWAETGGMGLAVRQAPLIIPLKATSTPVSIKQYPMSQEARLGIKPHIQRLLDQGILVPCQSPWNTPLLPVKKPGTNDYRPVQDLREVNKRVEDIHPTVPNPYNLLSGLPPSHQWYTVLDLKDAFFCLRLHPTSQPLFAFEWRDPEMGISGQLTWTRLPQGFKNSPTLFNEALHRDLADFRIQHPDLILLQYVDDLLLAATSEQDCQRGTRALLQTLGNLGYRASAKKAQICQKQVKYLGYLLKEGQRWLTEARKETVMGQPTPKTPRQLREFLGTAGFCRLWIPGFAEMAAPLYPLTKPGTLFNWGPDQQKAYQEIKQALLTAPALGLPDLTKPFELFVDEKQGYAKGVLTQKLGPWRRPVAYLSKKLDPVAAGWPPCLRMVAAIAVLTKDAGKLTMGQPLVILAPHAVEALVKQPPDRWLSNARMTHYQAMLLDTDRVQFGPVVALNPATLLPLPEKEAPHDCLEILAETHGTRPDLTDQPIPDADYTWYTDGSSFLQEGQRRAGAAVTTETEVIWARALPAGTSAQRAELIALTQALKMAEGKKLNVYTDSRYAFATAHVHGEIYRRRGWLTSEGREIKNKNEILALLKALFLPKRLSIIHCPGHQKGNSAEARGNRMADQAAREAAMKAVLETSTLLAGKRTADGSEFEKRTADGSEFESPKKKAKVE

SEQ ID NO: 6745 - protein, 2093 aa, synthetic construct
MPAAKRVKLDGGDKKYSIGLDIGTNSVGWAVITDEYKVPSKKFKVLGNTDRHSIKKNLIGALLFDSGETAEATRLKRTARRRYTRRKNRICYLQEIFSNEMAKVDDSFFHRLEESFLVEEDKKHERHPIFGNIVDEVAYHEKYPTIYHLRKKLVDSTDKADLRLIYLALAHMIKFRGHFLIEGDLNPDNSDVDKLFIQLVQTYNQLFEENPINASGVDAKAILSARLSKSRRLENLIAQLPGEKKNGLFGNLIALSLGLTPNFKSNFDLAEDAKLQLSKDTYDDDLDNLLAQIGDQYADLFLAAKNLSDAILLSDILRVNTEITKAPLSASMIKRYDEHHQDLTLLKALVRQQLPEKYKEIFFDQSKNGYAGYIDGGASQEEFYKFIKPILEKMDGTEELLVKLNREDLLRKQRTFDNGSIPHQIHLGELHAILRRQEDFYPFLKDNREKIEKILTFRIPYYVGPLARGNSRFAWMTRKSEETITPWNFEEVVDKGASAQSFIERMTNFDKNLPNEKVLPKHSLLYEYFTVYNELTKVKYVTEGMRKPAFLSGEQKKAIVDLLFKTNRKVTVKQLKEDYFKKIECFDSVEISGVEDRFNASLGTYHDLLKIIKDKDFLDNEENEDILEDIVLTLTLFEDREMIEERLKTYAHLFDDKVMKQLKRRRYTGWGRLSRKLINGIRDKQSGKTILDFLKSDGFANRNFMQLIHDDSLTFKEDIQKAQVSGQGDSLHEHIANLAGSPAIKKGILQTVKVVDELVKVMGRHKPENIVIEMARENQTTQKGQKNSRERMKRIEEGIKELGSQILKEHPVENTQLQNEKLYLYYLQNGRDMYVDQELDINRLSDYDVDHIVPQSFLKDDSIDNKVLTRSDKARGKSDNVPSEEVVKKMKNYWRQLLNAKLITQRKFDNLTKAERGGLSELDKAGFIKRQLVETRQITKHVAQILDSRMNTKYDENDKLIREVKVITLKSKLVSDFRKDFQFYKVREINNYHHAHDAYLNAVVGTALIKKYPKLESEFVYGDYKVYDVRKMIAKSEQEIGKATAKYFFYSNIMNFFKTEITLANGEIRKRPLIETNGETGEIVWDKGRDFATVRKVLSMPQVNIVKKTEVQTGGFSKESILPKRNSDKLIARKKDWDPKKYGGFDSPTVAYSVLVVAKVEKGKSKKLKSVKELLGITIMERSSFEKNPIDFLEAKGYKEVKKDLIIKLPKYSLFELENGRKRMLASAGELQKGNELALPSKYVNFLYLASHYEKLKGSPEDNEQKQLFVEQHKHYLDEIIEQISEFSKRVILADANLDKVLSAYNKHRDKPIREQAENIIHLFTLTNLGAPAAFKYFDTTIDRKRYTSTKEVLDATLIHQSITGLYETRIDLSQLGGDGGGSSPAPGGTAPLEEEYRLFLEAPIQNVTLLEQWKREIPKVWAEINPPGLASTQAPIHVQLLSTALPVRVRQYPITLEAKRSLRETIRKFRAAGILRPVHSPWNTPLLPVRKSGTSEYRMVQDLREVNKRVETIHPTVPNPYTLLSLLPPDRIWYSVLDLKDAFFCIPLAPESQLIFAFEWADAEEGESGQLTWTRLPQGFKNSPTLFNEALNRDLQGFRLDHPSVSLLQYVDDLLIAADTQAACLSATRDLLMTLAELGYRVSGKKAQLCQEEVTYLGFKIHKGSRSLSNSRTQAILQIPVPKTKRQVREFLGTIGYCRLWIPGFAELAQPLYAATRPGNDPLVWGEKEEEAFQSLKLALTQPPALALPSLDKPFQLFVEETSGAAKGVLTQALGPWKRPVAYLSKRLDPVAAGWPRCLRAIAAAALLTREASKLTFGQDIEITSSHNLESLLRSPPDKWLTNARITQYQVLLLDPPRVRFKQTAALNPATLLPETDDTLPIHHCLDTLDSLTSTRPDLTDQPLAQAEATLFTDGSSYIRDGKRYAGAAVVTLDSVIWAEPLPIGTSAQKAELIALTKALEWSKDKSVNIYTDSRYAFATLHVHGMIYRERGWLTAGGKAIKNAPEILALLTAVWLPKRVAVMHCKGHQKDDAPTSTGNRRADEVAREVAIRPLSTQATISAGKRTADGSEFEKRTADGSEFESPKKKAKVE

SEQ ID NO: 6746 - protein, 2097 aa, synthetic construct
MPAAKRVKLDGGDKKYSIGLDIGTNSVGWAVITDEYKVPSKKFKVLGNTDRHSIKKNLIGALLFDSGETAEATRLKRTARRRYTRRKNRICYLQEIFSNEMAKVDDSFFHRLEESFLVEEDKKHERHPIFGNIVDEVAYHEKYPTIYHLRKKLVDSTDKADLRLIYLALAHMIKFRGHFLIEGDLNPDNSDVDKLFIQLVQTYNQLFEENPINASGVDAKAILSARLSKSRRLENLIAQLPGEKKNGLFGNLIALSLGLTPNFKSNFDLAEDAKLQLSKDTYDDDLDNLLAQIGDQYADLFLAAKNLSDAILLSDILRVNTEITKAPLSASMIKRYDEHHQDLTLLKALVRQQLPEKYKEIFFDQSKNGYAGYIDGGASQEEFYKFIKPILEKMDGTEELLVKLNREDLLRKQRTFDNGSIPHQIHLGELHAILRRQEDFYPFLKDNREKIEKILTFRIPYYVGPLARGNSRFAWMTRKSEETITPWNFEEVVDKGASAQSFIERMTNFDKNLPNEKVLPKHSLLYEYFTVYNELTKVKYVTEGMRKPAFLSGEQKKAIVDLLFKTNRKVTVKQLKEDYFKKIECFDSVEISGVEDRFNASLGTYHDLLKIIKDKDFLDNEENEDILEDIVLTLTLFEDREMIEERLKTYAHLFDDKVMKQLKRRRYTGWGRLSRKLINGIRDKQSGKTILDFLKSDGFANRNFMQLIHDDSLTFKEDIQKAQVSGQGDSLHEHIANLAGSPAIKKGILQTVKVVDELVKVMGRHKPENIVIEMARENQTTQKGQKNSRERMKRIEEGIKELGSQILKEHPVENTQLQNEKLYLYYLQNGRDMYVDQELDINRLSDYDVDHIVPQSFLKDDSIDNKVLTRSDKARGKSDNVPSEEVVKKMKNYWRQLLNAKLITQRKFDNLTKAERGGLSELDKAGFIKRQLVETRQITKHVAQILDSRMNTKYDENDKLIREVKVITLKSKLVSDFRKDFQFYKVREINNYHHAHDAYLNAVVGTALIKKYPKLESEFVYGDYKVYDVRKMIAKSEQEIGKATAKYFFYSNIMNFFKTEITLANGEIRKRPLIETNGETGEIVWDKGRDFATVRKVLSMPQVNIVKKTEVQTGGFSKESILPKRNSDKLIARKKDWDPKKYGGFDSPTVAYSVLVVAKVEKGKSKKLKSVKELLGITIMERSSFEKNPIDFLEAKGYKEVKKDLIIKLPKYSLFELENGRKRMLASAGELQKGNELALPSKYVNFLYLASHYEKLKGSPEDNEQKQLFVEQHKHYLDEIIEQISEFSKRVILADANLDKVLSAYNKHRDKPIREQAENIIHLFTLTNLGAPAAFKYFDTTIDRKRYTSTKEVLDATLIHQSITGLYETRIDLSQLGGDGGGSSPAPGGTVSLQDEHRLFDIPVTTSLPDVWLQDFPQAWAETGGLGRAKCQAPIIIDLKPTAVPVSIKQYPMSLEAHMGIRQHIIKFLELGVLRPCRSPWNTPLLPVKKPGTQDYRPVQDLREINKRTVDIHPTVPNPYNLLSTLKPDYSWYTVLDLKDAFFCLPLAPQSQELFAFEWKDPERGISGQLTWTRLPQGFKNSPTLFNEALHRDLTDFRTQHPEVTLLQYVDDLLLAAPTKKACTQGTRHLLQELGEKGYRASAKKAQICQTKVTYLGYILSEGKRWLTPGRIETVARIPPPRNPREVREFLGKAGFCRLFIPGFAELAAPLYALTKPSTPFTWQTEHQLAFEALKKALLSAPALGLPDTSKPFTLFLDERQGIAKGVLTQKLGPWKRPVAYLSKKLDPVAAGWPPCLRIMAATAMLVKDSAKLTLGQPLTVITPHTLEAIVRQPPDRWITNARLTHYQALLLDTDRVQFGPPVTLNPATLLPVPENQPSPHDCRQVLAETHGTREDLKDQELPDADHTWYTDGSSYLDSGTRRAGAAVVDGHNTIWAQSLPPGTSAQKAELIALTKALELSKGKKANIYTDSRYAFATAHTHGSIYERRGWLTSEGKEIKNKAEIIALLKALFLPQEVAIIHCPGHQKGQDPVAVGNRQADRVARQAAMAEVLTLATEPDNTSHITAGKRTADGSEFEKRTADGSEFESPKKKAKVE

SEQ ID NO: 6747 - protein, 2082 aa, synthetic construct
MPAAKRVKLDGGDKKYSIGLDIGTNSVGWAVITDEYKVPSKKFKVLGNTDRHSIKKNLIGALLFDSGETAEATRLKRTARRRYTRRKNRICYLQEIFSNEMAKVDDSFFHRLEESFLVEEDKKHERHPIFGNIVDEVAYHEKYPTIYHLRKKLVDSTDKADLRLIYLALAHMIKFRGHFLIEGDLNPDNSDVDKLFIQLVQTYNQLFEENPINASGVDAKAILSARLSKSRRLENLIAQLPGEKKNGLFGNLIALSLGLTPNFKSNFDLAEDAKLQLSKDTYDDDLDNLLAQIGDQYADLFLAAKNLSDAILLSDILRVNTEITKAPLSASMIKRYDEHHQDLTLLKALVRQQLPEKYKEIFFDQSKNGYAGYIDGGASQEEFYKFIKPILEKMDGTEELLVKLNREDLLRKQRTFDNGSIPHQIHLGELHAILRRQEDFYPFLKDNREKIEKILTFRIPYYVGPLARGNSRFAWMTRKSEETITPWNFEEVVDKGASAQSFIERMTNFDKNLPNEKVLPKHSLLYEYFTVYNELTKVKYVTEGMRKPAFLSGEQKKAIVDLLFKTNRKVTVKQLKEDYFKKIECFDSVEISGVEDRFNASLGTYHDLLKIIKDKDFLDNEENEDILEDIVLTLTLFEDREMIEERLKTYAHLFDDKVMKQLKRRRYTGWGRLSRKLINGIRDKQSGKTILDFLKSDGFANRNFMQLIHDDSLTFKEDIQKAQVSGQGDSLHEHIANLAGSPAIKKGILQTVKVVDELVKVMGRHKPENIVIEMARENQTTQKGQKNSRERMKRIEEGIKELGSQILKEHPVENTQLQNEKLYLYYLQNGRDMYVDQELDINRLSDYDVDHIVPQSFLKDDSIDNKVLTRSDKARGKSDNVPSEEVVKKMKNYWRQLLNAKLITQRKFDNLTKAERGGLSELDKAGFIKRQLVETRQITKHVAQILDSRMNTKYDENDKLIREVKVITLKSKLVSDFRKDFQFYKVREINNYHHAHDAYLNAVVGTALIKKYPKLESEFVYGDYKVYDVRKMIAKSEQEIGKATAKYFFYSNIMNFFKTEITLANGEIRKRPLIETNGETGEIVWDKGRDFATVRKVLSMPQVNIVKKTEVQTGGFSKESILPKRNSDKLIARKKDWDPKKYGGFDSPTVAYSVLVVAKVEKGKSKKLKSVKELLGITIMERSSFEKNPIDFLEAKGYKEVKKDLIIKLPKYSLFELENGRKRMLASAGELQKGNELALPSKYVNFLYLASHYEKLKGSPEDNEQKQLFVEQHKHYLDEIIEQISEFSKRVILADANLDKVLSAYNKHRDKPIREQAENIIHLFTLTNLGAPAAFKYFDTTIDRKRYTSTKEVLDATLIHQSITGLYETRIDLSQLGGDGGGSSPAPGGVPWILKKPLELTIKLDLEEQQGTLLNNSILSKKGKEELKQLFEKYSALWQSWENQVGHRRIRPHKIATGTVKPTPQKQYHINPKAKPDIQIVINDLLKQGVLIQKESTMNTPVYPVPKPNGRWRMVLDYRAVNKVTPLIAVQNQHSYGILGSLFKGRYKTTIDLSNGFWAHPIVPEDYWITAFTWQGKQYCWTVLPQGFLNSPGLFTGDVVDLLQGIPNVEVYVDDVYISHDSEKEHLEYLDILFNRLKEAGYIISLKKSNIANSIVDFLGFQITNEGRGLTDTFKEKLENITAPTTLKQLQSILGLLNFARNFIPDFTELIAPLYALIPKSTKNYVPWQIEHSTTLETLITKLNGAEYLQGRKGDKTLIMKVNASYTTGYIRYYNEGEKKPISYVSIVFSKTELKFTELEKLLTTVHKGLLKALDLSMGQNIHVYSPIVSMQNIQKTPQTAKKALASRWLSWLSYLEDPRIRFFYDPQMPALKDLPAVDTGKDNKKHPSNFQHIFYTDGSAITSPTKEGHLNAGMGIVYFINKDGNLQKQQEWSISLGNHTAQFAEIAAFEFALKKCLPLGGNILVVTDSNYVAKAYNEELDVWASNGFVNNRKKPLKHISKWKSVADLKRLRPDVVVTHEPGHQKLDSSPHAYGNNLADQLATQASFKVHAGKRTADGSEFEKRTADGSEFESPKKKAKVE

SEQ ID NO: 6748 - protein, 2090 aa, synthetic construct
MPAAKRVKLDGGDKKYSIGLDIGTNSVGWAVITDEYKVPSKKFKVLGNTDRHSIKKNLIGALLFDSGETAEATRLKRTARRRYTRRKNRICYLQEIFSNEMAKVDDSFFHRLEESFLVEEDKKHERHPIFGNIVDEVAYHEKYPTIYHLRKKLVDSTDKADLRLIYLALAHMIKFRGHFLIEGDLNPDNSDVDKLFIQLVQTYNQLFEENPINASGVDAKAILSARLSKSRRLENLIAQLPGEKKNGLFGNLIALSLGLTPNFKSNFDLAEDAKLQLSKDTYDDDLDNLLAQIGDQYADLFLAAKNLSDAILLSDILRVNTEITKAPLSASMIKRYDEHHQDLTLLKALVRQQLPEKYKEIFFDQSKNGYAGYIDGGASQEEFYKFIKPILEKMDGTEELLVKLNREDLLRKQRTFDNGSIPHQIHLGELHAILRRQEDFYPFLKDNREKIEKILTFRIPYYVGPLARGNSRFAWMTRKSEETITPWNFEEVVDKGASAQSFIERMTNFDKNLPNEKVLPKHSLLYEYFTVYNELTKVKYVTEGMRKPAFLSGEQKKAIVDLLFKTNRKVTVKQLKEDYFKKIECFDSVEISGVEDRFNASLGTYHDLLKIIKDKDFLDNEENEDILEDIVLTLTLFEDREMIEERLKTYAHLFDDKVMKQLKRRRYTGWGRLSRKLINGIRDKQSGKTILDFLKSDGFANRNFMQLIHDDSLTFKEDIQKAQVSGQGDSLHEHIANLAGSPAIKKGILQTVKVVDELVKVMGRHKPENIVIEMARENQTTQKGQKNSRERMKRIEEGIKELGSQILKEHPVENTQLQNEKLYLYYLQNGRDMYVDQELDINRLSDYDVDHIVPQSFLKDDSIDNKVLTRSDKARGKSDNVPSEEVVKKMKNYWRQLLNAKLITQRKFDNLTKAERGGLSELDKAGFIKRQLVETRQITKHVAQILDSRMNTKYDENDKLIREVKVITLKSKLVSDFRKDFQFYKVREINNYHHAHDAYLNAVVGTALIKKYPKLESEFVYGDYKVYDVRKMIAKSEQEIGKATAKYFFYSNIMNFFKTEITLANGEIRKRPLIETNGETGEIVWDKGRDFATVRKVLSMPQVNIVKKTEVQTGGFSKESILPKRNSDKLIARKKDWDPKKYGGFDSPTVAYSVLVVAKVEKGKSKKLKSVKELLGITIMERSSFEKNPIDFLEAKGYKEVKKDLIIKLPKYSLFELENGRKRMLASAGELQKGNELALPSKYVNFLYLASHYEKLKGSPEDNEQKQLFVEQHKHYLDEIIEQISEFSKRVILADANLDKVLSAYNKHRDKPIREQAENIIHLFTLTNLGAPAAFKYFDTTIDRKRYTSTKEVLDATLIHQSITGLYETRIDLSQLGGDGGGSSPAPGGTLQLEEEYRLFEPESTQKQEMDIWLKNFPQAWAETGGMGTAHCQAPVLIQLKATATPISIRQYPMPHEAYQGIKPHIRRMLDQGILKPCQSPWNTPLLPVKKPGTEDYRPVQDLREVNKRVEDIHPTVPNPYNLLSTLPPSHPWYTVLDLKDAFFCLRLHSESQLLFAFEWRDPEIGLSGQLTWTRLPQGFKNSPTLFNEALHSDLADFRVRYPALVLLQYVDDLLLAAATRTECLEGTKALLETLGNKGYRASAKKAQICLQEVTYLGYSLKDGQRWLTKARKEAILSIPVPKNSRQVREFLGTAGYCRLWIPGFAELAAPLYPLTRPGTLFQWGTEQQLAFEDIKKALLSSPALGLPDITKPFELFIDENSGFAKGVLVQKLGPWKRPVAYLSKKLDTVASGWPPCLRMVAAIAILVKDAGKLTLGQPLTILTSHPVEALVRQPPNKWLSNARMTHYQAMLLDAERVHFGPTVSLNPATLLPLPSGGNHHDCLQILAETHGTRPDLTDQPLPDADLTWYTDGSSFIRNGEREAGAAVTTESEVIWAAPLPPGTSAQRAELIALTQALKMAEGKKLTVYTDSRYAFATTHVHGEIYRRRGWLTSEGKEIKNKNEILALLEALFLPKRLSIIHCPGHQKGDSPQAKGNRLADDTAKKAATETHSSLTVLPAGKRTADGSEFEKRTADGSEFESPKKKAKVE

SEQ ID NO: 6749 - protein, 2213 aa, synthetic construct
MPAAKRVKLDGGDKKYSIGLDIGTNSVGWAVITDEYKVPSKKFKVLGNTDRHSIKKNLIGALLFDSGETAEATRLKRTARRRYTRRKNRICYLQEIFSNEMAKVDDSFFHRLEESFLVEEDKKHERHPIFGNIVDEVAYHEKYPTIYHLRKKLVDSTDKADLRLIYLALAHMIKFRGHFLIEGDLNPDNSDVDKLFIQLVQTYNQLFEENPINASGVDAKAILSARLSKSRRLENLIAQLPGEKKNGLFGNLIALSLGLTPNFKSNFDLAEDAKLQLSKDTYDDDLDNLLAQIGDQYADLFLAAKNLSDAILLSDILRVNTEITKAPLSASMIKRYDEHHQDLTLLKALVRQQLPEKYKEIFFDQSKNGYAGYIDGGASQEEFYKFIKPILEKMDGTEELLVKLNREDLLRKQRTFDNGSIPHQIHLGELHAILRRQEDFYPFLKDNREKIEKILTFRIPYYVGPLARGNSRFAWMTRKSEETITPWNFEEVVDKGASAQSFIERMTNFDKNLPNEKVLPKHSLLYEYFTVYNELTKVKYVTEGMRKPAFLSGEQKKAIVDLLFKTNRKVTVKQLKEDYFKKIECFDSVEISGVEDRFNASLGTYHDLLKIIKDKDFLDNEENEDILEDIVLTLTLFEDREMIEERLKTYAHLFDDKVMKQLKRRRYTGWGRLSRKLINGIRDKQSGKTILDFLKSDGFANRNFMQLIHDDSLTFKEDIQKAQVSGQGDSLHEHIANLAGSPAIKKGILQTVKVVDELVKVMGRHKPENIVIEMARENQTTQKGQKNSRERMKRIEEGIKELGSQILKEHPVENTQLQNEKLYLYYLQNGRDMYVDQELDINRLSDYDVDHIVPQSFLKDDSIDNKVLTRSDKARGKSDNVPSEEVVKKMKNYWRQLLNAKLITQRKFDNLTKAERGGLSELDKAGFIKRQLVETRQITKHVAQILDSRMNTKYDENDKLIREVKVITLKSKLVSDFRKDFQFYKVREINNYHHAHDAYLNAVVGTALIKKYPKLESEFVYGDYKVYDVRKMIAKSEQEIGKATAKYFFYSNIMNFFKTEITLANGEIRKRPLIETNGETGEIVWDKGRDFATVRKVLSMPQVNIVKKTEVQTGGFSKESILPKRNSDKLIARKKDWDPKKYGGFDSPTVAYSVLVVAKVEKGKSKKLKSVKELLGITIMERSSFEKNPIDFLEAKGYKEVKKDLIIKLPKYSLFELENGRKRMLASAGELQKGNELALPSKYVNFLYLASHYEKLKGSPEDNEQKQLFVEQHKHYLDEIIEQISEFSKRVILADANLDKVLSAYNKHRDKPIREQAENIIHLFTLTNLGAPAAFKYFDTTIDRKRYTSTKEVLDATLIHQSITGLYETRIDLSQLGGDGGGSSPAPGGTLGDQGSRGSDPLPEPRVTLTVEGIPTEFLVNTGAEHSVLTKPMGKMGSKRTVVAGATGSKVYPWTTKRLLKIGQKQVTHSFLVIPECPAPLLGRDLLTKLKAQIQFSTEGPQVTWEDRPAMCLVLNLEEEYRLHEKPVPPSIDPSWLQLFPMVWAEKAGMGLANQVPPVVVELKSDASPVAVRQYPMSKEAREGIRPHIQRFLDLGILVPCQSPWNTPLLPVKKPGTNDYRPVQDLREVNKRVQDIHPTVPNPYNLLSSLPPSHTWYSVLDLKDAFFCLKLHPNSQPLFAFEWRDPEKGNTGQLTWTRLPQGFKNSPTLFNEALHRDLASFRALNPQVVMLQYVDDLLVAAPTYRDCKEGTRRLLQELSKLGYRVSAKKAQLCREEVTYLGYLLKGGKRWLTPARKATVMKIPTPTTPRQVREFLGTAGFCRLWIPGFASLAAPLYPLTRPKVPFTWTEAHQEAFGRIKEALLSAPALALPDLTKPFALYVDEKEGVARGVLTQTLGPWRRPVAYLSKKLDPVASGWPTCLKAIAAVALLLKDADKLTLGQNVLVIAPHNLESIVRQPPDRWMTNARMTHYQSLLLNERVSFAPPAILNPATLLPVESDDTPIHICSEILAEETGTRPDLRDQPLPGVPAWYTDGSSFIMDGRRQAGAAIVDNKRTVWASNLPEGTSAQKAELIALTQALRLAEGKSINIYTDSRYAFATAHVHGAIYKQRGWLTSAGKDIKNKEEILALLEAIHLPKRVAIIHCPGHQRGTDPVATGNRKADEAAKQAAQSTRILTETTKNAGKRTADGSEFEKRTADGSEFESPKKKAKVE

SEQ ID NO: 6750 - protein, 2091 aa, synthetic construct
MPAAKRVKLDGGDKKYSIGLDIGTNSVGWAVITDEYKVPSKKFKVLGNTDRHSIKKNLIGALLFDSGETAEATRLKRTARRRYTRRKNRICYLQEIFSNEMAKVDDSFFHRLEESFLVEEDKKHERHPIFGNIVDEVAYHEKYPTIYHLRKKLVDSTDKADLRLIYLALAHMIKFRGHFLIEGDLNPDNSDVDKLFIQLVQTYNQLFEENPINASGVDAKAILSARLSKSRRLENLIAQLPGEKKNGLFGNLIALSLGLTPNFKSNFDLAEDAKLQLSKDTYDDDLDNLLAQIGDQYADLFLAAKNLSDAILLSDILRVNTEITKAPLSASMIKRYDEHHQDLTLLKALVRQQLPEKYKEIFFDQSKNGYAGYIDGGASQEEFYKFIKPILEKMDGTEELLVKLNREDLLRKQRTFDNGSIPHQIHLGELHAILRRQEDFYPFLKDNREKIEKILTFRIPYYVGPLARGNSRFAWMTRKSEETITPWNFEEVVDKGASAQSFIERMTNFDKNLPNEKVLPKHSLLYEYFTVYNELTKVKYVTEGMRKPAFLSGEQKKAIVDLLFKTNRKVTVKQLKEDYFKKIECFDSVEISGVEDRFNASLGTYHDLLKIIKDKDFLDNEENEDILEDIVLTLTLFEDREMIEERLKTYAHLFDDKVMKQLKRRRYTGWGRLSRKLINGIRDKQSGKTILDFLKSDGFANRNFMQLIHDDSLTFKEDIQKAQVSGQGDSLHEHIANLAGSPAIKKGILQTVKVVDELVKVMGRHKPENIVIEMARENQTTQKGQKNSRERMKRIEEGIKELGSQILKEHPVENTQLQNEKLYLYYLQNGRDMYVDQELDINRLSDYDVDHIVPQSFLKDDSIDNKVLTRSDKARGKSDNVPSEEVVKKMKNYWRQLLNAKLITQRKFDNLTKAERGGLSELDKAGFIKRQLVETRQITKHVAQILDSRMNTKYDENDKLIREVKVITLKSKLVSDFRKDFQFYKVREINNYHHAHDAYLNAVVGTALIKKYPKLESEFVYGDYKVYDVRKMIAKSEQEIGKATAKYFFYSNIMNFFKTEITLANGEIRKRPLIETNGETGEIVWDKGRDFATVRKVLSMPQVNIVKKTEVQTGGFSKESILPKRNSDKLIARKKDWDPKKYGGFDSPTVAYSVLVVAKVEKGKSKKLKSVKELLGITIMERSSFEKNPIDFLEAKGYKEVKKDLIIKLPKYSLFELENGRKRMLASAGELQKGNELALPSKYVNFLYLASHYEKLKGSPEDNEQKQLFVEQHKHYLDEIIEQISEFSKRVILADANLDKVLSAYNKHRDKPIREQAENIIHLFTLTNLGAPAAFKYFDTTIDRKRYTSTKEVLDATLIHQSITGLYETRIDLSQLGGDGGGSSPAPGGTLGIEDEYRLHETSTEPDVSLGSTWLSDFPQAWAETGGMGLAVRQAPLIIPLKATSTPVSIQQYPMSHEARLGIKPHIQRLLDQGILVPCQSPWNTPLLPVKKPGTNDYRPVQDLREVNKRVEDIHPTVPNPYNLLSGLPPSHQWYTVLDLKDAFFCLRLHPTSQPLFAFEWRDPGMGISGQLTWTRLPQGFKNSPTLFNEALHRDLADFRIQHPDLILLQYVDDILLAATSELDCQQGTRALLQTLGDLGYRASAKKAQICQKQVKYLGYLLREGQRWLTEARKETVMGQPVPKTPRQLREFLGTAGFCRLWIPGFAEMAAPLYPLTKPGTLFSWGPDQQKAYQEIKQALLTAPALGLPDLTKPFELFVDEKQGYAKGVLTQKLGPWRRPVAYLSKKLDPVAAGWPPCLRMVAAIAVLTKDAGKLTMGQPLVILAPHAVEALVKQPPDRWLSNARMTHYQAMLLDTDRVQFGPVVALNPATLLPLPEEGAPHDCLEILAETHGTRPDLTDQPIPDADHTWYTDGSSFLQEGQRKAGAAVTTETEVIWAGALPAGTSAQRAELIALTQALKMAEGKRLNVYTDSRYAFATAHIHGEIYRRRGWLTSEGREIKNKSEILALLKALFLPKRLSIIHCLGHQKGDSAEARGNRLADQAAREAAIKTPPDTSTLLAGKRTADGSEFEKRTADGSEFESPKKKAKVE

SEQ ID NO: 6751 - protein, 2111 aa, synthetic construct
MPAAKRVKLDGGDKKYSIGLDIGTNSVGWAVITDEYKVPSKKFKVLGNTDRHSIKKNLIGALLFDSGETAEATRLKRTARRRYTRRKNRICYLQEIFSNEMAKVDDSFFHRLEESFLVEEDKKHERHPIFGNIVDEVAYHEKYPTIYHLRKKLVDSTDKADLRLIYLALAHMIKFRGHFLIEGDLNPDNSDVDKLFIQLVQTYNQLFEENPINASGVDAKAILSARLSKSRRLENLIAQLPGEKKNGLFGNLIALSLGLTPNFKSNFDLAEDAKLQLSKDTYDDDLDNLLAQIGDQYADLFLAAKNLSDAILLSDILRVNTEITKAPLSASMIKRYDEHHQDLTLLKALVRQQLPEKYKEIFFDQSKNGYAGYIDGGASQEEFYKFIKPILEKMDGTEELLVKLNREDLLRKQRTFDNGSIPHQIHLGELHAILRRQEDFYPFLKDNREKIEKILTFRIPYYVGPLARGNSRFAWMTRKSEETITPWNFEEVVDKGASAQSFIERMTNFDKNLPNEKVLPKHSLLYEYFTVYNELTKVKYVTEGMRKPAFLSGEQKKAIVDLLFKTNRKVTVKQLKEDYFKKIECFDSVEISGVEDRFNASLGTYHDLLKIIKDKDFLDNEENEDILEDIVLTLTLFEDREMIEERLKTYAHLFDDKVMKQLKRRRYTGWGRLSRKLINGIRDKQSGKTILDFLKSDGFANRNFMQLIHDDSLTFKEDIQKAQVSGQGDSLHEHIANLAGSPAIKKGILQTVKVVDELVKVMGRHKPENIVIEMARENQTTQKGQKNSRERMKRIEEGIKELGSQILKEHPVENTQLQNEKLYLYYLQNGRDMYVDQELDINRLSDYDVDHIVPQSFLKDDSIDNKVLTRSDKARGKSDNVPSEEVVKKMKNYWRQLLNAKLITQRKFDNLTKAERGGLSELDKAGFIKRQLVETRQITKHVAQILDSRMNTKYDENDKLIREVKVITLKSKLVSDFRKDFQFYKVREINNYHHAHDAYLNAVVGTALIKKYPKLESEFVYGDYKVYDVRKMIAKSEQEIGKATAKYFFYSNIMNFFKTEITLANGEIRKRPLIETNGETGEIVWDKGRDFATVRKVLSMPQVNIVKKTEVQTGGFSKESILPKRNSDKLIARKKDWDPKKYGGFDSPTVAYSVLVVAKVEKGKSKKLKSVKELLGITIMERSSFEKNPIDFLEAKGYKEVKKDLIIKLPKYSLFELENGRKRMLASAGELQKGNELALPSKYVNFLYLASHYEKLKGSPEDNEQKQLFVEQHKHYLDEIIEQISEFSKRVILADANLDKVLSAYNKHRDKPIREQAENIIHLFTLTNLGAPAAFKYFDTTIDRKRYTSTKEVLDATLIHQSITGLYETRIDLSQLGGDGGGSSPAPGGTLNIEDEYRLHETSKEPDVSLGSTWLSDFPQAWAETGGMGLAVRQAPLIIPLKATSTPVSIKQYPMSQEARLGIKPHIQRLLDQGILVPCQSPWNTPLLPVKKPGTNDYRPVQDLREVNKRVEDIHPTVPNPYNLLSGLPPSHQWYTVLDLKDAFFCLRLHPTSQPLFAFEWRDPEMGISGQLTWTRLPQGFKNSPTLFNEALHRDLADFRIQHPDLILLQYVDDLLLAATSELDCQQGTRALLQTLGNLGYRASAKKAQICQKQVKYLGYLLKEGQRWLTEARKETVMGQPTPKTPRQLREFLGKAGFCRLFIPGFAEMAAPLYPLTKPGTLFNWGPDQQKAYQEIKQALLTAPALGLPDLTKPFELFVDEKQGYAKGVLTQKLGPWRRPVAYLSKKLDPVAAGWPPCLRMVAAIAVLTKDAGKLTMGQPLVILAPHAVEALVKQPPDRWLSNARMTHYQALLLDTDRVQFGPVVALNPATLLPLPEEGLQHNCLDILAEAHGTRPDLTDQPLPDADHTWYTDGSSLLQEGQRKAGAAVTTETEVIWAKALPAGTSAQRAELIALTQALKMAEGKKLNVYTDSRYAFATAHIHGEIYRRRGWLTSEGKEIKNKDEILALLKALFLPKRLSIIHCPGHQKGHSAEARGNRMADQAARKAAITETPDTSTLLIENSSPSGGSKRTADGSEFEAGKRTADGSEFEKRTADGSEFESPKKKAKVE

SEQ ID NO: 6752 - protein, 2111 aa, synthetic construct; identical to SEQ ID NO: 6751

SEQ ID NO: 6753 - protein, 2082 aa, synthetic construct
MPAAKRVKLDGGDKKYSIGLDIGTNSVGWAVITDEYKVPSKKFKVLGNTDRHSIKKNLIGALLFDSGETAEATRLKRTARRRYTRRKNRICYLQEIFSNEMAKVDDSFFHRLEESFLVEEDKKHERHPIFGNIVDEVAYHEKYPTIYHLRKKLVDSTDKADLRLIYLALAHMIKFRGHFLIEGDLNPDNSDVDKLFIQLVQTYNQLFEENPINASGVDAKAILSARLSKSRRLENLIAQLPGEKKNGLFGNLIALSLGLTPNFKSNFDLAEDAKLQLSKDTYDDDLDNLLAQIGDQYADLFLAAKNLSDAILLSDILRVNTEITKAPLSASMIKRYDEHHQDLTLLKALVRQQLPEKYKEIFFDQSKNGYAGYIDGGASQEEFYKFIKPILEKMDGTEELLVKLNREDLLRKQRTFDNGSIPHQIHLGELHAILRRQEDFYPFLKDNREKIEKILTFRIPYYVGPLARGNSRFAWMTRKSEETITPWNFEEVVDKGASAQSFIERMTNFDKNLPNEKVLPKHSLLYEYFTVYNELTKVKYVTEGMRKPAFLSGEQKKAIVDLLFKTNRKVTVKQLKEDYFKKIECFDSVEISGVEDRFNASLGTYHDLLKIIKDKDFLDNEENEDILEDIVLTLTLFEDREMIEERLKTYAHLFDDKVMKQLKRRRYTGWGRLSRKLINGIRDKQSGKTILDFLKSDGFANRNFMQLIHDDSLTFKEDIQKAQVSGQGDSLHEHIANLAGSPAIKKGILQTVKVVDELVKVMGRHKPENIVIEMARENQTTQKGQKNSRERMKRIEEGIKELGSQILKEHPVENTQLQNEKLYLYYLQNGRDMYVDQELDINRLSDYDVDHIVPQSFLKDDSIDNKVLTRSDKARGKSDNVPSEEVVKKMKNYWRQLLNAKLITQRKFDNLTKAERGGLSELDKAGFIKRQLVETRQITKHVAQILDSRMNTKYDENDKLIREVKVITLKSKLVSDFRKDFQFYKVREINNYHHAHDAYLNAVVGTALIKKYPKLESEFVYGDYKVYDVRKMIAKSEQEIGKATAKYFFYSNIMNFFKTEITLANGEIRKRPLIETNGETGEIVWDKGRDFATVRKVLSMPQVNIVKKTEVQTGGFSKESILPKRNSDKLIARKKDWDPKKYGGFDSPTVAYSVLVVAKVEKGKSKKLKSVKELLGITIMERSSFEKNPIDFLEAKGYKEVKKDLIIKLPKYSLFELENGRKRMLASAGELQKGNELALPSKYVNFLYLASHYEKLKGSPEDNEQKQLFVEQHKHYLDEIIEQISEFSKRVILADANLDKVLSAYNKHRDKPIREQAENIIHLFTLTNLGAPAAFKYFDTTIDRKRYTSTKEVLDATLIHQSITGLYETRIDLSQLGGDGGGSSPAPGGIPWLMKKPLQLTTLVPLQEYEERLLKQTMLTGSYKEKLQSLFLKYDALWQHWENQVGHRRIKPHHIATGTVNPRPQKQYPINPKAKASIQTVINDLLKQGVLIQQNSIMNTPVYPVPKPDGKWRMVLDYREVNKTIPLIAAQNQHSAGILSSIFRGKYKTTLDLSNGFWAHSITPESYWLTAFTWLGQQYCWTRLPQGFLNSPALFNADVVDLLKEVPNVQVYVDDIYISHDDPREHLEQLEKVFSLLLNAGYVVSLKKSEIAQHEVEFLGFNITKEGRGLTETFKQKLLNITPPRDLKQLQSILGLLNFARNFIPNFSELVKPLYNIIATAPGKYITWTTDNSQQLQNIISMLNSAENLEERNPEVRLIMKVNTSPSAGYIRFYNEFAKRPIMYLNYVYTKAEVKFTNTEKLLTTIHKGLIKALDLGMGQEILVYSPIVSMTKIQKTPLPERKALPIRWITWMSYLEDPRIQFHYDKTLPELQQVPTVTDDIIAKIKHPSEFSMVFYTDGSAIKHPNVNKSHNAGMGIAQVQFKPEFTVINTWSIPLGDHTAQLAEVAAVEFACKKALKIDGPVLIVTDSFYVAESVNKELPYWQSNGFFNNKKKPLKHVSKWKSIADCIQLKPDIIIIHEKGHQPTASTFHTEGNNLADKLATQGSYVVNAGKRTADGSEFEKRTADGSEFESPKKKAKVE

SEQ ID NO: 6754 - protein, 2091 aa, synthetic construct
MPAAKRVKLDGGDKKYSIGLDIGTNSVGWAVITDEYKVPSKKFKVLGNTDRHSIKKNLIGALLFDSGETAEATRLKRTARRRYTRRKNRICYLQEIFSNEMAKVDDSFFHRLEESFLVEEDKKHERHPIFGNIVDEVAYHEKYPTIYHLRKKLVDSTDKADLRLIYLALAHMIKFRGHFLIEGDLNPDNSDVDKLFIQLVQTYNQLFEENPINASGVDAKAILSARLSKSRRLENLIAQLPGEKKNGLFGNLIALSLGLTPNFKSNFDLAEDAKLQLSKDTYDDDLDNLLAQIGDQYADLFLAAKNLSDAILLSDILRVNTEITKAPLSASMIKRYDEHHQDLTLLKALVRQQLPEKYKEIFFDQSKNGYAGYIDGGASQEEFYKFIKPILEKMDGTEELLVKLNREDLLRKQRTFDNGSIPHQIHLGELHAILRRQEDFYPFLKDNREKIEKILTFRIPYYVGPLARGNSRFAWMTRKSEETITPWNFEEVVDKGASAQSFIERMTNFDKNLPNEKVLPKHSLLYEYFTVYNELTKVKYVTEGMRKPAFLSGEQKKAIVDLLFKTNRKVTVKQLKEDYFKKIECFDSVEISGVEDRFNASLGTYHDLLKIIKDKDFLDNEENEDILEDIVLTLTLFEDREMIEERLKTYAHLFDDKVMKQLKRRRYTGWGRLSRKLINGIRDKQSGKTILDFLKSDGFANRNFMQLIHDDSLTFKEDIQKAQVSGQGDSLHEHIANLAGSPAIKKGILQTVKVVDELVKVMGRHKPENIVIEMARENQTTQKGQKNSRERMKRIEEGIKELGSQILKEHPVENTQLQNEKLYLYYLQNGRDMYVDQELDINRLSDYDVDHIVPQSFLKDDSIDNKVLTRSDKARGKSDNVPSEEVVKKMKNYWRQLLNAKLITQRKFDNLTKAERGGLSELDKAGFIKRQLVETRQITKHVAQILDSRMNTKYDENDKLIREVKVITLKSKLVSDFRKDFQFYKVREINNYHHAHDAYLNAVVGTALIKKYPKLESEFVYGDYKVYDVRKMIAKSEQEIGKATAKYFFYSNIMNFFKTEITLANGEIRKRPLIETNGETGEIVWDKGRDFATVRKVLSMPQVNIVKKTEVQTGGFSKESILPKRNSDKLIARKKDWDPKKYGGFDSPTVAYSVLVVAKVEKGKSKKLKSVKELLGITIMERSSFEKNPIDFLEAKGYKEVKKDLIIKLPKYSLFELENGRKRMLASAGELQKGNELALPSKYVNFLYLASHYEKLKGSPEDNEQKQLFVEQHKHYLDEIIEQISEFSKRVILADANLDKVLSAYNKHRDKPIREQAENIIHLFTLTNLGAPAAFKYFDTTIDRKRYTSTKEVLDATLIHQSITGLYETRIDLSQLGGDGGGSSPAPGGTLNIEDEYRLHETSKEPDVPLGSTWLSDFPQAWAETGGMGLAVRQAPLIIPLKATSTPVSIKQYPMSQEARLGIKPHIQRLLDQGILVPCQSPWNTPLLPVKKPGTNDYRPVQDLREVNKRVEDIHPTVPNPYNLLSGLPPSHQWYTVLDLKDAFFCLRLHPTSQPLFAFEWRDPEMGISGQLTWTRLPQGFKNSPTLFNEALHRDLADFRIQHPDLILLQYVDDLLLAATSEQDCQRGTRALLQTLGNLGYRASAKKAQICQKQVKYLGYLLKEGQRWLTEARKETVMGQPTPKTPRQLREFLGTAGFCRLWIPGFAEMAAPLYPLTKPGTLFNWGPDQQKAYQEIKQALLTAPALGLPDLTKPFELFVDEKQGYAKGVLTQKLGPWRRPVAYLSKKLDPVAAGWPPCLRMVAAIAVLTKDAGKLTMGQPLVILAPHAVEALVKQPPDRWLSNARMTHYQAMLLDTDRVQFGPVVALNPATLLPLPEKEAPHDCLEILAETHGTRPDLTDQPIPDADYTWYTDGSSFLQEGQRRAGAAVTTETEVIWARALPAGTSAQRAELIALTQALKMAEGKKLNVYTDSRYAFATAHVHGEIYRRRGWLTSEGREIKNKNEILALLKALFLPKRLSIIHCPGHQKGNSAEARGNRMADQAAREAAMKAVLETSTLLAGKRTADGSEFEKRTADGSEFESPKKKAKVE

SEQ ID NO: 6755 - protein, 2093 aa, synthetic construct
MPAAKRVKLDGGDKKYSIGLDIGTNSVGWAVITDEYKVPSKKFKVLGNTDRHSIKKNLIGALLFDSGETAEATRLKRTARRRYTRRKNRICYLQEIFSNEMAKVDDSFFHRLEESFLVEEDKKHERHPIFGNIVDEVAYHEKYPTIYHLRKKLVDSTDKADLRLIYLALAHMIKFRGHFLIEGDLNPDNSDVDKLFIQLVQTYNQLFEENPINASGVDAKAILSARLSKSRRLENLIAQLPGEKKNGLFGNLIALSLGLTPNFKSNFDLAEDAKLQLSKDTYDDDLDNLLAQIGDQYADLFLAAKNLSDAILLSDILRVNTEITKAPLSASMIKRYDEHHQDLTLLKALVRQQLPEKYKEIFFDQSKNGYAGYIDGGASQEEFYKFIKPILEKMDGTEELLVKLNREDLLRKQRTFDNGSIPHQIHLGELHAILRRQEDFYPFLKDNREKIEKILTFRIPYYVGPLARGNSRFAWMTRKSEETITPWNFEEVVDKGASAQSFIERMTNFDKNLPNEKVLPKHSLLYEYFTVYNELTKVKYVTEGMRKPAFLSGEQKKAIVDLLFKTNRKVTVKQLKEDYFKKIECFDSVEISGVEDRFNASLGTYHDLLKIIKDKDFLDNEENEDILEDIVLTLTLFEDREMIEERLKTYAHLFDDKVMKQLKRRRYTGWGRLSRKLINGIRDKQSGKTILDFLKSDGFANRNFMQLIHDDSLTFKEDIQKAQVSGQGDSLHEHIANLAGSPAIKKGILQTVKVVDELVKVMGRHKPENIVIEMARENQTTQKGQKNSRERMKRIEEGIKELGSQILKEHPVENTQLQNEKLYLYYLQNGRDMYVDQELDINRLSDYDVDHIVPQSFLKDDSIDNKVLTRSDKARGKSDNVPSEEVVKKMKNYWRQLLNAKLITQRKFDNLTKAERGGLSELDKAGFIKRQLVETRQITKHVAQILDSRMNTKYDENDKLIREVKVITLKSKLVSDFRKDFQFYKVREINNYHHAHDAYLNAVVGTALIKKYPKLESEFVYGDYKVYDVRKMIAKSEQEIGKATAKYFFYSNIMNFFKTEITLANGEIRKRPLIETNGETGEIVWDKGRDFATVRKVLSMPQVNIVKKTEVQTGGFSKESILPKRNSDKLIARKKDWDPKKYGGFDSPTVAYSVLVVAKVEKGKSKKLKSVKELLGITIMERSSFEKNPIDFLEAKGYKEVKKDLIIKLPKYSLFELENGRKRMLASAGELQKGNELALPSKYVNFLYLASHYEKLKGSPEDNEQKQLFVEQHKHYLDEIIEQISEFSKRVILADANLDKVLSAYNKHRDKPIREQAENIIHLFTLTNLGAPAAFKYFDTTIDRKRYTSTKEVLDATLIHQSITGLYETRIDLSQLGGDGGPAPGSSGGTAPLEEEYRLFLEAPIQNVTLLEQWKREIPKVWAEINPPGLASTQAPIHVQLLSTALPVRVRQYPITLEAKRSLRETIRKFRAAGILRPVHSPWNTPLLPVRKSGTSEYRMVQDLREVNKRVETIHPTVPNPYTLLSLLPPDRIWYSVLDLKDAFFCIPLAPESQLIFAFEWADAEEGESGQLTWTRLPQGFKNSPTLFNEALNRDLQGFRLDHPSVSLLQYVDDLLIAADTQAACLSATRDLLMTLAELGYRVSGKKAQLCQEEVTYLGFKIHKGSRSLSNSRTQAILQIPVPKTKRQVREFLGTIGYCRLWIPGFAELAQPLYAATRPGNDPLVWGEKEEEAFQSLKLALTQPPALALPSLDKPFQLFVEETSGAAKGVLTQALGPWKRPVAYLSKRLDPVAAGWPRCLRAIAAAALLTREASKLTFGQDIEITSSHNLESLLRSPPDKWLTNARITQYQVLLLDPPRVRFKQTAALNPATLLPETDDTLPIHHCLDTLDSLTSTRPDLTDQPLAQAEATLFTDGSSYIRDGKRYAGAAVVTLDSVIWAEPLPIGTSAQKAELIALTKALEWSKDKSVNIYTDSRYAFATLHVHGMIYRERGWLTAGGKAIKNAPEILALLTAVWLPKRVAVMHCKGHQKDDAPTSTGNRRADEVAREVAIRPLSTQATISAGKRTADGSEFEKRTADGSEFESPKKKAKVE

SEQ ID NO: 6756 - protein, 2093 aa, synthetic construct
MPAAKRVKLDGGDKKYSIGLDIGTNSVGWAVITDEYKVPSKKFKVLGNTDRHSIKKNLIGALLFDSGETAEATRLKRTARRRYTRRKNRICYLQEIFSNEMAKVDDSFFHRLEESFLVEEDKKHERHPIFGNIVDEVAYHEKYPTIYHLRKKLVDSTDKADLRLIYLALAHMIKFRGHFLIEGDLNPDNSDVDKLFIQLVQTYNQLFEENPINASGVDAKAILSARLSKSRRLENLIAQLPGEKKNGLFGNLIALSLGLTPNFKSNFDLAEDAKLQLSKDTYDDDLDNLLAQIGDQYADLFLAAKNLSDAILLSDILRVNTEITKAPLSASMIKRYDEHHQDLTLLKALVRQQLPEKYKEIFFDQSKNGYAGYIDGGASQEEFYKFIKPILEKMDGTEELLVKLNREDLLRKQRTFDNGSIPHQIHLGELHAILRRQEDFYPFLKDNREKIEKILTFRIPYYVGPLARGNSRFAWMTRKSEETITPWNFEEVVDKGASAQSFIERMTNFDKNLPNEKVLPKHSLLYEYFTVYNELTKVKYVTEGMRKPAFLSGEQKKAIVDLLFKTNRKVTVKQLKEDYFKKIECFDSVEISGVEDRFNASLGTYHDLLKIIKDKDFLDNEENEDILEDIVLTLTLFEDREMIEERLKTYAHLFDDKVMKQLKRRRYTGWGRLSRKLINGIRDKQSGKTILDFLKSDGFANRNFMQLIHDDSLTFKEDIQKAQVSGQGDSLHEHIANLAGSPAIKKGILQTVKVVDELVKVMGRHKPENIVIEMARENQTTQKGQKNSRERMKRIEEGIKELGSQILKEHPVENTQLQNEKLYLYYLQNGRDMYVDQELDINRLSDYDVDHIVPQSFLKDDSIDNKVLTRSDKARGKSDNVPSEEVVKKMKNYWRQLLNAKLITQRKFDNLTKAERGGLSELDKAGFIKRQLVETRQITKHVAQILDSRMNTKYDENDKLIREVKVITLKSKLVSDFRKDFQFYKVREINNYHHAHDAYLNAVVGTALIKKYPKLESEFVYGDYKVYDVRKMIAKSEQEIGKATAKYFFYSNIMNFFKTEITLANGEIRKRPLIETNGETGEIVWDKGRDFATVRKVLSMPQVNIVKKTEVQTGGFSKESILPKRNSDKLIARKKDWDPKKYGGFDSPTVAYSVLVVAKVEKGKSKKLKSVKELLGITIMERSSFEKNPIDFLEAKGYKEVKKDLIIKLPKYSLFELENGRKRMLASAGELQKGNELALPSKYVNFLYLASHYEKLKGSPEDNEQKQLFVEQHKHYLDEIIEQISEFSKRVILADANLDKVLSAYNKHRDKPIREQAENIIHLFTLTNLGAPAAFKYFDTTIDRKRYTSTKEVLDATLIHQSITGLYETRIDLSQLGGDGGPAPGSSGGTAPLEEEYRLFLEAPIQNVTLLEQWKREIPKVWAEINPPGLASTQAPIHVQLLSTALPVRVRQYPITLEAKRSLRETIRKFRAAGILRPVHSPWNTPLLPVRKSGTSEYRMVQDLREVNKRVETIHPTVPNPYTLLSLLPPDRIWYSVLDLKDAFFCIPLAPESQLIFAFEWADAEEGESGQLTWTRLPQGFKNSPTLFNEALNRDLQGFRLDHPSVSLLQYVDDLLIAADTQAACLSATRDLLMTLAELGYRVSGKKAQLCQEEVTYLGFKIHKGSRSLSNSRTQAILQIPVPKTKRQVREFLGKIGYCRLFIPGFAELAQPLYAATRPGNDPLVWGEKEEEAFQSLKLALTQPPALALPSLDKPFQLFVEETSGAAKGVLTQALGPWKRPVAYLSKRLDPVAAGWPRCLRAIAAAALLTREASKLTFGQDIEITSSHNLESLLRSPPDKWLTNARITQYQVLLLDPPRVRFKQTAALNPATLLPETDDTLPIHHCLDTLDSLTSTRPDLTDQPLAQAEATLFTDGSSYIRDGKRYAGAAVVTLDSVIWAEPLPIGTSAQKAELIALTKALEWSKDKSVNIYTDSRYAFATLHVHGMIYRERGWLTAGGKAIKNAPEILALLTAVWLPKRVAVMHCKGHQKDDAPTSTGNRRADEVAREVAIRPLSTQATISAGKRTADGSEFEKRTADGSEFESPKKKAKVE

SEQ ID NO: 6757 - protein, 2090 aa, synthetic construct
MPAAKRVKLDGGDKKYSIGLDIGTNSVGWAVITDEYKVPSKKFKVLGNTDRHSIKKNLIGALLFDSGETAEATRLKRTARRRYTRRKNRICYLQEIFSNEMAKVDDSFFHRLEESFLVEEDKKHERHPIFGNIVDEVAYHEKYPTIYHLRKKLVDSTDKADLRLIYLALAHMIKFRGHFLIEGDLNPDNSDVDKLFIQLVQTYNQLFEENPINASGVDAKAILSARLSKSRRLENLIAQLPGEKKNGLFGNLIALSLGLTPNFKSNFDLAEDAKLQLSKDTYDDDLDNLLAQIGDQYADLFLAAKNLSDAILLSDILRVNTEITKAPLSASMIKRYDEHHQDLTLLKALVRQQLPEKYKEIFFDQSKNGYAGYIDGGASQEEFYKFIKPILEKMDGTEELLVKLNREDLLRKQRTFDNGSIPHQIHLGELHAILRRQEDFYPFLKDNREKIEKILTFRIPYYVGPLARGNSRFAWMTRKSEETITPWNFEEVVDKGASAQSFIERMTNFDKNLPNEKVLPKHSLLYEYFTVYNELTKVKYVTEGMRKPAFLSGEQKKAIVDLLFKTNRKVTVKQLKEDYFKKIECFDSVEISGVEDRFNASLGTYHDLLKIIKDKDFLDNEENEDILEDIVLTLTLFEDREMIEERLKTYAHLFDDKVMKQLKRRRYTGWGRLSRKLINGIRDKQSGKTILDFLKSDGFANRNFMQLIHDDSLTFKEDIQKAQVSGQGDSLHEHIANLAGSPAIKKGILQTVKVVDELVKVMGRHKPENIVIEMARENQTTQKGQKNSRERMKRIEEGIKELGSQILKEHPVENTQLQNEKLYLYYLQNGRDMYVDQELDINRLSDYDVDHIVPQSFLKDDSIDNKVLTRSDKARGKSDNVPSEEVVKKMKNYWRQLLNAKLITQRKFDNLTKAERGGLSELDKAGFIKRQLVETRQITKHVAQILDSRMNTKYDENDKLIREVKVITLKSKLVSDFRKDFQFYKVREINNYHHAHDAYLNAVVGTALIKKYPKLESEFVYGDYKVYDVRKMIAKSEQEIGKATAKYFFYSNIMNFFKTEITLANGEIRKRPLIETNGETGEIVWDKGRDFATVRKVLSMPQVNIVKKTEVQTGGFSKESILPKRNSDKLIARKKDWDPKKYGGFDSPTVAYSVLVVAKVEKGKSKKLKSVKELLGITIMERSSFEKNPIDFLEAKGYKEVKKDLIIKLPKYSLFELENGRKRMLASAGELQKGNELALPSKYVNFLYLASHYEKLKGSPEDNEQKQLFVEQHKHYLDEIIEQISEFSKRVILADANLDKVLSAYNKHRDKPIREQAENIIHLFTLTNLGAPAAFKYFDTTIDRKRYTSTKEVLDATLIHQSITGLYETRIDLSQLGGDGGPAPGSSGGTLQLEEEYRLFEPESTQKQEMDIWLKNFPQAWAETGGMGTAHCQAPVLIQLKATATPISIRQYPMPHEAYQGIKPHIRRMLDQGILKPCQSPWNTPLLPVKKPGTEDYRPVQDLREVNKRVEDIHPTVPNPYNLLSTLPPSHPWYTVLDLKDAFFCLRLHSESQLLFAFEWRDPEIGLSGQLTWTRLPQGFKNSPTLFNEALHSDLADFRVRYPALVLLQYVDDLLLAAATRTECLEGTKALLETLGNKGYRASAKKAQICLQEVTYLGYSLKDGQRWLTKARKEAILSIPVPKNSRQVREFLGTAGYCRLWIPGFAELAAPLYPLTRPGTLFQWGTEQQLAFEDIKKALLSSPALGLPDITKPFELFIDENSGFAKGVLVQKLGPWKRPVAYLSKKLDTVASGWPPCLRMVAAIAILVKDAGKLTLGQPLTILTSHPVEALVRQPPNKWLSNARMTHYQAMLLDAERVHFGPTVSLNPATLLPLPSGGNHHDCLQILAETHGTRPDLTDQPLPDADLTWYTDGSSFIRNGEREAGAAVTTESEVIWAAPLPPGTSAQRAELIALTQALKMAEGKKLTVYTDSRYAFATTHVHGEIYRRRGWLTSEGKEIKNKNEILALLEALFLPKRLSIIHCPGHQKGDSPQAKGNRLADDTAKKAATETHSSLTVLPAGKRTADGSEFEKRTADGSEFESPKKKAKVE

SEQ ID NO: 6758 - protein, 2213 aa, synthetic construct
MPAAKRVKLDGGDKKYSIGLDIGTNSVGWAVITDEYKVPSKKFKVLGNTDRHSIKKNLIGALLFDSGETAEATRLKRTARRRYTRRKNRICYLQEIFSNEMAKVDDSFFHRLEESFLVEEDKKHERHPIFGNIVDEVAYHEKYPTIYHLRKKLVDSTDKADLRLIYLALAHMIKFRGHFLIEGDLNPDNSDVDKLFIQLVQTYNQLFEENPINASGVDAKAILSARLSKSRRLENLIAQLPGEKKNGLFGNLIALSLGLTPNFKSNFDLAEDAKLQLSKDTYDDDLDNLLAQIGDQYADLFLAAKNLSDAILLSDILRVNTEITKAPLSASMIKRYDEHHQDLTLLKALVRQQLPEKYKEIFFDQSKNGYAGYIDGGASQEEFYKFIKPILEKMDGTEELLVKLNREDLLRKQRTFDNGSIPHQIHLGELHAILRRQEDFYPFLKDNREKIEKILTFRIPYYVGPLARGNSRFAWMTRKSEETITPWNFEEVVDKGASAQSFIERMTNFDKNLPNEKVLPKHSLLYEYFTVYNELTKVKYVTEGMRKPAFLSGEQKKAIVDLLFKTNRKVTVKQLKEDYFKKIECFDSVEISGVEDRFNASLGTYHDLLKIIKDKDFLDNEENEDILEDIVLTLTLFEDREMIEERLKTYAHLFDDKVMKQLKRRRYTGWGRLSRKLINGIRDKQSGKTILDFLKSDGFANRNFMQLIHDDSLTFKEDIQKAQVSGQGDSLHEHIANLAGSPAIKKGILQTVKVVDELVKVMGRHKPENIVIEMARENQTTQKGQKNSRERMKRIEEGIKELGSQILKEHPVENTQLQNEKLYLYYLQNGRDMYVDQELDINRLSDYDVDHIVPQSFLKDDSIDNKVLTRSDKARGKSDNVPSEEVVKKMKNYWRQLLNAKLITQRKFDNLTKAERGGLSELDKAGFIKRQLVETRQITKHVAQILDSRMNTKYDENDKLIREVKVITLKSKLVSDFRKDFQFYKVREINNYHHAHDAYLNAVVGTALIKKYPKLESEFVYGDYKVYDVRKMIAKSEQEIGKATAKYFFYSNIMNFFKTEITLANGEIRKRPLIETNGETGEIVWDKGRDFATVRKVLSMPQVNIVKKTEVQTGGFSKESILPKRNSDKLIARKKDWDPKKYGGFDSPTVAYSVLVVAKVEKGKSKKLKSVKELLGITIMERSSFEKNPIDFLEAKGYKEVKKDLIIKLPKYSLFELENGRKRMLASAGELQKGNELALPSKYVNFLYLASHYEKLKGSPEDNEQKQLFVEQHKHYLDEIIEQISEFSKRVILADANLDKVLSAYNKHRDKPIREQAENIIHLFTLTNLGAPAAFKYFDTTIDRKRYTSTKEVLDATLIHQSITGLYETRIDLSQLGGDGGPAPGSSGGTLGDQGSRGSDPLPEPRVTLTVEGIPTEFLVNTGAEHSVLTKPMGKMGSKRTVVAGATGSKVYPWTTKRLLKIGQKQVTHSFLVIPECPAPLLGRDLLTKLKAQIQFSTEGPQVTWEDRPAMCLVLNLEEEYRLHEKPVPPSIDPSWLQLFPMVWAEKAGMGLANQVPPVVVELKSDASPVAVRQYPMSKEAREGIRPHIQRFLDLGILVPCQSPWNTPLLPVKKPGTNDYRPVQDLREVNKRVQDIHPTVPNPYNLLSSLPPSHTWYSVLDLKDAFFCLKLHPNSQPLFAFEWRDPEKGNTGQLTWTRLPQGFKNSPTLFNEALHRDLASFRALNPQVVMLQYVDDLLVAAPTYRDCKEGTRRLLQELSKLGYRVSAKKAQLCREEVTYLGYLLKGGKRWLTPARKATVMKIPTPTTPRQVREFLGTAGFCRLWIPGFASLAAPLYPLTRPKVPFTWTEAHQEAFGRIKEALLSAPALALPDLTKPFALYVDEKEGVARGVLTQTLGPWRRPVAYLSKKLDPVASGWPTCLKAIAAVALLLKDADKLTLGQNVLVIAPHNLESIVRQPPDRWMTNARMTHYQSLLLNERVSFAPPAILNPATLLPVESDDTPIHICSEILAEETGTRPDLRDQPLPGVPAWYTDGSSFIMDGRRQAGAAIVDNKRTVWASNLPEGTSAQKAELIALTQALRLAEGKSINIYTDSRYAFATAHVHGAIYKQRGWLTSAGKDIKNKEEILALLEAIHLPKRVAIIHCPGHQRGTDPVATGNRKADEAAKQAAQSTRILTETTKNAGKRTADGSEFEKRTADGSEFESPKKKAKVE

SEQ ID NO: 6759 - protein, 2091 aa, synthetic construct
MPAAKRVKLDGGDKKYSIGLDIGTNSVGWAVITDEYKVPSKKFKVLGNTDRHSIKKNLIGALLFDSGETAEATRLKRTARRRYTRRKNRICYLQEIFSNEMAKVDDSFFHRLEESFLVEEDKKHERHPIFGNIVDEVAYHEKYPTIYHLRKKLVDSTDKADLRLIYLALAHMIKFRGHFLIEGDLNPDNSDVDKLFIQLVQTYNQLFEENPINASGVDAKAILSARLSKSRRLENLIAQLPGEKKNGLFGNLIALSLGLTPNFKSNFDLAEDAKLQLSKDTYDDDLDNLLAQIGDQYADLFLAAKNLSDAILLSDILRVNTEITKAPLSASMIKRYDEHHQDLTLLKALVRQQLPEKYKEIFFDQSKNGYAGYIDGGASQEEFYKFIKPILEKMDGTEELLVKLNREDLLRKQRTFDNGSIPHQIHLGELHAILRRQEDFYPFLKDNREKIEKILTFRIPYYVGPLARGNSRFAWMTRKSEETITPWNFEEVVDKGASAQSFIERMTNFDKNLPNEKVLPKHSLLYEYFTVYNELTKVKYVTEGMRKPAFLSGEQKKAIVDLLFKTNRKVTVKQLKEDYFKKIECFDSVEISGVEDRFNASLGTYHDLLKIIKDKDFLDNEENEDILEDIVLTLTLFEDREMIEERLKTYAHLFDDKVMKQLKRRRYTGWGRLSRKLINGIRDKQSGKTILDFLKSDGFANRNFMQLIHDDSLTFKEDIQKAQVSGQGDSLHEHIANLAGSPAIKKGILQTVKVVDELVKVMGRHKPENIVIEMARENQTTQKGQKNSRERMKRIEEGIKELGSQILKEHPVENTQLQNEKLYLYYLQNGRDMYVDQELDINRLSDYDVDHIVPQSFLKDDSIDNKVLTRSDKARGKSDNVPSEEVVKKMKNYWRQLLNAKLITQRKFDNLTKAERGGLSELDKAGFIKRQLVETRQITKHVAQILDSRMNTKYDENDKLIREVKVITLKSKLVSDFRKDFQFYKVREINNYHHAHDAYLNAVVGTALIKKYPKLESEFVYGDYKVYDVRKMIAKSEQEIGKATAKYFFYSNIMNFFKTEITLANGEIRKRPLIETNGETGEIVWDKGRDFATVRKVLSMPQVNIVKKTEVQTGGFSKESILPKRNSDKLIARKKDWDPKKYGGFDSPTVAYSVLVVAKVEKGKSKKLKSVKELLGITIMERSSFEKNPIDFLEAKGYKEVKKDLIIKLPKYSLFELENGRKRMLASAGELQKGNELALPSKYVNFLYLASHYEKLKGSPEDNEQKQLFVEQHKHYLDEIIEQISEFSKRVILADANLDKVLSAYNKHRDKPIREQAENIIHLFTLTNLGAPAAFKYFDTTIDRKRYTSTKEVLDATLIHQSITGLYETRIDLSQLGGDGGPAPGSSGGTLNLEDEYRLYETSAEPEVSPGSTWLSDFPQAWAETGGMGLAVRQAPLIIPLKATSTPVSIKQYPMSQEAKLGIKPHIQRLLDQGILVPCQSPWNTPLLPVKKPGTNDYRPVQDLREVNKRVEDIHPTVPNPYNLLSGLPPSHRWYTVLDLKDAFFCLRLHPTSQPLFAFEWRDPGMGISGQLTWTRLPQGFKNSPTLFNEALHRDLADFRIQHPDLILLQYVDDILLAATSELDCQQGTRALLLTLGNLGYRASAKKAQLCQKQVKYLGYLLKEGQRWLTEARKETVMGQPTPKTPRQLREFLGTAGFCRLWIPGFAEMAAPLYPLTKPGTLFNWGPDQQKAYQEIKQALLTAPALGLPDLTKPFELFVDEKQGYAKGVLTQKLGPWRRPVAYLSKKLDPVAAGWPPCLRMVAAIAVLRKDAGKLTMGQPLVILAPHAVEALVKQPPDRWLSNARMTHYQAMLLDTDRVQFGPVVALNPATLLPLPEEGAPHDCLEILAETHGTRPDLTDQPIPDADHTWYTDGSSFLQEGQRKAGAAVTTETEVIWARALPAGTSAQRAELIALTQALKMAEGKRLNVYTDSRYAFATAHIHGEIYRRRGWLTSEGREIKNKSEILALLKALFLPKRLSIIHCLGHQKGDSAEARGNRLADQAAREAAIKTPPDTSTLLAGKRTADGSEFEKRTADGSEFESPKKKAKVE

SEQ ID NO: 6760 - protein, 2091 aa, synthetic construct; identical to SEQ ID NO: 4513

SEQ ID NO: 6761 - protein, 2091 aa, synthetic construct; identical to SEQ ID NO: 4513

SEQ ID NO: 6762 - protein, 2082 aa, synthetic construct
MPAAKRVKLDGGDKKYSIGLDIGTNSVGWAVITDEYKVPSKKFKVLGNTDRHSIKKNLIGALLFDSGETAEATRLKRTARRRYTRRKNRICYLQEIFSNEMAKVDDSFFHRLEESFLVEEDKKHERHPIFGNIVDEVAYHEKYPTIYHLRKKLVDSTDKADLRLIYLALAHMIKFRGHFLIEGDLNPDNSDVDKLFIQLVQTYNQLFEENPINASGVDAKAILSARLSKSRRLENLIAQLPGEKKNGLFGNLIALSLGLTPNFKSNFDLAEDAKLQLSKDTYDDDLDNLLAQIGDQYADLFLAAKNLSDAILLSDILRVNTEITKAPLSASMIKRYDEHHQDLTLLKALVRQQLPEKYKEIFFDQSKNGYAGYIDGGASQEEFYKFIKPILEKMDGTEELLVKLNREDLLRKQRTFDNGSIPHQIHLGELHAILRRQEDFYPFLKDNREKIEKILTFRIPYYVGPLARGNSRFAWMTRKSEETITPWNFEEVVDKGASAQSFIERMTNFDKNLPNEKVLPKHSLLYEYFTVYNELTKVKYVTEGMRKPAFLSGEQKKAIVDLLFKTNRKVTVKQLKEDYFKKIECFDSVEISGVEDRFNASLGTYHDLLKIIKDKDFLDNEENEDILEDIVLTLTLFEDREMIEERLKTYAHLFDDKVMKQLKRRRYTGWGRLSRKLINGIRDKQSGKTILDFLKSDGFANRNFMQLIHDDSLTFKEDIQKAQVSGQGDSLHEHIANLAGSPAIKKGILQTVKVVDELVKVMGRHKPENIVIEMARENQTTQKGQKNSRERMKRIEEGIKELGSQILKEHPVENTQLQNEKLYLYYLQNGRDMYVDQELDINRLSDYDVDHIVPQSFLKDDSIDNKVLTRSDKARGKSDNVPSEEVVKKMKNYWRQLLNAKLITQRKFDNLTKAERGGLSELDKAGFIKRQLVETRQITKHVAQILDSRMNTKYDENDKLIREVKVITLKSKLVSDFRKDFQFYKVREINNYHHAHDAYLNAVVGTALIKKYPKLESEFVYGDYKVYDVRKMIAKSEQEIGKATAKYFFYSNIMNFFKTEITLANGEIRKRPLIETNGETGEIVWDKGRDFATVRKVLSMPQVNIVKKTEVQTGGFSKESILPKRNSDKLIARKKDWDPKKYGGFDSPTVAYSVLVVAKVEKGKSKKLKSVKELLGITIMERSSFEKNPIDFLEAKGYKEVKKDLIIKLPKYSLFELENGRKRMLASAGELQKGNELALPSKYVNFLYLASHYEKLKGSPEDNEQKQLFVEQHKHYLDEIIEQISEFSKRVILADANLDKVLSAYNKHRDKPIREQAENIIHLFTLTNLGAPAAFKYFDTTIDRKRYTSTKEVLDATLIHQSITGLYETRIDLSQLGGDGGPAPGSSGGIPWLMKKPLQLTTLVPLQEYEERLLKQTMLTGSYKEKLQSLFLKYDALWQHWENQVGHRRIKPHHIATGTVNPRPQKQYPINPKAKASIQTVINDLLKQGVLIQQNSIMNTPVYPVPKPDGKWRMVLDYREVNKTIPLIAAQNQHSAGILSSIFRGKYKTTLDLSNGFWAHSITPESYWLTAFTWLGQQYCWTRLPQGFLNSPALFNADVVDLLKEVPNVQVYVDDIYISHDDPREHLEQLEKVFSLLLNAGYVVSLKKSEIAQHEVEFLGFNITKEGRGLTETFKQKLLNITPPRDLKQLQSILGKLNFARNFIPNFSELVKPLYNIIATAPGKYITWTTDNSQQLQNIISMLNSAENLEERNPEVRLIMKVNTSPSAGYIRFYNEFAKRPIMYLNYVYTKAEVKFTNTEKLLTTIHKGLIKALDLGMGQEILVYSPIVSMTKIQKTPLPERKALPIRWITWMSYLEDPRIQFHYDKTLPELQQVPTVTDDIIAKIKHPSEFSMVFYTDGSAIKHPNVNKSHNAGMGIAQVQFKPEFTVINTWSIPLGDHTAQLAEVAAVEFACKKALKIDGPVLIVTDSFYVAESVNKELPYWQSNGFFNNKKKPLKHVSKWKSIADCIQLKPDIIIIHEKGHQPTASTFHTEGNNLADKLATQGSYVVNAGKRTADGSEFEKRTADGSEFESPKKKAKVE

SEQ ID NO: 6763 - protein, 2012 aa, synthetic construct
MPAAKRVKLDGGDKKYSIGLDIGTNSVGWAVITDEYKVPSKKFKVLGNTDRHSIKKNLIGALLFDSGETAEATRLKRTARRRYTRRKNRICYLQEIFSNEMAKVDDSFFHRLEESFLVEEDKKHERHPIFGNIVDEVAYHEKYPTIYHLRKKLVDSTDKADLRLIYLALAHMIKFRGHFLIEGDLNPDNSDVDKLFIQLVQTYNQLFEENPINASGVDAKAILSARLSKSRRLENLIAQLPGEKKNGLFGNLIALSLGLTPNFKSNFDLAEDAKLQLSKDTYDDDLDNLLAQIGDQYADLFLAAKNLSDAILLSDILRVNTEITKAPLSASMIKRYDEHHQDLTLLKALVRQQLPEKYKEIFFDQSKNGYAGYIDGGASQEEFYKFIKPILEKMDGTEELLVKLNREDLLRKQRTFDNGSIPHQIHLGELHAILRRQEDFYPFLKDNREKIEKILTFRIPYYVGPLARGNSRFAWMTRKSEETITPWNFEEVVDKGASAQSFIERMTNFDKNLPNEKVLPKHSLLYEYFTVYNELTKVKYVTEGMRKPAFLSGEQKKAIVDLLFKTNRKVTVKQLKEDYFKKIECFDSVEISGVEDRFNASLGTYHDLLKIIKDKDFLDNEENEDILEDIVLTLTLFEDREMIEERLKTYAHLFDDKVMKQLKRRRYTGWGRLSRKLINGIRDKQSGKTILDFLKSDGFANRNFMQLIHDDSLTFKEDIQKAQVSGQGDSLHEHIANLAGSPAIKKGILQTVKVVDELVKVMGRHKPENIVIEMARENQTTQKGQKNSRERMKRIEEGIKELGSQILKEHPVENTQLQNEKLYLYYLQNGRDMYVDQELDINRLSDYDVDHIVPQSFLKDDSIDNKVLTRSDKARGKSDNVPSEEVVKKMKNYWRQLLNAKLITQRKFDNLTKAERGGLSELDKAGFIKRQLVETRQITKHVAQILDSRMNTKYDENDKLIREVKVITLKSKLVSDFRKDFQFYKVREINNYHHAHDAYLNAVVGTALIKKYPKLESEFVYGDYKVYDVRKMIAKSEQEIGKATAKYFFYSNIMNFFKTEITLANGEIRKRPLIETNGETGEIVWDKGRDFATVRKVLSMPQVNIVKKTEVQTGGFSKESILPKRNSDKLIARKKDWDPKKYGGFDSPTVAYSVLVVAKVEKGKSKKLKSVKELLGITIMERSSFEKNPIDFLEAKGYKEVKKDLIIKLPKYSLFELENGRKRMLASAGELQKGNELALPSKYVNFLYLASHYEKLKGSPEDNEQKQLFVEQHKHYLDEIIEQISEFSKRVILADANLDKVLSAYNKHRDKPIREQAENIIHLFTLTNLGAPAAFKYFDTTIDRKRYTSTKEVLDATLIHQSITGLYETRIDLSQLGGDGGPAPGSSGGPRSRAIDIPVPHADKISWKITDPVWVDQWPLTYEKTLAAIALVQEQLAAGHIEPTNSPWNTPIFIIKKKSGSWRLLQDLRAVNKVMVPMGALQPGLPSPVAIPLNYHKIVIDLKDCFFTIPLHPEDRPYFAFSVPQINFQSPMPRYQWKVLPQGMANSPTLCQKFVAAAIAPVRSQWPEAYILHYMDDILLACDSAEAAKACYAHIISCLTSYGLKIAPDKVQVSEPFSYLGFELHHQQVFTPRVCLKTDHLKTLNDFQKLLGDIQWLRPYLKLPTSALVPLNNILKPDPNPLSVRALTPEAKQSLALINKAIQNQSVQQISYNLPLVLLLLPTPHTPTAVFWQPNGTDPTKNGSPLLWLHLPASPSKVLLTYPSLLAMLIIKGRYTGRQLFGRDPHSIIIPYTQDQLTWLLQTSDEWAIALSSFTGDIDNHYPSDPVIQFAKLHQFIFPKITKCAPIPQATLVFTDGSSNGIAAYVIDNQPISIKSPYLSAQLVELYAILQVFTVLAHQPFNLYTDSAYIAQSVPLLETVPFIKSSTNATPLFSKLQQLILNRQHPFFIGHLRAHLNLPGPLAEGNALADAATQIFPIISDAGKRTADGSEFEKRTADGSEFESPKKKAKVE

SEQ ID NO: 6764 - protein, 2091 aa, synthetic construct
MPAAKRVKLDGGDKKYSIGLDIGTNSVGWAVITDEYKVPSKKFKVLGNTDRHSIKKNLIGALLFDSGETAEATRLKRTARRRYTRRKNRICYLQEIFSNEMAKVDDSFFHRLEESFLVEEDKKHERHPIFGNIVDEVAYHEKYPTIYHLRKKLVDSTDKADLRLIYLALAHMIKFRGHFLIEGDLNPDNSDVDKLFIQLVQTYNQLFEENPINASGVDAKAILSARLSKSRRLENLIAQLPGEKKNGLFGNLIALSLGLTPNFKSNFDLAEDAKLQLSKDTYDDDLDNLLAQIGDQYADLFLAAKNLSDAILLSDILRVNTEITKAPLSASMIKRYDEHHQDLTLLKALVRQQLPEKYKEIFFDQSKNGYAGYIDGGASQEEFYKFIKPILEKMDGTEELLVKLNREDLLRKQRTFDNGSIPHQIHLGELHAILRRQEDFYPFLKDNREKIEKILTFRIPYYVGPLARGNSRFAWMTRKSEETITPWNFEEVVDKGASAQSFIERMTNFDKNLPNEKVLPKHSLLYEYFTVYNELTKVKYVTEGMRKPAFLSGEQKKAIVDLLFKTNRKVTVKQLKEDYFKKIECFDSVEISGVEDRFNASLGTYHDLLKIIKDKDFLDNEENEDILEDIVLTLTLFEDREMIEERLKTYAHLFDDKVMKQLKRRRYTGWGRLSRKLINGIRDKQSGKTILDFLKSDGFANRNFMQLIHDDSLTFKEDIQKAQVSGQGDSLHEHIANLAGSPAIKKGILQTVKVVDELVKVMGRHKPENIVIEMARENQTTQKGQKNSRERMKRIEEGIKELGSQILKEHPVENTQLQNEKLYLYYLQNGRDMYVDQELDINRLSDYDVDHIVPQSFLKDDSIDNKVLTRSDKARGKSDNVPSEEVVKKMKNYWRQLLNAKLITQRKFDNLTKAERGGLSELDKAGFIKRQLVETRQITKHVAQILDSRMNTKYDENDKLIREVKVITLKSKLVSDFRKDFQFYKVREINNYHHAHDAYLNAVVGTALIKKYPKLESEFVYGDYKVYDVRKMIAKSEQEIGKATAKYFFYSNIMNFFKTEITLANGEIRKRPLIETNGETGEIVWDKGRDFATVRKVLSMPQVNIVKKTEVQTGGFSKESILPKRNSDKLIARKKDWDPKKYGGFDSPTVAYSVLVVAKVEKGKSKKLKSVKELLGITIMERSSFEKNPIDFLEAKGYKEVKKDLIIKLPKYSLFELENGRKRMLASAGELQKGNELALPSKYVNFLYLASHYEKLKGSPEDNEQKQLFVEQHKHYLDEIIEQISEFSKRVILADANLDKVLSAYNKHRDKPIREQAENIIHLFTLTNLGAPAAFKYFDTTIDRKRYTSTKEVLDATLIHQSITGLYETRIDLSQLGGDGGPAPGSSGGTLNIEDEYRLHETSKEPDVPLGSTWLSDFPQAWAETGGMGLAVRQAPLIIPLKATSTPVSIKQYPMSQEARLGIKPHIQRLLDQGILVPCQSPWNTPLLPVKKPGTNDYRPVQDLREVNKRVEDIHPTVPNPYNLLSGLPPSHQWYTVLDLKDAFFCLRLHPTSQPLFAFEWRDPEMGISGQLTWTRLPQGFKNSPTLFNEALHRDLADFRIQHPDLILLQYVDDLLLAATSEQDCQRGTRALLQTLGNLGYRASAKKAQICQKQVKYLGYLLKEGQRWLTEARKETVMGQPTPKTPRQLREFLGKAGFCRLFIPGFAEMAAPLYPLTKPGTLFNWGPDQQKAYQEIKQALLTAPALGLPDLTKPFELFVDEKQGYAKGVLTQKLGPWRRPVAYLSKKLDPVAAGWPPCLRMVAAIAVLTKDAGKLTMGQPLVILAPHAVEALVKQPPDRWLSNARMTHYQAMLLDTDRVQFGPVVALNPATLLPLPEKEAPHDCLEILAETHGTRPDLTDQPIPDADYTWYTDGSSFLQEGQRRAGAAVTTETEVIWARALPAGTSAQRAELIALTQALKMAEGKKLNVYTDSRYAFATAHVHGEIYRRRGWLTSEGREIKNKNEILALLKALFLPKRLSIIHCPGHQKGNSAEARGNRMADQAAREAAMKAVLETSTLLAGKRTADGSEFEKRTADGSEFESPKKKAKVE

SEQ ID NO: 6765 - protein, 2095 aa, synthetic construct
MPAAKRVKLDGGDKKYSIGLDIGTNSVGWAVITDEYKVPSKKFKVLGNTDRHSIKKNLIGALLFDSGETAEATRLKRTARRRYTRRKNRICYLQEIFSNEMAKVDDSFFHRLEESFLVEEDKKHERHPIFGNIVDEVAYHEKYPTIYHLRKKLVDSTDKADLRLIYLALAHMIKFRGHFLIEGDLNPDNSDVDKLFIQLVQTYNQLFEENPINASGVDAKAILSARLSKSRRLENLIAQLPGEKKNGLFGNLIALSLGLTPNFKSNFDLAEDAKLQLSKDTYDDDLDNLLAQIGDQYADLFLAAKNLSDAILLSDILRVNTEITKAPLSASMIKRYDEHHQDLTLLKALVRQQLPEKYKEIFFDQSKNGYAGYIDGGASQEEFYKFIKPILEKMDGTEELLVKLNREDLLRKQRTFDNGSIPHQIHLGELHAILRRQEDFYPFLKDNREKIEKILTFRIPYYVGPLARGNSRFAWMTRKSEETITPWNFEEVVDKGASAQSFIERMTNFDKNLPNEKVLPKHSLLYEYFTVYNELTKVKYVTEGMRKPAFLSGEQKKAIVDLLFKTNRKVTVKQLKEDYFKKIECFDSVEISGVEDRFNASLGTYHDLLKIIKDKDFLDNEENEDILEDIVLTLTLFEDREMIEERLKTYAHLFDDKVMKQLKRRRYTGWGRLSRKLINGIRDKQSGKTILDFLKSDGFANRNFMQLIHDDSLTFKEDIQKAQVSGQGDSLHEHIANLAGSPAIKKGILQTVKVVDELVKVMGRHKPENIVIEMARENQTTQKGQKNSRERMKRIEEGIKELGSQILKEHPVENTQLQNEKLYLYYLQNGRDMYVDQELDINRLSDYDVDHIVPQSFLKDDSIDNKVLTRSDKARGKSDNVPSEEVVKKMKNYWRQLLNAKLITQRKFDNLTKAERGGLSELDKAGFIKRQLVETRQITKHVAQILDSRMNTKYDENDKLIREVKVITLKSKLVSDFRKDFQFYKVREINNYHHAHDAYLNAVVGTALIKKYPKLESEFVYGDYKVYDVRKMIAKSEQEIGKATAKYFFYSNIMNFFKTEITLANGEIRKRPLIETNGETGEIVWDKGRDFATVRKVLSMPQVNIVKKTEVQTGGFSKESILPKRNSDKLIARKKDWDPKKYGGFDSPTVAYSVLVVAKVEKGKSKKLKSVKELLGITIMERSSFEKNPIDFLEAKGYKEVKKDLIIKLPKYSLFELENGRKRMLASAGELQKGNELALPSKYVNFLYLASHYEKLKGSPEDNEQKQLFVEQHKHYLDEIIEQISEFSKRVILADANLDKVLSAYNKHRDKPIREQAENIIHLFTLTNLGAPAAFKYFDTTIDRKRYTSTKEVLDATLIHQSITGLYETRIDLSQLGGDGGEAAAKPAPGGTAPLEEEYRLFLEAPIQNVTLLEQWKREIPKVWAEINPPGLASTQAPIHVQLLSTALPVRVRQYPITLEAKRSLRETIRKFRAAGILRPVHSPWNTPLLPVRKSGTSEYRMVQDLREVNKRVETIHPTVPNPYTLLSLLPPDRIWYSVLDLKDAFFCIPLAPESQLIFAFEWADAEEGESGQLTWTRLPQGFKNSPTLFNEALNRDLQGFRLDHPSVSLLQYVDDLLIAADTQAACLSATRDLLMTLAELGYRVSGKKAQLCQEEVTYLGFKIHKGSRSLSNSRTQAILQIPVPKTKRQVREFLGKIGYCRLFIPGFAELAQPLYAATRPGNDPLVWGEKEEEAFQSLKLALTQPPALALPSLDKPFQLFVEETSGAAKGVLTQALGPWKRPVAYLSKRLDPVAAGWPRCLRAIAAAALLTREASKLTFGQDIEITSSHNLESLLRSPPDKWLTNARITQYQVLLLDPPRVRFKQTAALNPATLLPETDDTLPIHHCLDTLDSLTSTRPDLTDQPLAQAEATLFTDGSSYIRDGKRYAGAAVVTLDSVIWAEPLPIGTSAQKAELIALTKALEWSKDKSVNIYTDSRYAFATLHVHGMIYRERGWLTAGGKAIKNAPEILALLTAVWLPKRVAVMHCKGHQKDDAPTSTGNRRADEVAREVAIRPLSTQATISAGKRTADGSEFEKRTADGSEFESPKKKAKVE

SEQ ID NO: 6766 - protein, 2084 aa, synthetic construct
MPAAKRVKLDGGDKKYSIGLDIGTNSVGWAVITDEYKVPSKKFKVLGNTDRHSIKKNLIGALLFDSGETAEATRLKRTARRRYTRRKNRICYLQEIFSNEMAKVDDSFFHRLEESFLVEEDKKHERHPIFGNIVDEVAYHEKYPTIYHLRKKLVDSTDKADLRLIYLALAHMIKFRGHFLIEGDLNPDNSDVDKLFIQLVQTYNQLFEENPINASGVDAKAILSARLSKSRRLENLIAQLPGEKKNGLFGNLIALSLGLTPNFKSNFDLAEDAKLQLSKDTYDDDLDNLLAQIGDQYADLFLAAKNLSDAILLSDILRVNTEITKAPLSASMIKRYDEHHQDLTLLKALVRQQLPEKYKEIFFDQSKNGYAGYIDGGASQEEFYKFIKPILEKMDGTEELLVKLNREDLLRKQRTFDNGSIPHQIHLGELHAILRRQEDFYPFLKDNREKIEKILTFRIPYYVGPLARGNSRFAWMTRKSEETITPWNFEEVVDKGASAQSFIERMTNFDKNLPNEKVLPKHSLLYEYFTVYNELTKVKYVTEGMRKPAFLSGEQKKAIVDLLFKTNRKVTVKQLKEDYFKKIECFDSVEISGVEDRFNASLGTYHDLLKIIKDKDFLDNEENEDILEDIVLTLTLFEDREMIEERLKTYAHLFDDKVMKQLKRRRYTGWGRLSRKLINGIRDKQSGKTILDFLKSDGFANRNFMQLIHDDSLTFKEDIQKAQVSGQGDSLHEHIANLAGSPAIKKGILQTVKVVDELVKVMGRHKPENIVIEMARENQTTQKGQKNSRERMKRIEEGIKELGSQILKEHPVENTQLQNEKLYLYYLQNGRDMYVDQELDINRLSDYDVDHIVPQSFLKDDSIDNKVLTRSDKARGKSDNVPSEEVVKKMKNYWRQLLNAKLITQRKFDNLTKAERGGLSELDKAGFIKRQLVETRQITKHVAQILDSRMNTKYDENDKLIREVKVITLKSKLVSDFRKDFQFYKVREINNYHHAHDAYLNAVVGTALIKKYPKLESEFVYGDYKVYDVRKMIAKSEQEIGKATAKYFFYSNIMNFFKTEITLANGEIRKRPLIETNGETGEIVWDKGRDFATVRKVLSMPQVNIVKKTEVQTGGFSKESILPKRNSDKLIARKKDWDPKKYGGFDSPTVAYSVLVVAKVEKGKSKKLKSVKELLGITIMERSSFEKNPIDFLEAKGYKEVKKDLIIKLPKYSLFELENGRKRMLASAGELQKGNELALPSKYVNFLYLASHYEKLKGSPEDNEQKQLFVEQHKHYLDEIIEQISEFSKRVILADANLDKVLSAYNKHRDKPIREQAENIIHLFTLTNLGAPAAFKYFDTTIDRKRYTSTKEVLDATLIHQSITGLYETRIDLSQLGGDGGEAAAKPAPGGVPWILKKPLELTIKLDLEEQQGTLLNNSILSKKGKEELKQLFEKYSALWQSWENQVGHRRIRPHKIATGTVKPTPQKQYHINPKAKPDIQIVINDLLKQGVLIQKESTMNTPVYPVPKPNGRWRMVLDYRAVNKVTPLIAVQNQHSYGILGSLFKGRYKTTIDLSNGFWAHPIVPEDYWITAFTWQGKQYCWTVLPQGFLNSPGLFNGDVVDLLQGIPNVEVYVDDVYISHDSEKEHLEYLDILFNRLKEAGYIISLKKSNIANSIVDFLGFQITNEGRGLTDTFKEKLENITAPTTLKQLQSILGLLNFARNFIPDFTELIAPLYALIPKSPKNYVPWQIEHSTTLETLITKLNGAEYLQGRKGDKTLIMKVNASYTTGYIRYYNEGEKKPISYVSIVFSKTELKFTELEKLLTTVHKGLLKALDLSMGQNIHVYSPIVSMQNIQKTPQTAKKALASRWLSWLSYLEDPRIRFFYDPQMPALKDLPAVDTGKDNKKHPSNFQHIFYTDGSAITSPTKEGHLNAGMGIVYFINKDGNLQKQQEWSISLGNHTAQFAEIAAFEFALKKCLPLGGNILVVTDSNYVAKAYNEELDVWASNGFVNNRKKPLKHISKWKSVADLKRLRPDVVVTHEPGHQKLDSSPHAYGNNLADQLATQASFKVHAGKRTADGSEFEKRTADGSEFESPKKKAKVE

SEQ ID NO: 6767 - protein, 2084 aa, synthetic construct
MPAAKRVKLDGGDKKYSIGLDIGTNSVGWAVITDEYKVPSKKFKVLGNTDRHSIKKNLIGALLFDSGETAEATRLKRTARRRYTRRKNRICYLQEIFSNEMAKVDDSFFHRLEESFLVEEDKKHERHPIFGNIVDEVAYHEKYPTIYHLRKKLVDSTDKADLRLIYLALAHMIKFRGHFLIEGDLNPDNSDVDKLFIQLVQTYNQLFEENPINASGVDAKAILSARLSKSRRLENLIAQLPGEKKNGLFGNLIALSLGLTPNFKSNFDLAEDAKLQLSKDTYDDDLDNLLAQIGDQYADLFLAAKNLSDAILLSDILRVNTEITKAPLSASMIKRYDEHHQDLTLLKALVRQQLPEKYKEIFFDQSKNGYAGYIDGGASQEEFYKFIKPILEKMDGTEELLVKLNREDLLRKQRTFDNGSIPHQIHLGELHAILRRQEDFYPFLKDNREKIEKILTFRIPYYVGPLARGNSRFAWMTRKSEETITPWNFEEVVDKGASAQSFIERMTNFDKNLPNEKVLPKHSLLYEYFTVYNELTKVKYVTEGMRKPAFLSGEQKKAIVDLLFKTNRKVTVKQLKEDYFKKIECFDSVEISGVEDRFNASLGTYHDLLKIIKDKDFLDNEENEDILEDIVLTLTLFEDREMIEERLKTYAHLFDDKVMKQLKRRRYTGWGRLSRKLINGIRDKQSGKTILDFLKSDGFANRNFMQLIHDDSLTFKEDIQKAQVSGQGDSLHEHIANLAGSPAIKKGILQTVKVVDELVKVMGRHKPENIVIEMARENQTTQKGQKNSRERMKRIEEGIKELGSQILKEHPVENTQLQNEKLYLYYLQNGRDMYVDQELDINRLSDYDVDHIVPQSFLKDDSIDNKVLTRSDKARGKSDNVPSEEVVKKMKNYWRQLLNAKLITQRKFDNLTKAERGGLSELDKAGFIKRQLVETRQITKHVAQILDSRMNTKYDENDKLIREVKVITLKSKLVSDFRKDFQFYKVREINNYHHAHDAYLNAVVGTALIKKYPKLESEFVYGDYKVYDVRKMIAKSEQEIGKATAKYFFYSNIMNFFKTEITLANGEIRKRPLIETNGETGEIVWDKGRDFATVRKVLSMPQVNIVKKTEVQTGGFSKESILPKRNSDKLIARKKDWDPKKYGGFDSPTVAYSVLVVAKVEKGKSKKLKSVKELLGITIMERSSFEKNPIDFLEAKGYKEVKKDLIIKLPKYSLFELENGRKRMLASAGELQKGNELALPSKYVNFLYLASHYEKLKGSPEDNEQKQLFVEQHKHYLDEIIEQISEFSKRVILADANLDKVLSAYNKHRDKPIREQAENIIHLFTLTNLGAPAAFKYFDTTIDRKRYTSTKEVLDATLIHQSITGLYETRIDLSQLGGDGGEAAAKPAPGGVPWLTQQPLQLTILVPLQEYQEKILSKTALPEDQKQQLKTLFVKYDNLWQHWENQVGHRKIRPHNIATGDYPPRPQKQYPINPKAKPSIQIVIDDLLKQGVLTPQNSTMNTPVYPVPKPDGRWRMVLDYREVNKTIPLTAAQNQHSAGILATIVRQKYKTTLDLANGFWAHPITPESYWLTAFTWQGKQYCWTRLPQGFLNSPALFNADVVDLLKEIPNVQVYVDDIYLSHDDPKEHVQQLEKVFQILLQAGYVVSLKKSEIGQKTVEFLGFNITKEGRGLTDTFKTKLLNITPPKDLKQLQSILGKLNFARNFIPNFAELVQPLYNLIAPAKGKYIEWSEENTKQLNMVIEALNTASNLEERLPEQRLVIKVNTSPSAGYVRYYNETGKKPIMYLNYVFSKAELKFSMLEKLLTTMHKALIKAMDLAMGQEILVYSPIVSMTKIQKTPLPERKALPIRWITWMTYLEDPRIQFHYDKTLPELKHIPDVYTSSQSPVKHPSQYEGVFYTDGSAIKSPDPTKSNNAGMGIVHATYKPEYQVLNQWSIPLGNHTAQMAEIAAVEFACKKALKIPGPVLVITDSFYVAESANKELPYWKSNGFVNNKKKPLKHISKWKSIAECLSMKPDITIQHEKGISLQIPVFILKGNALADKLATQGSYVVNAGKRTADGSEFEKRTADGSEFESPKKKAKVE

SEQ ID NO: 6768 - protein, 2173 aa, synthetic construct
MPAAKRVKLDGGDKKYSIGLDIGTNSVGWAVITDEYKVPSKKFKVLGNTDRHSIKKNLIGALLFDSGETAEATRLKRTARRRYTRRKNRICYLQEIFSNEMAKVDDSFFHRLEESFLVEEDKKHERHPIFGNIVDEVAYHEKYPTIYHLRKKLVDSTDKADLRLIYLALAHMIKFRGHFLIEGDLNPDNSDVDKLFIQLVQTYNQLFEENPINASGVDAKAILSARLSKSRRLENLIAQLPGEKKNGLFGNLIALSLGLTPNFKSNFDLAEDAKLQLSKDTYDDDLDNLLAQIGDQYADLFLAAKNLSDAILLSDILRVNTEITKAPLSASMIKRYDEHHQDLTLLKALVRQQLPEKYKEIFFDQSKNGYAGYIDGGASQEEFYKFIKPILEKMDGTEELLVKLNREDLLRKQRTFDNGSIPHQIHLGELHAILRRQEDFYPFLKDNREKIEKILTFRIPYYVGPLARGNSRFAWMTRKSEETITPWNFEEVVDKGASAQSFIERMTNFDKNLPNEKVLPKHSLLYEYFTVYNELTKVKYVTEGMRKPAFLSGEQKKAIVDLLFKTNRKVTVKQLKEDYFKKIECFDSVEISGVEDRFNASLGTYHDLLKIIKDKDFLDNEENEDILEDIVLTLTLFEDREMIEERLKTYAHLFDDKVMKQLKRRRYTGWGRLSRKLINGIRDKQSGKTILDFLKSDGFANRNFMQLIHDDSLTFKEDIQKAQVSGQGDSLHEHIANLAGSPAIKKGILQTVKVVDELVKVMGRHKPENIVIEMARENQTTQKGQKNSRERMKRIEEGIKELGSQILKEHPVENTQLQNEKLYLYYLQNGRDMYVDQELDINRLSDYDVDHIVPQSFLKDDSIDNKVLTRSDKARGKSDNVPSEEVVKKMKNYWRQLLNAKLITQRKFDNLTKAERGGLSELDKAGFIKRQLVETRQITKHVAQILDSRMNTKYDENDKLIREVKVITLKSKLVSDFRKDFQFYKVREINNYHHAHDAYLNAVVGTALIKKYPKLESEFVYGDYKVYDVRKMIAKSEQEIGKATAKYFFYSNIMNFFKTEITLANGEIRKRPLIETNGETGEIVWDKGRDFATVRKVLSMPQVNIVKKTEVQTGGFSKESILPKRNSDKLIARKKDWDPKKYGGFDSPTVAYSVLVVAKVEKGKSKKLKSVKELLGITIMERSSFEKNPIDFLEAKGYKEVKKDLIIKLPKYSLFELENGRKRMLASAGELQKGNELALPSKYVNFLYLASHYEKLKGSPEDNEQKQLFVEQHKHYLDEIIEQISEFSKRVILADANLDKVLSAYNKHRDKPIREQAENIIHLFTLTNLGAPAAFKYFDTTIDRKRYTSTKEVLDATLIHQSITGLYETRIDLSQLGGDGGEAAAKPAPGGMNPLQLLQPLPAEIKGTKLLAHWNSGATITCIPESFLEDEQPIKKTLIKTIHGEKQQNVYYVTFKVKGRKVEAEVIASPYEYILLSPTDVPWLTQQPLQLTILVPLQEYQEKILSKTALPEDQKQQLKTLFVKYDNLWQHWENQVGHRKIRPHNIATGDYPPRPQKQYPINPKAKPSIQIVIDDLLKQGVLTPQNSTMNTPVYPVPKPDGRWRMVLDYREVNKTIPLTAAQNQHSAGILATIVRQKYKTTLDLANGFWAHPITPESYWLTAFTWQGKQYCWTRLPQGFLNSPALFNADVVDLLKEIPNVQVYVDDIYLSHDDPKEHVQQLEKVFQILLQAGYVVSLKKSEIGQKTVEFLGFNITKEGRGLTDTFKTKLLNITPPKDLKQLQSILGKLNFARNFIPNFAELVQPLYNLIAPAKGKYIEWSEENTKQLNMVIEALNTASNLEERLPEQRLVIKVNTSPSAGYVRYYNETGKKPIMYLNYVFSKAELKFSMLEKLLTTMHKALIKAMDLAMGQEILVYSPIVSMTKIQKTPLPERKALPIRWITWMTYLEDPRIQFHYDKTLPELKHIPDVYTSSQSPVKHPSQYEGVFYTDGSAIKSPDPTKSNNAGMGIVHATYKPEYQVLNQWSIPLGNHTAQMAEIAAVEFACKKALKIPGPVLVITDSFYVAESANKELPYWKSNGFVNNKKKPLKHISKWKSIAECLSMKPDITIQHEKGISLQIPVFILKGNALADKLATQGSYVVNAGKRTADGSEFEKRTADGSEFESPKKKAKVE

SEQ ID NO: 6769 - protein, 2091 aa, synthetic construct
MPAAKRVKLDGGDKKYSIGLDIGTNSVGWAVITDEYKVPSKKFKVLGNTDRHSIKKNLIGALLFDSGETAEATRLKRTARRRYTRRKNRICYLQEIFSNEMAKVDDSFFHRLEESFLVEEDKKHERHPIFGNIVDEVAYHEKYPTIYHLRKKLVDSTDKADLRLIYLALAHMIKFRGHFLIEGDLNPDNSDVDKLFIQLVQTYNQLFEENPINASGVDAKAILSARLSKSRRLENLIAQLPGEKKNGLFGNLIALSLGLTPNFKSNFDLAEDAKLQLSKDTYDDDLDNLLAQIGDQYADLFLAAKNLSDAILLSDILRVNTEITKAPLSASMIKRYDEHHQDLTLLKALVRQQLPEKYKEIFFDQSKNGYAGYIDGGASQEEFYKFIKPILEKMDGTEELLVKLNREDLLRKQRTFDNGSIPHQIHLGELHAILRRQEDFYPFLKDNREKIEKILTFRIPYYVGPLARGNSRFAWMTRKSEETITPWNFEEVVDKGASAQSFIERMTNFDKNLPNEKVLPKHSLLYEYFTVYNELTKVKYVTEGMRKPAFLSGEQKKAIVDLLFKTNRKVTVKQLKEDYFKKIECFDSVEISGVEDRFNASLGTYHDLLKIIKDKDFLDNEENEDILEDIVLTLTLFEDREMIEERLKTYAHLFDDKVMKQLKRRRYTGWGRLSRKLINGIRDKQSGKTILDFLKSDGFANRNFMQLIHDDSLTFKEDIQKAQVSGQGDSLHEHIANLAGSPAIKKGILQTVKVVDELVKVMGRHKPENIVIEMARENQTTQKGQKNSRERMKRIEEGIKELGSQILKEHPVENTQLQNEKLYLYYLQNGRDMYVDQELDINRLSDYDVDHIVPQSFLKDDSIDNKVLTRSDKARGKSDNVPSEEVVKKMKNYWRQLLNAKLITQRKFDNLTKAERGGLSELDKAGFIKRQLVETRQITKHVAQILDSRMNTKYDENDKLIREVKVITLKSKLVSDFRKDFQFYKVREINNYHHAHDAYLNAVVGTALIKKYPKLESEFVYGDYKVYDVRKMIAKSEQEIGKATAKYFFYSNIMNFFKTEITLANGEIRKRPLIETNGETGEIVWDKGRDFATVRKVLSMPQVNIVKKTEVQTGGFSKESILPKRNSDKLIARKKDWDPKKYGGFDSPTVAYSVLVVAKVEKGKSKKLKSVKELLGITIMERSSFEKNPIDFLEAKGYKEVKKDLIIKLPKYSLFELENGRKRMLASAGELQKGNELALPSKYVNFLYLASHYEKLKGSPEDNEQKQLFVEQHKHYLDEIIEQISEFSKRVILADANLDKVLSAYNKHRDKPIREQAENIIHLFTLTNLGAPAAFKYFDTTIDRKRYTSTKEVLDATLIHQSITGLYETRIDLSQLGGDGGEAAAKPAPGGVLNLEEEYRLHEKPVPSSIDPSWLQLFPTVWAERAGMGLANQVPPVVVELRSGASPVAVRQYPMSKEAREGIRPHIQKFLDLGVLVPCRSPWNTPLLPVKKPGTNDYRPVQDLREINKRVQDIHPTVPNPYNLLSSLPPSYTWYSVLDLKDAFFCLRLHPNSQPLFAFEWKDPEKGNTGQLTWTRLPQGFKNSPTLFNEALHRDLAPFRALNPQVVLLQYVDDLLVAAPTYEDCKKGTQKLLQELSKLGYRVSAKKAQLCQREVTYLGYLLKEGKRWLTPARKATVMKIPVPTTPRQVREFLGKAGFCRLFIPGFASLAAPLYPLTKPSIPFIWTEEHQQAFDHIKKALLSAPALALPDLTKPFTLYIDERAGVARGVLTQTLGPWRRPVAYLSKKLDPVASGWPTCLKAVAAVALLLKDADKLTLGQNVTVIASHSLESIVRQPPDRWMTNARMTHYQSLLLNERVSFAPPAVLNPATLLPVESEATPVHRCSEILAEETGTRRDLEDQPLPGVPTWYTDGSSFITEGKRRAGAPIVDGKRTVWASSLPEGTSAQKAELVALTQALRLAEGKNINIYTDSRYAFATAHIHGAIYKQRGWLTSAGKDIKNKEEILALLEAIHLPRRVAIIHCPGHQRGSNPVATGNRRADEAAKQAALSTRVLAGTTKPAGKRTADGSEFEKRTADGSEFESPKKKAKVE

SEQ ID NO: 6770 - protein, 2124 aa, synthetic construct
MPAAKRVKLDGGDKKYSIGLDIGTNSVGWAVITDEYKVPSKKFKVLGNTDRHSIKKNLIGALLFDSGETAEATRLKRTARRRYTRRKNRICYLQEIFSNEMAKVDDSFFHRLEESFLVEEDKKHERHPIFGNIVDEVAYHEKYPTIYHLRKKLVDSTDKADLRLIYLALAHMIKFRGHFLIEGDLNPDNSDVDKLFIQLVQTYNQLFEENPINASGVDAKAILSARLSKSRRLENLIAQLPGEKKNGLFGNLIALSLGLTPNFKSNFDLAEDAKLQLSKDTYDDDLDNLLAQIGDQYADLFLAAKNLSDAILLSDILRVNTEITKAPLSASMIKRYDEHHQDLTLLKALVRQQLPEKYKEIFFDQSKNGYAGYIDGGASQEEFYKFIKPILEKMDGTEELLVKLNREDLLRKQRTFDNGSIPHQIHLGELHAILRRQEDFYPFLKDNREKIEKILTFRIPYYVGPLARGNSRFAWMTRKSEETITPWNFEEVVDKGASAQSFIERMTNFDKNLPNEKVLPKHSLLYEYFTVYNELTKVKYVTEGMRKPAFLSGEQKKAIVDLLFKTNRKVTVKQLKEDYFKKIECFDSVEISGVEDRFNASLGTYHDLLKIIKDKDFLDNEENEDILEDIVLTLTLFEDREMIEERLKTYAHLFDDKVMKQLKRRRYTGWGRLSRKLINGIRDKQSGKTILDFLKSDGFANRNFMQLIHDDSLTFKEDIQKAQVSGQGDSLHEHIANLAGSPAIKKGILQTVKVVDELVKVMGRHKPENIVIEMARENQTTQKGQKNSRERMKRIEEGIKELGSQILKEHPVENTQLQNEKLYLYYLQNGRDMYVDQELDINRLSDYDVDHIVPQSFLKDDSIDNKVLTRSDKARGKSDNVPSEEVVKKMKNYWRQLLNAKLITQRKFDNLTKAERGGLSELDKAGFIKRQLVETRQITKHVAQILDSRMNTKYDENDKLIREVKVITLKSKLVSDFRKDFQFYKVREINNYHHAHDAYLNAVVGTALIKKYPKLESEFVYGDYKVYDVRKMIAKSEQEIGKATAKYFFYSNIMNFFKTEITLANGEIRKRPLIETNGETGEIVWDKGRDFATVRKVLSMPQVNIVKKTEVQTGGFSKESILPKRNSDKLIARKKDWDPKKYGGFDSPTVAYSVLVVAKVEKGKSKKLKSVKELLGITIMERSSFEKNPIDFLEAKGYKEVKKDLIIKLPKYSLFELENGRKRMLASAGELQKGNELALPSKYVNFLYLASHYEKLKGSPEDNEQKQLFVEQHKHYLDEIIEQISEFSKRVILADANLDKVLSAYNKHRDKPIREQAENIIHLFTLTNLGAPAAFKYFDTTIDRKRYTSTKEVLDATLIHQSITGLYETRIDLSQLGGDGGEAAAKPAPGGLLGRDLLTKLKAQIQFSTEGPQVTWEDRPAMCLVLNLEEEYRLHEKPVPPSIDPSWLQLFPMVWAEKAGMGLANQVPPVVVELKSDASPVAVRQYPMSKEAREGIRPHIQRFLDLGILVPCQSPWNTPLLPVKKPGTNDYRPVQDLREVNKRVQDIHPTVPNPYNLLSSLPPSHTWYSVLDLKDAFFCLKLHPNSQPLFAFEWRDPEKGNTGQLTWTRLPQGFKNSPTLFNEALHRDLASFRALNPQVVMLQYVDDLLVAAPTYRDCKEGTRRLLQELSKLGYRVSAKKAQLCREEVTYLGYLLKGGKRWLTPARKATVMKIPTPTTPRQVREFLGTAGFCRLWIPGFASLAAPLYPLTRPKVPFTWTEAHQEAFGRIKEALLSAPALALPDLTKPFALYVDEKEGVARGVLTQTLGPWRRPVAYLSKKLDPVASGWPTCLKAIAAVALLLKDADKLTLGQNVLVIAPHNLESIVRQPPDRWMTNARMTHYQSLLLNERVSFAPPAILNPATLLPVESDDTPIHICSEILAEETGTRPDLRDQPLPGVPAWYTDGSSFIMDGRRQAGAAIVDNKRTVWASNLPEGTSAQKAELIALTQALRLAEGKSINIYTDSRYAFATAHVHGAIYKQRGWLTSAGKDIKNKEEILALLEAIHLPKRVAIIHCPGHQRGTDPVATGNRKADEAAKQAAQSTRILTETTKNAGKRTADGSEFEKRTADGSEFESPKKKAKVE

SEQ ID NO: 6771 - protein, 2124 aa, synthetic construct
MPAAKRVKLDGGDKKYSIGLDIGTNSVGWAVITDEYKVPSKKFKVLGNTDRHSIKKNLIGALLFDSGETAEATRLKRTARRRYTRRKNRICYLQEIFSNEMAKVDDSFFHRLEESFLVEEDKKHERHPIFGNIVDEVAYHEKYPTIYHLRKKLVDSTDKADLRLIYLALAHMIKFRGHFLIEGDLNPDNSDVDKLFIQLVQTYNQLFEENPINASGVDAKAILSARLSKSRRLENLIAQLPGEKKNGLFGNLIALSLGLTPNFKSNFDLAEDAKLQLSKDTYDDDLDNLLAQIGDQYADLFLAAKNLSDAILLSDILRVNTEITKAPLSASMIKRYDEHHQDLTLLKALVRQQLPEKYKEIFFDQSKNGYAGYIDGGASQEEFYKFIKPILEKMDGTEELLVKLNREDLLRKQRTFDNGSIPHQIHLGELHAILRRQEDFYPFLKDNREKIEKILTFRIPYYVGPLARGNSRFAWMTRKSEETITPWNFEEVVDKGASAQSFIERMTNFDKNLPNEKVLPKHSLLYEYFTVYNELTKVKYVTEGMRKPAFLSGEQKKAIVDLLFKTNRKVTVKQLKEDYFKKIECFDSVEISGVEDRFNASLGTYHDLLKIIKDKDFLDNEENEDILEDIVLTLTLFEDREMIEERLKTYAHLFDDKVMKQLKRRRYTGWGRLSRKLINGIRDKQSGKTILDFLKSDGFANRNFMQLIHDDSLTFKEDIQKAQVSGQGDSLHEHIANLAGSPAIKKGILQTVKVVDELVKVMGRHKPENIVIEMARENQTTQKGQKNSRERMKRIEEGIKELGSQILKEHPVENTQLQNEKLYLYYLQNGRDMYVDQELDINRLSDYDVDHIVPQSFLKDDSIDNKVLTRSDKARGKSDNVPSEEVVKKMKNYWRQLLNAKLITQRKFDNLTKAERGGLSELDKAGFIKRQLVETRQITKHVAQILDSRMNTKYDENDKLIREVKVITLKSKLVSDFRKDFQFYKVREINNYHHAHDAYLNAVVGTALIKKYPKLESEFVYGDYKVYDVRKMIAKSEQEIGKATAKYFFYSNIMNFFKTEITLANGEIRKRPLIETNGETGEIVWDKGRDFATVRKVLSMPQVNIVKKTEVQTGGFSKESILPKRNSDKLIARKKDWDPKKYGGFDSPTVAYSVLVVAKVEKGKSKKLKSVKELLGITIMERSSFEKNPIDFLEAKGYKEVKKDLIIKLPKYSLFELENGRKRMLASAGELQKGNELALPSKYVNFLYLASHYEKLKGSPEDNEQKQLFVEQHKHYLDEIIEQISEFSKRVILADANLDKVLSAYNKHRDKPIREQAENIIHLFTLTNLGAPAAFKYFDTTIDRKRYTSTKEVLDATLIHQSITGLYETRIDLSQLGGDGGEAAAKPAPGGLLGRDLLTKLKAQIQFSTEGPQVTWEDRPAMCLVLNLEEEYRLHEKPVPPSIDPSWLQLFPMVWAEKAGMGLANQVPPVVVELKSDASPVAVRQYPMSKEAREGIRPHIQRFLDLGILVPCQSPWNTPLLPVKKPGTNDYRPVQDLREVNKRVQDIHPTVPNPYNLLSSLPPSHTWYSVLDLKDAFFCLKLHPNSQPLFAFEWRDPEKGNTGQLTWTRLPQGFKNSPTLFNEALHRDLASFRALNPQVVMLQYVDDLLVAAPTYRDCKEGTRRLLQELSKLGYRVSAKKAQLCREEVTYLGYLLKGGKRWLTPARKATVMKIPTPTTPRQVREFLGKAGFCRLFIPGFASLAAPLYPLTRPKVPFTWTEAHQEAFGRIKEALLSAPALALPDLTKPFALYVDEKEGVARGVLTQTLGPWRRPVAYLSKKLDPVASGWPTCLKAIAAVALLLKDADKLTLGQNVLVIAPHNLESIVRQPPDRWMTNARMTHYQSLLLNERVSFAPPAILNPATLLPVESDDTPIHICSEILAEETGTRPDLRDQPLPGVPAWYTDGSSFIMDGRRQAGAAIVDNKRTVWASNLPEGTSAQKAELIALTQALRLAEGKSINIYTDSRYAFATAHVHGAIYKQRGWLTSAGKDIKNKEEILALLEAIHLPKRVAIIHCPGHQRGTDPVATGNRKADEAAKQAAQSTRILTETTKNAGKRTADGSEFEKRTADGSEFESPKKKAKVE

SEQ ID NO: 6772 - protein, 2215 aa, synthetic construct
MPAAKRVKLDGGDKKYSIGLDIGTNSVGWAVITDEYKVPSKKFKVLGNTDRHSIKKNLIGALLFDSGETAEATRLKRTARRRYTRRKNRICYLQEIFSNEMAKVDDSFFHRLEESFLVEEDKKHERHPIFGNIVDEVAYHEKYPTIYHLRKKLVDSTDKADLRLIYLALAHMIKFRGHFLIEGDLNPDNSDVDKLFIQLVQTYNQLFEENPINASGVDAKAILSARLSKSRRLENLIAQLPGEKKNGLFGNLIALSLGLTPNFKSNFDLAEDAKLQLSKDTYDDDLDNLLAQIGDQYADLFLAAKNLSDAILLSDILRVNTEITKAPLSASMIKRYDEHHQDLTLLKALVRQQLPEKYKEIFFDQSKNGYAGYIDGGASQEEFYKFIKPILEKMDGTEELLVKLNREDLLRKQRTFDNGSIPHQIHLGELHAILRRQEDFYPFLKDNREKIEKILTFRIPYYVGPLARGNSRFAWMTRKSEETITPWNFEEVVDKGASAQSFIERMTNFDKNLPNEKVLPKHSLLYEYFTVYNELTKVKYVTEGMRKPAFLSGEQKKAIVDLLFKTNRKVTVKQLKEDYFKKIECFDSVEISGVEDRFNASLGTYHDLLKIIKDKDFLDNEENEDILEDIVLTLTLFEDREMIEERLKTYAHLFDDKVMKQLKRRRYTGWGRLSRKLINGIRDKQSGKTILDFLKSDGFANRNFMQLIHDDSLTFKEDIQKAQVSGQGDSLHEHIANLAGSPAIKKGILQTVKVVDELVKVMGRHKPENIVIEMARENQTTQKGQKNSRERMKRIEEGIKELGSQILKEHPVENTQLQNEKLYLYYLQNGRDMYVDQELDINRLSDYDVDHIVPQSFLKDDSIDNKVLTRSDKARGKSDNVPSEEVVKKMKNYWRQLLNAKLITQRKFDNLTKAERGGLSELDKAGFIKRQLVETRQITKHVAQILDSRMNTKYDENDKLIREVKVITLKSKLVSDFRKDFQFYKVREINNYHHAHDAYLNAVVGTALIKKYPKLESEFVYGDYKVYDVRKMIAKSEQEIGKATAKYFFYSNIMNFFKTEITLANGEIRKRPLIETNGETGEIVWDKGRDFATVRKVLSMPQVNIVKKTEVQTGGFSKESILPKRNSDKLIARKKDWDPKKYGGFDSPTVAYSVLVVAKVEKGKSKKLKSVKELLGITIMERSSFEKNPIDFLEAKGYKEVKKDLIIKLPKYSLFELENGRKRMLASAGELQKGNELALPSKYVNFLYLASHYEKLKGSPEDNEQKQLFVEQHKHYLDEIIEQISEFSKRVILADANLDKVLSAYNKHRDKPIREQAENIIHLFTLTNLGAPAAFKYFDTTIDRKRYTSTKEVLDATLIHQSITGLYETRIDLSQLGGDGGEAAAKPAPGGTLGDQGSRGSDPLPEPRVTLTVEGIPTEFLVNTGAEHSVLTKPMGKMGSKRTVVAGATGSKVYPWTTKRLLKIGQKQVTHSFLVIPECPAPLLGRDLLTKLKAQIQFSTEGPQVTWEDRPAMCLVLNLEEEYRLHEKPVPPSIDPSWLQLFPMVWAEKAGMGLANQVPPVVVELKSDASPVAVRQYPMSKEAREGIRPHIQRFLDLGILVPCQSPWNTPLLPVKKPGTNDYRPVQDLREVNKRVQDIHPTVPNPYNLLSSLPPSHTWYSVLDLKDAFFCLKLHPNSQPLFAFEWRDPEKGNTGQLTWTRLPQGFKNSPTLFNEALHRDLASFRALNPQVVMLQYVDDLLVAAPTYRDCKEGTRRLLQELSKLGYRVSAKKAQLCREEVTYLGYLLKGGKRWLTPARKATVMKIPTPTTPRQVREFLGTAGFCRLWIPGFASLAAPLYPLTRPKVPFTWTEAHQEAFGRIKEALLSAPALALPDLTKPFALYVDEKEGVARGVLTQTLGPWRRPVAYLSKKLDPVASGWPTCLKAIAAVALLLKDADKLTLGQNVLVIAPHNLESIVRQPPDRWMTNARMTHYQSLLLNERVSFAPPAILNPATLLPVESDDTPIHICSEILAEETGTRPDLRDQPLPGVPAWYTDGSSFIMDGRRQAGAAIVDNKRTVWASNLPEGTSAQKAELIALTQALRLAEGKSINIYTDSRYAFATAHVHGAIYKQRGWLTSAGKDIKNKEEILALLEAIHLPKRVAIIHCPGHQRGTDPVATGNRKADEAAKQAAQSTRILTETTKNAGKRTADGSEFEKRTADGSEFESPKKKAKVE

SEQ ID NO: 6773 - protein, 2093 aa, synthetic construct
MPAAKRVKLDGGDKKYSIGLDIGTNSVGWAVITDEYKVPSKKFKVLGNTDRHSIKKNLIGALLFDSGETAEATRLKRTARRRYTRRKNRICYLQEIFSNEMAKVDDSFFHRLEESFLVEEDKKHERHPIFGNIVDEVAYHEKYPTIYHLRKKLVDSTDKADLRLIYLALAHMIKFRGHFLIEGDLNPDNSDVDKLFIQLVQTYNQLFEENPINASGVDAKAILSARLSKSRRLENLIAQLPGEKKNGLFGNLIALSLGLTPNFKSNFDLAEDAKLQLSKDTYDDDLDNLLAQIGDQYADLFLAAKNLSDAILLSDILRVNTEITKAPLSASMIKRYDEHHQDLTLLKALVRQQLPEKYKEIFFDQSKNGYAGYIDGGASQEEFYKFIKPILEKMDGTEELLVKLNREDLLRKQRTFDNGSIPHQIHLGELHAILRRQEDFYPFLKDNREKIEKILTFRIPYYVGPLARGNSRFAWMTRKSEETITPWNFEEVVDKGASAQSFIERMTNFDKNLPNEKVLPKHSLLYEYFTVYNELTKVKYVTEGMRKPAFLSGEQKKAIVDLLFKTNRKVTVKQLKEDYFKKIECFDSVEISGVEDRFNASLGTYHDLLKIIKDKDFLDNEENEDILEDIVLTLTLFEDREMIEERLKTYAHLFDDKVMKQLKRRRYTGWGRLSRKLINGIRDKQSGKTILDFLKSDGFANRNFMQLIHDDSLTFKEDIQKAQVSGQGDSLHEHIANLAGSPAIKKGILQTVKVVDELVKVMGRHKPENIVIEMARENQTTQKGQKNSRERMKRIEEGIKELGSQILKEHPVENTQLQNEKLYLYYLQNGRDMYVDQELDINRLSDYDVDHIVPQSFLKDDSIDNKVLTRSDKARGKSDNVPSEEVVKKMKNYWRQLLNAKLITQRKFDNLTKAERGGLSELDKAGFIKRQLVETRQITKHVAQILDSRMNTKYDENDKLIREVKVITLKSKLVSDFRKDFQFYKVREINNYHHAHDAYLNAVVGTALIKKYPKLESEFVYGDYKVYDVRKMIAKSEQEIGKATAKYFFYSNIMNFFKTEITLANGEIRKRPLIETNGETGEIVWDKGRDFATVRKVLSMPQVNIVKKTEVQTGGFSKESILPKRNSDKLIARKKDWDPKKYGGFDSPTVAYSVLVVAKVEKGKSKKLKSVKELLGITIMERSSFEKNPIDFLEAKGYKEVKKDLIIKLPKYSLFELENGRKRMLASAGELQKGNELALPSKYVNFLYLASHYEKLKGSPEDNEQKQLFVEQHKHYLDEIIEQISEFSKRVILADANLDKVLSAYNKHRDKPIREQAENIIHLFTLTNLGAPAAFKYFDTTIDRKRYTSTKEVLDATLIHQSITGLYETRIDLSQLGGDGGEAAAKPAPGGTLNLEDEYRLYETSAEPEVSPGSTWLSDFPQAWAETGGMGLAVRQAPLIIPLKATSTPVSIKQYPMSQEAKLGIKPHIQRLLDQGILVPCQSPWNTPLLPVKKPGTNDYRPVQDLREVNKRVEDIHPTVPNPYNLLSGLPPSHRWYTVLDLKDAFFCLRLHPTSQPLFAFEWRDPGMGISGQLTWTRLPQGFKNSPTLFNEALHRDLADFRIQHPDLILLQYVDDILLAATSELDCQQGTRALLLTLGNLGYRASAKKAQLCQKQVKYLGYLLKEGQRWLTEARKETVMGQPTPKTPRQLREFLGKAGFCRLFIPGFAEMAAPLYPLTKPGTLFNWGPDQQKAYQEIKQALLTAPALGLPDLTKPFELFVDEKQGYAKGVLTQKLGPWRRPVAYLSKKLDPVAAGWPPCLRMVAAIAVLRKDAGKLTMGQPLVILAPHAVEALVKQPPDRWLSNARMTHYQAMLLDTDRVQFGPVVALNPATLLPLPEEGAPHDCLEILAETHGTRPDLTDQPIPDADHTWYTDGSSFLQEGQRKAGAAVTTETEVIWARALPAGTSAQRAELIALTQALKMAEGKRLNVYTDSRYAFATAHIHGEIYRRRGWLTSEGREIKNKSEILALLKALFLPKRLSIIHCLGHQKGDSAEARGNRLADQAAREAAIKTPPDTSTLLAGKRTADGSEFEKRTADGSEFESPKKKAKVE

SEQ ID NO: 6774 - protein, 2093 aa, synthetic construct
MPAAKRVKLDGGDKKYSIGLDIGTNSVGWAVITDEYKVPSKKFKVLGNTDRHSIKKNLIGALLFDSGETAEATRLKRTARRRYTRRKNRICYLQEIFSNEMAKVDDSFFHRLEESFLVEEDKKHERHPIFGNIVDEVAYHEKYPTIYHLRKKLVDSTDKADLRLIYLALAHMIKFRGHFLIEGDLNPDNSDVDKLFIQLVQTYNQLFEENPINASGVDAKAILSARLSKSRRLENLIAQLPGEKKNGLFGNLIALSLGLTPNFKSNFDLAEDAKLQLSKDTYDDDLDNLLAQIGDQYADLFLAAKNLSDAILLSDILRVNTEITKAPLSASMIKRYDEHHQDLTLLKALVRQQLPEKYKEIFFDQSKNGYAGYIDGGASQEEFYKFIKPILEKMDGTEELLVKLNREDLLRKQRTFDNGSIPHQIHLGELHAILRRQEDFYPFLKDNREKIEKILTFRIPYYVGPLARGNSRFAWMTRKSEETITPWNFEEVVDKGASAQSFIERMTNFDKNLPNEKVLPKHSLLYEYFTVYNELTKVKYVTEGMRKPAFLSGEQKKAIVDLLFKTNRKVTVKQLKEDYFKKIECFDSVEISGVEDRFNASLGTYHDLLKIIKDKDFLDNEENEDILEDIVLTLTLFEDREMIEERLKTYAHLFDDKVMKQLKRRRYTGWGRLSRKLINGIRDKQSGKTILDFLKSDGFANRNFMQLIHDDSLTFKEDIQKAQVSGQGDSLHEHIANLAGSPAIKKGILQTVKVVDELVKVMGRHKPENIVIEMARENQTTQKGQKNSRERMKRIEEGIKELGSQILKEHPVENTQLQNEKLYLYYLQNGRDMYVDQELDINRLSDYDVDHIVPQSFLKDDSIDNKVLTRSDKARGKSDNVPSEEVVKKMKNYWRQLLNAKLITQRKFDNLTKAERGGLSELDKAGFIKRQLVETRQITKHVAQILDSRMNTKYDENDKLIREVKVITLKSKLVSDFRKDFQFYKVREINNYHHAHDAYLNAVVGTALIKKYPKLESEFVYGDYKVYDVRKMIAKSEQEIGKATAKYFFYSNIMNFFKTEITLANGEIRKRPLIETNGETGEIVWDKGRDFATVRKVLSMPQVNIVKKTEVQTGGFSKESILPKRNSDKLIARKKDWDPKKYGGFDSPTVAYSVLVVAKVEKGKSKKLKSVKELLGITIMERSSFEKNPIDFLEAKGYKEVKKDLIIKLPKYSLFELENGRKRMLASAGELQKGNELALPSKYVNFLYLASHYEKLKGSPEDNEQKQLFVEQHKHYLDEIIEQISEFSKRVILADANLDKVLSAYNKHRDKPIREQAENIIHLFTLTNLGAPAAFKYFDTTIDRKRYTSTKEVLDATLIHQSITGLYETRIDLSQLGGDGGEAAAKPAPGGTLGIEDEYRLHETSTEPDVSLGSTWLSDFPQAWAETGGMGLAVRQAPLIIPLKATSTPVSIQQYPMSHEARLGIKPHIQRLLDQGILVPCQSPWNTPLLPVKKPGTNDYRPVQDLREVNKRVEDIHPTVPNPYNLLSGLPPSHQWYTVLDLKDAFFCLRLHPTSQPLFAFEWRDPGMGISGQLTWTRLPQGFKNSPTLFNEALHRDLADFRIQHPDLILLQYVDDILLAATSELDCQQGTRALLQTLGDLGYRASAKKAQICQKQVKYLGYLLREGQRWLTEARKETVMGQPVPKTPRQLREFLGTAGFCRLWIPGFAEMAAPLYPLTKPGTLFSWGPDQQKAYQEIKQALLTAPALGLPDLTKPFELFVDEKQGYAKGVLTQKLGPWRRPVAYLSKKLDPVAAGWPPCLRMVAAIAVLTKDAGKLTMGQPLVILAPHAVEALVKQPPDRWLSNARMTHYQAMLLDTDRVQFGPVVALNPATLLPLPEEGAPHDCLEILAETHGTRPDLTDQPIPDADHTWYTDGSSFLQEGQRKAGAAVTTETEVIWAGALPAGTSAQRAELIALTQALKMAEGKRLNVYTDSRYAFATAHIHGEIYRRRGWLTSEGREIKNKSEILALLKALFLPKRLSIIHCLGHQKGDSAEARGNRLADQAAREAAIKTPPDTSTLLAGKRTADGSEFEKRTADGSEFESPKKKAKVE

SEQ ID NO: 6775 - protein, 2093 aa, synthetic construct
MPAAKRVKLDGGDKKYSIGLDIGTNSVGWAVITDEYKVPSKKFKVLGNTDRHSIKKNLIGALLFDSGETAEATRLKRTARRRYTRRKNRICYLQEIFSNEMAKVDDSFFHRLEESFLVEEDKKHERHPIFGNIVDEVAYHEKYPTIYHLRKKLVDSTDKADLRLIYLALAHMIKFRGHFLIEGDLNPDNSDVDKLFIQLVQTYNQLFEENPINASGVDAKAILSARLSKSRRLENLIAQLPGEKKNGLFGNLIALSLGLTPNFKSNFDLAEDAKLQLSKDTYDDDLDNLLAQIGDQYADLFLAAKNLSDAILLSDILRVNTEITKAPLSASMIKRYDEHHQDLTLLKALVRQQLPEKYKEIFFDQSKNGYAGYIDGGASQEEFYKFIKPILEKMDGTEELLVKLNREDLLRKQRTFDNGSIPHQIHLGELHAILRRQEDFYPFLKDNREKIEKILTFRIPYYVGPLARGNSRFAWMTRKSEETITPWNFEEVVDKGASAQSFIERMTNFDKNLPNEKVLPKHSLLYEYFTVYNELTKVKYVTEGMRKPAFLSGEQKKAIVDLLFKTNRKVTVKQLKEDYFKKIECFDSVEISGVEDRFNASLGTYHDLLKIIKDKDFLDNEENEDILEDIVLTLTLFEDREMIEERLKTYAHLFDDKVMKQLKRRRYTGWGRLSRKLINGIRDKQSGKTILDFLKSDGFANRNFMQLIHDDSLTFKEDIQKAQVSGQGDSLHEHIANLAGSPAIKKGILQTVKVVDELVKVMGRHKPENIVIEMARENQTTQKGQKNSRERMKRIEEGIKELGSQILKEHPVENTQLQNEKLYLYYLQNGRDMYVDQELDINRLSDYDVDHIVPQSFLKDDSIDNKVLTRSDKARGKSDNVPSEEVVKKMKNYWRQLLNAKLITQRKFDNLTKAERGGLSELDKAGFIKRQLVETRQITKHVAQILDSRMNTKYDENDKLIREVKVITLKSKLVSDFRKDFQFYKVREINNYHHAHDAYLNAVVGTALIKKYPKLESEFVYGDYKVYDVRKMIAKSEQEIGKATAKYFFYSNIMNFFKTEITLANGEIRKRPLIETNGETGEIVWDKGRDFATVRKVLSMPQVNIVKKTEVQTGGFSKESILPKRNSDKLIARKKDWDPKKYGGFDSPTVAYSVLVVAKVEKGKSKKLKSVKELLGITIMERSSFEKNPIDFLEAKGYKEVKKDLIIKLPKYSLFELENGRKRMLASAGELQKGNELALPSKYVNFLYLASHYEKLKGSPEDNEQKQLFVEQHKHYLDEIIEQISEFSKRVILADANLDKVLSAYNKHRDKPIREQAENIIHLFTLTNLGAPAAFKYFDTTIDRKRYTSTKEVLDATLIHQSITGLYETRIDLSQLGGDGGEAAAKPAPGGTLNIEDEYRLHETSKEPDVSLGSTWLSDFPQAWAETGGMGLAVRQAPLIIPLKATSTPVSIKQYPMSQEARLGIKPHIQRLLDQGILVPCQSPWNTPLLPVKKPGTNDYRPVQDLREVNKRVEDIHPTVPNPYNLLSGLPPSHQWYTVLDLKDAFFCLRLHPTSQPLFAFEWRDPEMGISGQLTWTRLPQGFKNSPTLFNEALHRDLAGFRIQHPDLILLQYVDDLLLAATSELDCQQGTRALLQTLGDLGYRASAKKAQICQKQVKYLGYLLKEGQRWLTEARKETVMGQPIPKTPRQLREFLGTAGFCRLWIPGFAEMAAPLYPLTKPGTLFNWGPDQQKAFQEIKQALLTAPALGLPDLTKPFELFVDEKQGYAKGVLTQKLGPWRRPVAYLSKKLDPVAAGWPPCLRMVAAIAVLTKDAGKLTMGQPLVILAPHAVEALVKQPPDRWLSNARMTHYQALLLDTDRVQFGPVVALNPATLLPLPEEGLQHDCLDILAEAHGTRSDLMDQPLPDADHTWYTDGSSFLQEGQRKAGAAVTTETEVIWARALPAGTSAQRAELIALTQALKMAEGKKLNVYTDSRYAFATAHIHGEIYRRRGWLTSEGKEIKNKDEILALLKALFLPKRLSIIHCPGHQKGNSAEARGNRMADQAAREVATRETPETSTLLAGKRTADGSEFEKRTADGSEFESPKKKAKVE

SEQ ID NO: 6776 - protein, 2093 aa, synthetic construct
MPAAKRVKLDGGDKKYSIGLDIGTNSVGWAVITDEYKVPSKKFKVLGNTDRHSIKKNLIGALLFDSGETAEATRLKRTARRRYTRRKNRICYLQEIFSNEMAKVDDSFFHRLEESFLVEEDKKHERHPIFGNIVDEVAYHEKYPTIYHLRKKLVDSTDKADLRLIYLALAHMIKFRGHFLIEGDLNPDNSDVDKLFIQLVQTYNQLFEENPINASGVDAKAILSARLSKSRRLENLIAQLPGEKKNGLFGNLIALSLGLTPNFKSNFDLAEDAKLQLSKDTYDDDLDNLLAQIGDQYADLFLAAKNLSDAILLSDILRVNTEITKAPLSASMIKRYDEHHQDLTLLKALVRQQLPEKYKEIFFDQSKNGYAGYIDGGASQEEFYKFIKPILEKMDGTEELLVKLNREDLLRKQRTFDNGSIPHQIHLGELHAILRRQEDFYPFLKDNREKIEKILTFRIPYYVGPLARGNSRFAWMTRKSEETITPWNFEEVVDKGASAQSFIERMTNFDKNLPNEKVLPKHSLLYEYFTVYNELTKVKYVTEGMRKPAFLSGEQKKAIVDLLFKTNRKVTVKQLKEDYFKKIECFDSVEISGVEDRFNASLGTYHDLLKIIKDKDFLDNEENEDILEDIVLTLTLFEDREMIEERLKTYAHLFDDKVMKQLKRRRYTGWGRLSRKLINGIRDKQSGKTILDFLKSDGFANRNFMQLIHDDSLTFKEDIQKAQVSGQGDSLHEHIANLAGSPAIKKGILQTVKVVDELVKVMGRHKPENIVIEMARENQTTQKGQKNSRERMKRIEEGIKELGSQILKEHPVENTQLQNEKLYLYYLQNGRDMYVDQELDINRLSDYDVDHIVPQSFLKDDSIDNKVLTRSDKARGKSDNVPSEEVVKKMKNYWRQLLNAKLITQRKFDNLTKAERGGLSELDKAGFIKRQLVETRQITKHVAQILDSRMNTKYDENDKLIREVKVITLKSKLVSDFRKDFQFYKVREINNYHHAHDAYLNAVVGTALIKKYPKLESEFVYGDYKVYDVRKMIAKSEQEIGKATAKYFFYSNIMNFFKTEITLANGEIRKRPLIETNGETGEIVWDKGRDFATVRKVLSMPQVNIVKKTEVQTGGFSKESILPKRNSDKLIARKKDWDPKKYGGFDSPTVAYSVLVVAKVEKGKSKKLKSVKELLGITIMERSSFEKNPIDFLEAKGYKEVKKDLIIKLPKYSLFELENGRKRMLASAGELQKGNELALPSKYVNFLYLASHYEKLKGSPEDNEQKQLFVEQHKHYLDEIIEQISEFSKRVILADANLDKVLSAYNKHRDKPIREQAENIIHLFTLTNLGAPAAFKYFDTTIDRKRYTSTKEVLDATLIHQSITGLYETRIDLSQLGGDGGEAAAKPAPGGTLNIEDEYRLHETSKGPDVPLGSTWLSDFPQAWAETGGMGLAVRQAPLIIPLKATSTPVSIKQYPMSQEARLGIKPHIQRLLDQGILVPCQSPWNTPLLPVKKPGTNDYRPVQDLREVNKRVEDIHPTVPNPYNLLSGLPPSHQWYTVLDLKDAFFCLRLHPTSQSLFAFEWRDPEMGISGQLTWTRLPQGFKNSPTLFNEALHRDLADFRIQHPDLILLQYVDDLLLAATSELDCQQGTRALLQTLGDLGYRASAKKAQICQKQVKYLGYLLKEGQRWLTEARKETVMGQPTPKTPRQLREFLGTAGFCRLWIPGFAEMAAPLYPLTKPGTLFEWGPDQQKAYQEIKQALLTAPALGLPDLTKPFELFVDEKQGYAKGVLTQKLGPWRRPVAYLSKKLDPVAAGWPPCLRMVAAIAVLTKDAGKLTMGQPLVILAPHAVEALVKQPPDRWLSNARMTHYQALLLDTDRVQFGPIVALNPATLLPLPEEGLQHDCLDILAEAHGTRPDLTDQPLPDADHTWYTDGSSFLQEGQRKAGAAVTTETEVVWAKALPAGTSAQRAELIALTQALKMAEGKKLNVYTDSRYAFATAHIHGEIYRRRGWLTSEGKEIKNKDEILALLKALFLPKRLSIIHCPGHQKGNRAEARGNRMADQAAREVATRETPETSTLLAGKRTADGSEFEKRTADGSEFESPKKKAKVE

SEQ ID NO: 6777 - protein, 2113 aa, synthetic construct
MPAAKRVKLDGGDKKYSIGLDIGTNSVGWAVITDEYKVPSKKFKVLGNTDRHSIKKNLIGALLFDSGETAEATRLKRTARRRYTRRKNRICYLQEIFSNEMAKVDDSFFHRLEESFLVEEDKKHERHPIFGNIVDEVAYHEKYPTIYHLRKKLVDSTDKADLRLIYLALAHMIKFRGHFLIEGDLNPDNSDVDKLFIQLVQTYNQLFEENPINASGVDAKAILSARLSKSRRLENLIAQLPGEKKNGLFGNLIALSLGLTPNFKSNFDLAEDAKLQLSKDTYDDDLDNLLAQIGDQYADLFLAAKNLSDAILLSDILRVNTEITKAPLSASMIKRYDEHHQDLTLLKALVRQQLPEKYKEIFFDQSKNGYAGYIDGGASQEEFYKFIKPILEKMDGTEELLVKLNREDLLRKQRTFDNGSIPHQIHLGELHAILRRQEDFYPFLKDNREKIEKILTFRIPYYVGPLARGNSRFAWMTRKSEETITPWNFEEVVDKGASAQSFIERMTNFDKNLPNEKVLPKHSLLYEYFTVYNELTKVKYVTEGMRKPAFLSGEQKKAIVDLLFKTNRKVTVKQLKEDYFKKIECFDSVEISGVEDRFNASLGTYHDLLKIIKDKDFLDNEENEDILEDIVLTLTLFEDREMIEERLKTYAHLFDDKVMKQLKRRRYTGWGRLSRKLINGIRDKQSGKTILDFLKSDGFANRNFMQLIHDDSLTFKEDIQKAQVSGQGDSLHEHIANLAGSPAIKKGILQTVKVVDELVKVMGRHKPENIVIEMARENQTTQKGQKNSRERMKRIEEGIKELGSQILKEHPVENTQLQNEKLYLYYLQNGRDMYVDQELDINRLSDYDVDHIVPQSFLKDDSIDNKVLTRSDKARGKSDNVPSEEVVKKMKNYWRQLLNAKLITQRKFDNLTKAERGGLSELDKAGFIKRQLVETRQITKHVAQILDSRMNTKYDENDKLIREVKVITLKSKLVSDFRKDFQFYKVREINNYHHAHDAYLNAVVGTALIKKYPKLESEFVYGDYKVYDVRKMIAKSEQEIGKATAKYFFYSNIMNFFKTEITLANGEIRKRPLIETNGETGEIVWDKGRDFATVRKVLSMPQVNIVKKTEVQTGGFSKESILPKRNSDKLIARKKDWDPKKYGGFDSPTVAYSVLVVAKVEKGKSKKLKSVKELLGITIMERSSFEKNPIDFLEAKGYKEVKKDLIIKLPKYSLFELENGRKRMLASAGELQKGNELALPSKYVNFLYLASHYEKLKGSPEDNEQKQLFVEQHKHYLDEIIEQISEFSKRVILADANLDKVLSAYNKHRDKPIREQAENIIHLFTLTNLGAPAAFKYFDTTIDRKRYTSTKEVLDATLIHQSITGLYETRIDLSQLGGDGGEAAAKPAPGGTLNIEDEYRLHETSKEPDVSLGSTWLSDFPQAWAETGGMGLAVRQAPLIIPLKATSTPVSIKQYPMSQEARLGIKPHIQRLLDQGILVPCQSPWNTPLLPVKKPGTNDYRPVQDLREVNKRVEDIHPTVPNPYNLLSGLPPSHQWYTVLDLKDAFFCLRLHPTSQPLFAFEWRDPEMGISGQLTWTRLPQGFKNSPTLFNEALHRDLADFRIQHPDLILLQYVDDLLLAATSELDCQQGTRALLQTLGNLGYRASAKKAQICQKQVKYLGYLLKEGQRWLTEARKETVMGQPTPKTPRQLREFLGKAGFCRLFIPGFAEMAAPLYPLTKPGTLFNWGPDQQKAYQEIKQALLTAPALGLPDLTKPFELFVDEKQGYAKGVLTQKLGPWRRPVAYLSKKLDPVAAGWPPCLRMVAAIAVLTKDAGKLTMGQPLVILAPHAVEALVKQPPDRWLSNARMTHYQALLLDTDRVQFGPVVALNPATLLPLPEEGLQHNCLDILAEAHGTRPDLTDQPLPDADHTWYTDGSSLLQEGQRKAGAAVTTETEVIWAKALPAGTSAQRAELIALTQALKMAEGKKLNVYTDSRYAFATAHIHGEIYRRRGWLTSEGKEIKNKDEILALLKALFLPKRLSIIHCPGHQKGHSAEARGNRMADQAARKAAITETPDTSTLLIENSSPSGGSKRTADGSEFEAGKRTADGSEFEKRTADGSEFESPKKKAKVE

SEQ ID NO: 6778 - protein, 2113 aa, synthetic construct; identical to SEQ ID NO: 6777

SEQ ID NO: 6779 - protein, 2021 aa, synthetic construct
MPAAKRVKLDGGDKKYSIGLDIGTNSVGWAVITDEYKVPSKKFKVLGNTDRHSIKKNLIGALLFDSGETAEATRLKRTARRRYTRRKNRICYLQEIFSNEMAKVDDSFFHRLEESFLVEEDKKHERHPIFGNIVDEVAYHEKYPTIYHLRKKLVDSTDKADLRLIYLALAHMIKFRGHFLIEGDLNPDNSDVDKLFIQLVQTYNQLFEENPINASGVDAKAILSARLSKSRRLENLIAQLPGEKKNGLFGNLIALSLGLTPNFKSNFDLAEDAKLQLSKDTYDDDLDNLLAQIGDQYADLFLAAKNLSDAILLSDILRVNTEITKAPLSASMIKRYDEHHQDLTLLKALVRQQLPEKYKEIFFDQSKNGYAGYIDGGASQEEFYKFIKPILEKMDGTEELLVKLNREDLLRKQRTFDNGSIPHQIHLGELHAILRRQEDFYPFLKDNREKIEKILTFRIPYYVGPLARGNSRFAWMTRKSEETITPWNFEEVVDKGASAQSFIERMTNFDKNLPNEKVLPKHSLLYEYFTVYNELTKVKYVTEGMRKPAFLSGEQKKAIVDLLFKTNRKVTVKQLKEDYFKKIECFDSVEISGVEDRFNASLGTYHDLLKIIKDKDFLDNEENEDILEDIVLTLTLFEDREMIEERLKTYAHLFDDKVMKQLKRRRYTGWGRLSRKLINGIRDKQSGKTILDFLKSDGFANRNFMQLIHDDSLTFKEDIQKAQVSGQGDSLHEHIANLAGSPAIKKGILQTVKVVDELVKVMGRHKPENIVIEMARENQTTQKGQKNSRERMKRIEEGIKELGSQILKEHPVENTQLQNEKLYLYYLQNGRDMYVDQELDINRLSDYDVDHIVPQSFLKDDSIDNKVLTRSDKARGKSDNVPSEEVVKKMKNYWRQLLNAKLITQRKFDNLTKAERGGLSELDKAGFIKRQLVETRQITKHVAQILDSRMNTKYDENDKLIREVKVITLKSKLVSDFRKDFQFYKVREINNYHHAHDAYLNAVVGTALIKKYPKLESEFVYGDYKVYDVRKMIAKSEQEIGKATAKYFFYSNIMNFFKTEITLANGEIRKRPLIETNGETGEIVWDKGRDFATVRKVLSMPQVNIVKKTEVQTGGFSKESILPKRNSDKLIARKKDWDPKKYGGFDSPTVAYSVLVVAKVEKGKSKKLKSVKELLGITIMERSSFEKNPIDFLEAKGYKEVKKDLIIKLPKYSLFELENGRKRMLASAGELQKGNELALPSKYVNFLYLASHYEKLKGSPEDNEQKQLFVEQHKHYLDEIIEQISEFSKRVILADANLDKVLSAYNKHRDKPIREQAENIIHLFTLTNLGAPAAFKYFDTTIDRKRYTSTKEVLDATLIHQSITGLYETRIDLSQLGGDGGEAAAKPAPGGGRDIMKDIKVRLMTDSPDDSQDLMIGAIESNLFADQISWKSDQPVWLNQWPLKQEKLQALQQLVTEQLQLGHLEESNSPWNTPVFVIKKKSGKWRLLQDLRAVNATMHDMGALQPGLPSPVAVPKGWEIIIIDLQDCFFNIKLHPEDCKRFAFSVPSPNFKRPYQRFQWKVLPQGMKNSPTLCQKFVDKAILTVRDKYQDSYIVHYMDDILLAHPSRSIVDEILTSMIQALNKHGLVVSTEKIQKYDNLKYLGTHIQGDSVSYQKLQIRTDKLRTLNDFQKLLGNINWIRPFLKLTTGELKPLFEILNGDSNPISTRKLTPEACKALQLMNERLSTARVKRLDLSQPWSLCILKTEYTPTACLWQDGVVEWIHLPHISPKVITPYDIFCTQLIIKGRHRSKELFSKDPDYIVVPYTKVQFDLLLQEKEDWPISLLGFLGEVHFHLPKDPLLTFTLQTAIIFPHMTSTTPLEKGIVIFTDGSANGRSVTYIQGREPIIKENTQNTAQQAEIVAVITAFEEVSQPFNLYTDSKYVTGLFPEIETATLSPRTKIYTELKHLQRLIHKRQEKFYIGHIRGHTGLPGPLAQGNAYADSLTRILTAGKRTADGSEFEKRTADGSEFESPKKKAKVE

SEQ ID NO: 6780 - protein, 2084 aa, synthetic construct
MPAAKRVKLDGGDKKYSIGLDIGTNSVGWAVITDEYKVPSKKFKVLGNTDRHSIKKNLIGALLFDSGETAEATRLKRTARRRYTRRKNRICYLQEIFSNEMAKVDDSFFHRLEESFLVEEDKKHERHPIFGNIVDEVAYHEKYPTIYHLRKKLVDSTDKADLRLIYLALAHMIKFRGHFLIEGDLNPDNSDVDKLFIQLVQTYNQLFEENPINASGVDAKAILSARLSKSRRLENLIAQLPGEKKNGLFGNLIALSLGLTPNFKSNFDLAEDAKLQLSKDTYDDDLDNLLAQIGDQYADLFLAAKNLSDAILLSDILRVNTEITKAPLSASMIKRYDEHHQDLTLLKALVRQQLPEKYKEIFFDQSKNGYAGYIDGGASQEEFYKFIKPILEKMDGTEELLVKLNREDLLRKQRTFDNGSIPHQIHLGELHAILRRQEDFYPFLKDNREKIEKILTFRIPYYVGPLARGNSRFAWMTRKSEETITPWNFEEVVDKGASAQSFIERMTNFDKNLPNEKVLPKHSLLYEYFTVYNELTKVKYVTEGMRKPAFLSGEQKKAIVDLLFKTNRKVTVKQLKEDYFKKIECFDSVEISGVEDRFNASLGTYHDLLKIIKDKDFLDNEENEDILEDIVLTLTLFEDREMIEERLKTYAHLFDDKVMKQLKRRRYTGWGRLSRKLINGIRDKQSGKTILDFLKSDGFANRNFMQLIHDDSLTFKEDIQKAQVSGQGDSLHEHIANLAGSPAIKKGILQTVKVVDELVKVMGRHKPENIVIEMARENQTTQKGQKNSRERMKRIEEGIKELGSQILKEHPVENTQLQNEKLYLYYLQNGRDMYVDQELDINRLSDYDVDHIVPQSFLKDDSIDNKVLTRSDKARGKSDNVPSEEVVKKMKNYWRQLLNAKLITQRKFDNLTKAERGGLSELDKAGFIKRQLVETRQITKHVAQILDSRMNTKYDENDKLIREVKVITLKSKLVSDFRKDFQFYKVREINNYHHAHDAYLNAVVGTALIKKYPKLESEFVYGDYKVYDVRKMIAKSEQEIGKATAKYFFYSNIMNFFKTEITLANGEIRKRPLIETNGETGEIVWDKGRDFATVRKVLSMPQVNIVKKTEVQTGGFSKESILPKRNSDKLIARKKDWDPKKYGGFDSPTVAYSVLVVAKVEKGKSKKLKSVKELLGITIMERSSFEKNPIDFLEAKGYKEVKKDLIIKLPKYSLFELENGRKRMLASAGELQKGNELALPSKYVNFLYLASHYEKLKGSPEDNEQKQLFVEQHKHYLDEIIEQISEFSKRVILADANLDKVLSAYNKHRDKPIREQAENIIHLFTLTNLGAPAAFKYFDTTIDRKRYTSTKEVLDATLIHQSITGLYETRIDLSQLGGDGGEAAAKPAPGGIPWLMKKPLQLTTLVPLQEYEERLLKQTMLTGSYKEKLQSLFLKYDALWQHWENQVGHRRIKPHHIATGTVNPRPQKQYPINPKAKASIQTVINDLLKQGVLIQQNSIMNTPVYPVPKPDGKWRMVLDYREVNKTIPLIAAQNQHSAGILSSIFRGKYKTTLDLSNGFWAHSITPESYWLTAFTWLGQQYCWTRLPQGFLNSPALFNADVVDLLKEVPNVQVYVDDIYISHDDPREHLEQLEKVFSLLLNAGYVVSLKKSEIAQHEVEFLGFNITKEGRGLTETFKQKLLNITPPRDLKQLQSILGKLNFARNFIPNFSELVKPLYNIIATAPGKYITWTTDNSQQLQNIISMLNSAENLEERNPEVRLIMKVNTSPSAGYIRFYNEFAKRPIMYLNYVYTKAEVKFTNTEKLLTTIHKGLIKALDLGMGQEILVYSPIVSMTKIQKTPLPERKALPIRWITWMSYLEDPRIQFHYDKTLPELQQVPTVTDDIIAKIKHPSEFSMVFYTDGSAIKHPNVNKSHNAGMGIAQVQFKPEFTVINTWSIPLGDHTAQLAEVAAVEFACKKALKIDGPVLIVTDSFYVAESVNKELPYWQSNGFFNNKKKPLKHVSKWKSIADCIQLKPDIIIIHEKGHQPTASTFHTEGNNLADKLATQGSYVVNAGKRTADGSEFEKRTADGSEFESPKKKAKVE

SEQ ID NO: 6781 - protein, 2173 aa, synthetic construct
MPAAKRVKLDGGDKKYSIGLDIGTNSVGWAVITDEYKVPSKKFKVLGNTDRHSIKKNLIGALLFDSGETAEATRLKRTARRRYTRRKNRICYLQEIFSNEMAKVDDSFFHRLEESFLVEEDKKHERHPIFGNIVDEVAYHEKYPTIYHLRKKLVDSTDKADLRLIYLALAHMIKFRGHFLIEGDLNPDNSDVDKLFIQLVQTYNQLFEENPINASGVDAKAILSARLSKSRRLENLIAQLPGEKKNGLFGNLIALSLGLTPNFKSNFDLAEDAKLQLSKDTYDDDLDNLLAQIGDQYADLFLAAKNLSDAILLSDILRVNTEITKAPLSASMIKRYDEHHQDLTLLKALVRQQLPEKYKEIFFDQSKNGYAGYIDGGASQEEFYKFIKPILEKMDGTEELLVKLNREDLLRKQRTFDNGSIPHQIHLGELHAILRRQEDFYPFLKDNREKIEKILTFRIPYYVGPLARGNSRFAWMTRKSEETITPWNFEEVVDKGASAQSFIERMTNFDKNLPNEKVLPKHSLLYEYFTVYNELTKVKYVTEGMRKPAFLSGEQKKAIVDLLFKTNRKVTVKQLKEDYFKKIECFDSVEISGVEDRFNASLGTYHDLLKIIKDKDFLDNEENEDILEDIVLTLTLFEDREMIEERLKTYAHLFDDKVMKQLKRRRYTGWGRLSRKLINGIRDKQSGKTILDFLKSDGFANRNFMQLIHDDSLTFKEDIQKAQVSGQGDSLHEHIANLAGSPAIKKGILQTVKVVDELVKVMGRHKPENIVIEMARENQTTQKGQKNSRERMKRIEEGIKELGSQILKEHPVENTQLQNEKLYLYYLQNGRDMYVDQELDINRLSDYDVDHIVPQSFLKDDSIDNKVLTRSDKARGKSDNVPSEEVVKKMKNYWRQLLNAKLITQRKFDNLTKAERGGLSELDKAGFIKRQLVETRQITKHVAQILDSRMNTKYDENDKLIREVKVITLKSKLVSDFRKDFQFYKVREINNYHHAHDAYLNAVVGTALIKKYPKLESEFVYGDYKVYDVRKMIAKSEQEIGKATAKYFFYSNIMNFFKTEITLANGEIRKRPLIETNGETGEIVWDKGRDFATVRKVLSMPQVNIVKKTEVQTGGFSKESILPKRNSDKLIARKKDWDPKKYGGFDSPTVAYSVLVVAKVEKGKSKKLKSVKELLGITIMERSSFEKNPIDFLEAKGYKEVKKDLIIKLPKYSLFELENGRKRMLASAGELQKGNELALPSKYVNFLYLASHYEKLKGSPEDNEQKQLFVEQHKHYLDEIIEQISEFSKRVILADANLDKVLSAYNKHRDKPIREQAENIIHLFTLTNLGAPAAFKYFDTTIDRKRYTSTKEVLDATLIHQSITGLYETRIDLSQLGGDGGEAAAKPAPGGMDPLQLLQPLEAEIKGTKLKAHWNSGATITCVPQAFLEEEVPIKNIWIKTIHGEKEQPVYYLTFKIQGRKVEAEVISSPYDYILVSPSDIPWLMKKPLQLTTLVPLQEYEERLLKQTMLTGSYKEKLQSLFLKYDALWQHWENQVGHRRIKPHHIATGTVNPRPQKQYPINPKAKASIQTVINDLLKQGVLIQQNSIMNTPVYPVPKPDGKWRMVLDYREVNKTIPLIAAQNQHSAGILSSIFRGKYKTTLDLSNGFWAHSITPESYWLTAFTWLGQQYCWTRLPQGFLNSPALFNADVVDLLKEVPNVQVYVDDIYISHDDPREHLEQLEKVFSLLLNAGYVVSLKKSEIAQHEVEFLGFNITKEGRGLTETFKQKLLNITPPRDLKQLQSILGKLNFARNFIPNFSELVKPLYNIIATAPGKYITWTTDNSQQLQNIISMLNSAENLEERNPEVRLIMKVNTSPSAGYIRFYNEFAKRPIMYLNYVYTKAEVKFTNTEKLLTTIHKGLIKALDLGMGQEILVYSPIVSMTKIQKTPLPERKALPIRWITWMSYLEDPRIQFHYDKTLPELQQVPTVTDDIIAKIKHPSEFSMVFYTDGSAIKHPNVNKSHNAGMGIAQVQFKPEFTVINTWSIPLGDHTAQLAEVAAVEFACKKALKIDGPVLIVTDSFYVAESVNKELPYWQSNGFFNNKKKPLKHVSKWKSIADCIQLKPDIIIIHEKGHQPTASTFHTEGNNLADKLATQGSYVVNAGKRTADGSEFEKRTADGSEFESPKKKAKVE

SEQ ID NO: 6782 - protein, 2091 aa, synthetic construct
MPAAKRVKLDGGDKKYSIGLDIGTNSVGWAVITDEYKVPSKKFKVLGNTDRHSIKKNLIGALLFDSGETAEATRLKRTARRRYTRRKNRICYLQEIFSNEMAKVDDSFFHRLEESFLVEEDKKHERHPIFGNIVDEVAYHEKYPTIYHLRKKLVDSTDKADLRLIYLALAHMIKFRGHFLIEGDLNPDNSDVDKLFIQLVQTYNQLFEENPINASGVDAKAILSARLSKSRRLENLIAQLPGEKKNGLFGNLIALSLGLTPNFKSNFDLAEDAKLQLSKDTYDDDLDNLLAQIGDQYADLFLAAKNLSDAILLSDILRVNTEITKAPLSASMIKRYDEHHQDLTLLKALVRQQLPEKYKEIFFDQSKNGYAGYIDGGASQEEFYKFIKPILEKMDGTEELLVKLNREDLLRKQRTFDNGSIPHQIHLGELHAILRRQEDFYPFLKDNREKIEKILTFRIPYYVGPLARGNSRFAWMTRKSEETITPWNFEEVVDKGASAQSFIERMTNFDKNLPNEKVLPKHSLLYEYFTVYNELTKVKYVTEGMRKPAFLSGEQKKAIVDLLFKTNRKVTVKQLKEDYFKKIECFDSVEISGVEDRFNASLGTYHDLLKIIKDKDFLDNEENEDILEDIVLTLTLFEDREMIEERLKTYAHLFDDKVMKQLKRRRYTGWGRLSRKLINGIRDKQSGKTILDFLKSDGFANRNFMQLIHDDSLTFKEDIQKAQVSGQGDSLHEHIANLAGSPAIKKGILQTVKVVDELVKVMGRHKPENIVIEMARENQTTQKGQKNSRERMKRIEEGIKELGSQILKEHPVENTQLQNEKLYLYYLQNGRDMYVDQELDINRLSDYDVDHIVPQSFLKDDSIDNKVLTRSDKARGKSDNVPSEEVVKKMKNYWRQLLNAKLITQRKFDNLTKAERGGLSELDKAGFIKRQLVETRQITKHVAQILDSRMNTKYDENDKLIREVKVITLKSKLVSDFRKDFQFYKVREINNYHHAHDAYLNAVVGTALIKKYPKLESEFVYGDYKVYDVRKMIAKSEQEIGKATAKYFFYSNIMNFFKTEITLANGEIRKRPLIETNGETGEIVWDKGRDFATVRKVLSMPQVNIVKKTEVQTGGFSKESILPKRNSDKLIARKKDWDPKKYGGFDSPTVAYSVLVVAKVEKGKSKKLKSVKELLGITIMERSSFEKNPIDFLEAKGYKEVKKDLIIKLPKYSLFELENGRKRMLASAGELQKGNELALPSKYVNFLYLASHYEKLKGSPEDNEQKQLFVEQHKHYLDEIIEQISEFSKRVILADANLDKVLSAYNKHRDKPIREQAENIIHLFTLTNLGAPAAFKYFDTTIDRKRYTSTKEVLDATLIHQSITGLYETRIDLSQLGGDGGEAAAKPAPGGVLNLEEEYRLHEKPVPSSIDPSWLQLFPTVWAERAGMGLANQVPPVVVELRSGASPVAVRQYPMSKEAREGIRPHIQRFLDLGVLVPCQSPWNTPLLPVKKPGTNDYRPVQDLREINKRVQDIHPTVPNPYNLLSSLPPSHTWYSVLDLKDAFFCLKLHPNSQPLFAFEWRDPEKGNTGQLTWTRLPQGFKNSPTLFNEALHRDLAPFRALNPQVVLLQYVDDLLVAAPTYRDCKEGTQKLLQELSKLGYRVSAKKAQLCQKEVTYLGYLLKEGKRWLTPARKATVMKIPPPTTPRQVREFLGTAGFCRLWIPGFASLAAPLYPLTKPSIPFIWTEEHQKAFDRIKEALLSAPALALPDLTKPFTLYVDERAGVARGVLTQTLGPWRRPVAYLSKKLDPVASGWPTCLKAVAAVALLLKDADKLTLGQNVTVIASHSLESIVRQPPDRWMTNARMTHYQSLLLNERVSFAPPAVLNPATLLPVESEATPVHRCSEILAEETGTRRDLKDQPLPGVPAWYTDGSSFIAEGKRRAGAAIVDGKRTVWASSLPEGTSAQKAELVALTQALRLAEGKDINIYTDSRYAFATAHIHGAIYKQRGWLTSAGKDIKNKEEILALLEAIHLPKRVAIIHCPGHQKGNDPVATGNRRADEAAKQAALSTRVLAETTKPAGKRTADGSEFEKRTADGSEFESPKKKAKVE

SEQ ID NO: 6783 - protein, 2091 aa, synthetic construct; identical to SEQ ID NO: 4515

SEQ ID NO: 6784 - protein, 2095 aa, synthetic construct
MPAAKRVKLDGGDKKYSIGLDIGTNSVGWAVITDEYKVPSKKFKVLGNTDRHSIKKNLIGALLFDSGETAEATRLKRTARRRYTRRKNRICYLQEIFSNEMAKVDDSFFHRLEESFLVEEDKKHERHPIFGNIVDEVAYHEKYPTIYHLRKKLVDSTDKADLRLIYLALAHMIKFRGHFLIEGDLNPDNSDVDKLFIQLVQTYNQLFEENPINASGVDAKAILSARLSKSRRLENLIAQLPGEKKNGLFGNLIALSLGLTPNFKSNFDLAEDAKLQLSKDTYDDDLDNLLAQIGDQYADLFLAAKNLSDAILLSDILRVNTEITKAPLSASMIKRYDEHHQDLTLLKALVRQQLPEKYKEIFFDQSKNGYAGYIDGGASQEEFYKFIKPILEKMDGTEELLVKLNREDLLRKQRTFDNGSIPHQIHLGELHAILRRQEDFYPFLKDNREKIEKILTFRIPYYVGPLARGNSRFAWMTRKSEETITPWNFEEVVDKGASAQSFIERMTNFDKNLPNEKVLPKHSLLYEYFTVYNELTKVKYVTEGMRKPAFLSGEQKKAIVDLLFKTNRKVTVKQLKEDYFKKIECFDSVEISGVEDRFNASLGTYHDLLKIIKDKDFLDNEENEDILEDIVLTLTLFEDREMIEERLKTYAHLFDDKVMKQLKRRRYTGWGRLSRKLINGIRDKQSGKTILDFLKSDGFANRNFMQLIHDDSLTFKEDIQKAQVSGQGDSLHEHIANLAGSPAIKKGILQTVKVVDELVKVMGRHKPENIVIEMARENQTTQKGQKNSRERMKRIEEGIKELGSQILKEHPVENTQLQNEKLYLYYLQNGRDMYVDQELDINRLSDYDVDHIVPQSFLKDDSIDNKVLTRSDKARGKSDNVPSEEVVKKMKNYWRQLLNAKLITQRKFDNLTKAERGGLSELDKAGFIKRQLVETRQITKHVAQILDSRMNTKYDENDKLIREVKVITLKSKLVSDFRKDFQFYKVREINNYHHAHDAYLNAVVGTALIKKYPKLESEFVYGDYKVYDVRKMIAKSEQEIGKATAKYFFYSNIMNFFKTEITLANGEIRKRPLIETNGETGEIVWDKGRDFATVRKVLSMPQVNIVKKTEVQTGGFSKESILPKRNSDKLIARKKDWDPKKYGGFDSPTVAYSVLVVAKVEKGKSKKLKSVKELLGITIMERSSFEKNPIDFLEAKGYKEVKKDLIIKLPKYSLFELENGRKRMLASAGELQKGNELALPSKYVNFLYLASHYEKLKGSPEDNEQKQLFVEQHKHYLDEIIEQISEFSKRVILADANLDKVLSAYNKHRDKPIREQAENIIHLFTLTNLGAPAAFKYFDTTIDRKRYTSTKEVLDATLIHQSITGLYETRIDLSQLGGDGGPAPEAAAKGGTAPLEEEYRLFLEAPIQNVTLLEQWKREIPKVWAEINPPGLASTQAPIHVQLLSTALPVRVRQYPITLEAKRSLRETIRKFRAAGILRPVHSPWNTPLLPVRKSGTSEYRMVQDLREVNKRVETIHPTVPNPYTLLSLLPPDRIWYSVLDLKDAFFCIPLAPESQLIFAFEWADAEEGESGQLTWTRLPQGFKNSPTLFNEALNRDLQGFRLDHPSVSLLQYVDDLLIAADTQAACLSATRDLLMTLAELGYRVSGKKAQLCQEEVTYLGFKIHKGSRSLSNSRTQAILQIPVPKTKRQVREFLGTIGYCRLWIPGFAELAQPLYAATRPGNDPLVWGEKEEEAFQSLKLALTQPPALALPSLDKPFQLFVEETSGAAKGVLTQALGPWKRPVAYLSKRLDPVAAGWPRCLRAIAAAALLTREASKLTFGQDIEITSSHNLESLLRSPPDKWLTNARITQYQVLLLDPPRVRFKQTAALNPATLLPETDDTLPIHHCLDTLDSLTSTRPDLTDQPLAQAEATLFTDGSSYIRDGKRYAGAAVVTLDSVIWAEPLPIGTSAQKAELIALTKALEWSKDKSVNIYTDSRYAFATLHVHGMIYRERGWLTAGGKAIKNAPEILALLTAVWLPKRVAVMHCKGHQKDDAPTSTGNRRADEVAREVAIRPLSTQATISAGKRTADGSEFEKRTADGSEFESPKKKAKVE

SEQ ID NO: 6785 - protein, 2092 aa, synthetic construct
MPAAKRVKLDGGDKKYSIGLDIGTNSVGWAVITDEYKVPSKKFKVLGNTDRHSIKKNLIGALLFDSGETAEATRLKRTARRRYTRRKNRICYLQEIFSNEMAKVDDSFFHRLEESFLVEEDKKHERHPIFGNIVDEVAYHEKYPTIYHLRKKLVDSTDKADLRLIYLALAHMIKFRGHFLIEGDLNPDNSDVDKLFIQLVQTYNQLFEENPINASGVDAKAILSARLSKSRRLENLIAQLPGEKKNGLFGNLIALSLGLTPNFKSNFDLAEDAKLQLSKDTYDDDLDNLLAQIGDQYADLFLAAKNLSDAILLSDILRVNTEITKAPLSASMIKRYDEHHQDLTLLKALVRQQLPEKYKEIFFDQSKNGYAGYIDGGASQEEFYKFIKPILEKMDGTEELLVKLNREDLLRKQRTFDNGSIPHQIHLGELHAILRRQEDFYPFLKDNREKIEKILTFRIPYYVGPLARGNSRFAWMTRKSEETITPWNFEEVVDKGASAQSFIERMTNFDKNLPNEKVLPKHSLLYEYFTVYNELTKVKYVTEGMRKPAFLSGEQKKAIVDLLFKTNRKVTVKQLKEDYFKKIECFDSVEISGVEDRFNASLGTYHDLLKIIKDKDFLDNEENEDILEDIVLTLTLFEDREMIEERLKTYAHLFDDKVMKQLKRRRYTGWGRLSRKLINGIRDKQSGKTILDFLKSDGFANRNFMQLIHDDSLTFKEDIQKAQVSGQGDSLHEHIANLAGSPAIKKGILQTVKVVDELVKVMGRHKPENIVIEMARENQTTQKGQKNSRERMKRIEEGIKELGSQILKEHPVENTQLQNEKLYLYYLQNGRDMYVDQELDINRLSDYDVDHIVPQSFLKDDSIDNKVLTRSDKARGKSDNVPSEEVVKKMKNYWRQLLNAKLITQRKFDNLTKAERGGLSELDKAGFIKRQLVETRQITKHVAQILDSRMNTKYDENDKLIREVKVITLKSKLVSDFRKDFQFYKVREINNYHHAHDAYLNAVVGTALIKKYPKLESEFVYGDYKVYDVRKMIAKSEQEIGKATAKYFFYSNIMNFFKTEITLANGEIRKRPLIETNGETGEIVWDKGRDFATVRKVLSMPQVNIVKKTEVQTGGFSKESILPKRNSDKLIARKKDWDPKKYGGFDSPTVAYSVLVVAKVEKGKSKKLKSVKELLGITIMERSSFEKNPIDFLEAKGYKEVKKDLIIKLPKYSLFELENGRKRMLASAGELQKGNELALPSKYVNFLYLASHYEKLKGSPEDNEQKQLFVEQHKHYLDEIIEQISEFSKRVILADANLDKVLSAYNKHRDKPIREQAENIIHLFTLTNLGAPAAFKYFDTTIDRKRYTSTKEVLDATLIHQSITGLYETRIDLSQLGGDGGPAPEAAAKGGTLQLEEEYRLFEPESTQKQEMDIWLKNFPQAWAETGGMGTAHCQAPVLIQLKATATPISIRQYPMPHEAYQGIKPHIRRMLDQGILKPCQSPWNTPLLPVKKPGTEDYRPVQDLREVNKRVEDIHPTVPNPYNLLSTLPPSHPWYTVLDLKDAFFCLRLHSESQLLFAFEWRDPEIGLSGQLTWTRLPQGFKNSPTLFNEALHSDLADFRVRYPALVLLQYVDDLLLAAATRTECLEGTKALLETLGNKGYRASAKKAQICLQEVTYLGYSLKDGQRWLTKARKEAILSIPVPKNSRQVREFLGTAGYCRLWIPGFAELAAPLYPLTRPGTLFQWGTEQQLAFEDIKKALLSSPALGLPDITKPFELFIDENSGFAKGVLVQKLGPWKRPVAYLSKKLDTVASGWPPCLRMVAAIAILVKDAGKLTLGQPLTILTSHPVEALVRQPPNKWLSNARMTHYQAMLLDAERVHFGPTVSLNPATLLPLPSGGNHHDCLQILAETHGTRPDLTDQPLPDADLTWYTDGSSFIRNGEREAGAAVTTESEVIWAAPLPPGTSAQRAELIALTQALKMAEGKKLTVYTDSRYAFATTHVHGEIYRRRGWLTSEGKEIKNKNEILALLEALFLPKRLSIIHCPGHQKGDSPQAKGNRLADDTAKKAATETHSSLTVLPAGKRTADGSEFEKRTADGSEFESPKKKAKVE

SEQ ID NO: 6786 - protein, 2124 aa, synthetic construct
MPAAKRVKLDGGDKKYSIGLDIGTNSVGWAVITDEYKVPSKKFKVLGNTDRHSIKKNLIGALLFDSGETAEATRLKRTARRRYTRRKNRICYLQEIFSNEMAKVDDSFFHRLEESFLVEEDKKHERHPIFGNIVDEVAYHEKYPTIYHLRKKLVDSTDKADLRLIYLALAHMIKFRGHFLIEGDLNPDNSDVDKLFIQLVQTYNQLFEENPINASGVDAKAILSARLSKSRRLENLIAQLPGEKKNGLFGNLIALSLGLTPNFKSNFDLAEDAKLQLSKDTYDDDLDNLLAQIGDQYADLFLAAKNLSDAILLSDILRVNTEITKAPLSASMIKRYDEHHQDLTLLKALVRQQLPEKYKEIFFDQSKNGYAGYIDGGASQEEFYKFIKPILEKMDGTEELLVKLNREDLLRKQRTFDNGSIPHQIHLGELHAILRRQEDFYPFLKDNREKIEKILTFRIPYYVGPLARGNSRFAWMTRKSEETITPWNFEEVVDKGASAQSFIERMTNFDKNLPNEKVLPKHSLLYEYFTVYNELTKVKYVTEGMRKPAFLSGEQKKAIVDLLFKTNRKVTVKQLKEDYFKKIECFDSVEISGVEDRFNASLGTYHDLLKIIKDKDFLDNEENEDILEDIVLTLTLFEDREMIEERLKTYAHLFDDKVMKQLKRRRYTGWGRLSRKLINGIRDKQSGKTILDFLKSDGFANRNFMQLIHDDSLTFKEDIQKAQVSGQGDSLHEHIANLAGSPAIKKGILQTVKVVDELVKVMGRHKPENIVIEMARENQTTQKGQKNSRERMKRIEEGIKELGSQILKEHPVENTQLQNEKLYLYYLQNGRDMYVDQELDINRLSDYDVDHIVPQSFLKDDSIDNKVLTRSDKARGKSDNVPSEEVVKKMKNYWRQLLNAKLITQRKFDNLTKAERGGLSELDKAGFIKRQLVETRQITKHVAQILDSRMNTKYDENDKLIREVKVITLKSKLVSDFRKDFQFYKVREINNYHHAHDAYLNAVVGTALIKKYPKLESEFVYGDYKVYDVRKMIAKSEQEIGKATAKYFFYSNIMNFFKTEITLANGEIRKRPLIETNGETGEIVWDKGRDFATVRKVLSMPQVNIVKKTEVQTGGFSKESILPKRNSDKLIARKKDWDPKKYGGFDSPTVAYSVLVVAKVEKGKSKKLKSVKELLGITIMERSSFEKNPIDFLEAKGYKEVKKDLIIKLPKYSLFELENGRKRMLASAGELQKGNELALPSKYVNFLYLASHYEKLKGSPEDNEQKQLFVEQHKHYLDEIIEQISEFSKRVILADANLDKVLSAYNKHRDKPIREQAENIIHLFTLTNLGAPAAFKYFDTTIDRKRYTSTKEVLDATLIHQSITGLYETRIDLSQLGGDGGPAPEAAAKGGLLGRDLLTKLKAQIQFSTEGPQVTWEDRPAMCLVLNLEEEYRLHEKPVPPSIDPSWLQLFPMVWAEKAGMGLANQVPPVVVELKSDASPVAVRQYPMSKEAREGIRPHIQRFLDLGILVPCQSPWNTPLLPVKKPGTNDYRPVQDLREVNKRVQDIHPTVPNPYNLLSSLPPSHTWYSVLDLKDAFFCLKLHPNSQPLFAFEWRDPEKGNTGQLTWTRLPQGFKNSPTLFNEALHRDLASFRALNPQVVMLQYVDDLLVAAPTYRDCKEGTRRLLQELSKLGYRVSAKKAQLCREEVTYLGYLLKGGKRWLTPARKATVMKIPTPTTPRQVREFLGTAGFCRLWIPGFASLAAPLYPLTRPKVPFTWTEAHQEAFGRIKEALLSAPALALPDLTKPFALYVDEKEGVARGVLTQTLGPWRRPVAYLSKKLDPVASGWPTCLKAIAAVALLLKDADKLTLGQNVLVIAPHNLESIVRQPPDRWMTNARMTHYQSLLLNERVSFAPPAILNPATLLPVESDDTPIHICSEILAEETGTRPDLRDQPLPGVPAWYTDGSSFIMDGRRQAGAAIVDNKRTVWASNLPEGTSAQKAELIALTQALRLAEGKSINIYTDSRYAFATAHVHGAIYKQRGWLTSAGKDIKNKEEILALLEAIHLPKRVAIIHCPGHQRGTDPVATGNRKADEAAKQAAQSTRILTETTKNAGKRTADGSEFEKRTADGSEFESPKKKAKVE

SEQ ID NO: 6787 - protein, 2215 aa, synthetic construct
MPAAKRVKLDGGDKKYSIGLDIGTNSVGWAVITDEYKVPSKKFKVLGNTDRHSIKKNLIGALLFDSGETAEATRLKRTARRRYTRRKNRICYLQEIFSNEMAKVDDSFFHRLEESFLVEEDKKHERHPIFGNIVDEVAYHEKYPTIYHLRKKLVDSTDKADLRLIYLALAHMIKFRGHFLIEGDLNPDNSDVDKLFIQLVQTYNQLFEENPINASGVDAKAILSARLSKSRRLENLIAQLPGEKKNGLFGNLIALSLGLTPNFKSNFDLAEDAKLQLSKDTYDDDLDNLLAQIGDQYADLFLAAKNLSDAILLSDILRVNTEITKAPLSASMIKRYDEHHQDLTLLKALVRQQLPEKYKEIFFDQSKNGYAGYIDGGASQEEFYKFIKPILEKMDGTEELLVKLNREDLLRKQRTFDNGSIPHQIHLGELHAILRRQEDFYPFLKDNREKIEKILTFRIPYYVGPLARGNSRFAWMTRKSEETITPWNFEEVVDKGASAQSFIERMTNFDKNLPNEKVLPKHSLLYEYFTVYNELTKVKYVTEGMRKPAFLSGEQKKAIVDLLFKTNRKVTVKQLKEDYFKKIECFDSVEISGVEDRFNASLGTYHDLLKIIKDKDFLDNEENEDILEDIVLTLTLFEDREMIEERLKTYAHLFDDKVMKQLKRRRYTGWGRLSRKLINGIRDKQSGKTILDFLKSDGFANRNFMQLIHDDSLTFKEDIQKAQVSGQGDSLHEHIANLAGSPAIKKGILQTVKVVDELVKVMGRHKPENIVIEMARENQTTQKGQKNSRERMKRIEEGIKELGSQILKEHPVENTQLQNEKLYLYYLQNGRDMYVDQELDINRLSDYDVDHIVPQSFLKDDSIDNKVLTRSDKARGKSDNVPSEEVVKKMKNYWRQLLNAKLITQRKFDNLTKAERGGLSELDKAGFIKRQLVETRQITKHVAQILDSRMNTKYDENDKLIREVKVITLKSKLVSDFRKDFQFYKVREINNYHHAHDAYLNAVVGTALIKKYPKLESEFVYGDYKVYDVRKMIAKSEQEIGKATAKYFFYSNIMNFFKTEITLANGEIRKRPLIETNGETGEIVWDKGRDFATVRKVLSMPQVNIVKKTEVQTGGFSKESILPKRNSDKLIARKKDWDPKKYGGFDSPTVAYSVLVVAKVEKGKSKKLKSVKELLGITIMERSSFEKNPIDFLEAKGYKEVKKDLIIKLPKYSLFELENGRKRMLASAGELQKGNELALPSKYVNFLYLASHYEKLKGSPEDNEQKQLFVEQHKHYLDEIIEQISEFSKRVILADANLDKVLSAYNKHRDKPIREQAENIIHLFTLTNLGAPAAFKYFDTTIDRKRYTSTKEVLDATLIHQSITGLYETRIDLSQLGGDGGPAPEAAAKGGTLGDQGSRGSDPLPEPRVTLTVEGIPTEFLVNTGAEHSVLTKPMGKMGSKRTVVAGATGSKVYPWTTKRLLKIGQKQVTHSFLVIPECPAPLLGRDLLTKLKAQIQFSTEGPQVTWEDRPAMCLVLNLEEEYRLHEKPVPPSIDPSWLQLFPMVWAEKAGMGLANQVPPVVVELKSDASPVAVRQYPMSKEAREGIRPHIQRFLDLGILVPCQSPWNTPLLPVKKPGTNDYRPVQDLREVNKRVQDIHPTVPNPYNLLSSLPPSHTWYSVLDLKDAFFCLKLHPNSQPLFAFEWRDPEKGNTGQLTWTRLPQGFKNSPTLFNEALHRDLASFRALNPQVVMLQYVDDLLVAAPTYRDCKEGTRRLLQELSKLGYRVSAKKAQLCREEVTYLGYLLKGGKRWLTPARKATVMKIPTPTTPRQVREFLGKAGFCRLFIPGFASLAAPLYPLTRPKVPFTWTEAHQEAFGRIKEALLSAPALALPDLTKPFALYVDEKEGVARGVLTQTLGPWRRPVAYLSKKLDPVASGWPTCLKAIAAVALLLKDADKLTLGQNVLVIAPHNLESIVRQPPDRWMTNARMTHYQSLLLNERVSFAPPAILNPATLLPVESDDTPIHICSEILAEETGTRPDLRDQPLPGVPAWYTDGSSFIMDGRRQAGAAIVDNKRTVWASNLPEGTSAQKAELIALTQALRLAEGKSINIYTDSRYAFATAHVHGAIYKQRGWLTSAGKDIKNKEEILALLEAIHLPKRVAIIHCPGHQRGTDPVATGNRKADEAAKQAAQSTRILTETTKNAGKRTADGSEFEKRTADGSEFESPKKKAKVE

SEQ ID NO: 6788 - protein, 2093 aa, synthetic construct; identical to SEQ ID NO: 4516

SEQ ID NO: 6789 - protein, 2093 aa, synthetic construct
MPAAKRVKLDGGDKKYSIGLDIGTNSVGWAVITDEYKVPSKKFKVLGNTDRHSIKKNLIGALLFDSGETAEATRLKRTARRRYTRRKNRICYLQEIFSNEMAKVDDSFFHRLEESFLVEEDKKHERHPIFGNIVDEVAYHEKYPTIYHLRKKLVDSTDKADLRLIYLALAHMIKFRGHFLIEGDLNPDNSDVDKLFIQLVQTYNQLFEENPINASGVDAKAILSARLSKSRRLENLIAQLPGEKKNGLFGNLIALSLGLTPNFKSNFDLAEDAKLQLSKDTYDDDLDNLLAQIGDQYADLFLAAKNLSDAILLSDILRVNTEITKAPLSASMIKRYDEHHQDLTLLKALVRQQLPEKYKEIFFDQSKNGYAGYIDGGASQEEFYKFIKPILEKMDGTEELLVKLNREDLLRKQRTFDNGSIPHQIHLGELHAILRRQEDFYPFLKDNREKIEKILTFRIPYYVGPLARGNSRFAWMTRKSEETITPWNFEEVVDKGASAQSFIERMTNFDKNLPNEKVLPKHSLLYEYFTVYNELTKVKYVTEGMRKPAFLSGEQKKAIVDLLFKTNRKVTVKQLKEDYFKKIECFDSVEISGVEDRFNASLGTYHDLLKIIKDKDFLDNEENEDILEDIVLTLTLFEDREMIEERLKTYAHLFDDKVMKQLKRRRYTGWGRLSRKLINGIRDKQSGKTILDFLKSDGFANRNFMQLIHDDSLTFKEDIQKAQVSGQGDSLHEHIANLAGSPAIKKGILQTVKVVDELVKVMGRHKPENIVIEMARENQTTQKGQKNSRERMKRIEEGIKELGSQILKEHPVENTQLQNEKLYLYYLQNGRDMYVDQELDINRLSDYDVDHIVPQSFLKDDSIDNKVLTRSDKARGKSDNVPSEEVVKKMKNYWRQLLNAKLITQRKFDNLTKAERGGLSELDKAGFIKRQLVETRQITKHVAQILDSRMNTKYDENDKLIREVKVITLKSKLVSDFRKDFQFYKVREINNYHHAHDAYLNAVVGTALIKKYPKLESEFVYGDYKVYDVRKMIAKSEQEIGKATAKYFFYSNIMNFFKTEITLANGEIRKRPLIETNGETGEIVWDKGRDFATVRKVLSMPQVNIVKKTEVQTGGFSKESILPKRNSDKLIARKKDWDPKKYGGFDSPTVAYSVLVVAKVEKGKSKKLKSVKELLGITIMERSSFEKNPIDFLEAKGYKEVKKDLIIKLPKYSLFELENGRKRMLASAGELQKGNELALPSKYVNFLYLASHYEKLKGSPEDNEQKQLFVEQHKHYLDEIIEQISEFSKRVILADANLDKVLSAYNKHRDKPIREQAENIIHLFTLTNLGAPAAFKYFDTTIDRKRYTSTKEVLDATLIHQSITGLYETRIDLSQLGGDGGPAPEAAAKGGTLNIEDEYRLHETSKEPDVSLGSTWLSDFPQAWAETGGMGLAVRQAPLIIPLKATSTPVSIKQYPMSQEARLGIKPHIQRLLDQGILVPCQSPWNTPLLPVKKPGTNDYRPVQDLREVNKRVEDIHPTVPNPYNLLSGLPPSHQWYTVLDLKDAFFCLRLHPTSQPLFAFEWRDPEMGISGQLTWTRLPQGFKNSPTLFNEALHRDLAGFRIQHPDLILLQYVDDLLLAATSELDCQQGTRALLQTLGDLGYRASAKKAQICQKQVKYLGYLLKEGQRWLTEARKETVMGQPIPKTPRQLREFLGTAGFCRLWIPGFAEMAAPLYPLTKPGTLFNWGPDQQKAFQEIKQALLTAPALGLPDLTKPFELFVDEKQGYAKGVLTQKLGPWRRPVAYLSKKLDPVAAGWPPCLRMVAAIAVLTKDAGKLTMGQPLVILAPHAVEALVKQPPDRWLSNARMTHYQALLLDTDRVQFGPVVALNPATLLPLPEEGLQHDCLDILAEAHGTRSDLMDQPLPDADHTWYTDGSSFLQEGQRKAGAAVTTETEVIWARALPAGTSAQRAELIALTQALKMAEGKKLNVYTDSRYAFATAHIHGEIYRRRGWLTSEGKEIKNKDEILALLKALFLPKRLSIIHCPGHQKGNSAEARGNRMADQAAREVATRETPETSTLLAGKRTADGSEFEKRTADGSEFESPKKKAKVE

SEQ ID NO: 6790 - protein, 2113 aa, synthetic construct
MPAAKRVKLDGGDKKYSIGLDIGTNSVGWAVITDEYKVPSKKFKVLGNTDRHSIKKNLIGALLFDSGETAEATRLKRTARRRYTRRKNRICYLQEIFSNEMAKVDDSFFHRLEESFLVEEDKKHERHPIFGNIVDEVAYHEKYPTIYHLRKKLVDSTDKADLRLIYLALAHMIKFRGHFLIEGDLNPDNSDVDKLFIQLVQTYNQLFEENPINASGVDAKAILSARLSKSRRLENLIAQLPGEKKNGLFGNLIALSLGLTPNFKSNFDLAEDAKLQLSKDTYDDDLDNLLAQIGDQYADLFLAAKNLSDAILLSDILRVNTEITKAPLSASMIKRYDEHHQDLTLLKALVRQQLPEKYKEIFFDQSKNGYAGYIDGGASQEEFYKFIKPILEKMDGTEELLVKLNREDLLRKQRTFDNGSIPHQIHLGELHAILRRQEDFYPFLKDNREKIEKILTFRIPYYVGPLARGNSRFAWMTRKSEETITPWNFEEVVDKGASAQSFIERMTNFDKNLPNEKVLPKHSLLYEYFTVYNELTKVKYVTEGMRKPAFLSGEQKKAIVDLLFKTNRKVTVKQLKEDYFKKIECFDSVEISGVEDRFNASLGTYHDLLKIIKDKDFLDNEENEDILEDIVLTLTLFEDREMIEERLKTYAHLFDDKVMKQLKRRRYTGWGRLSRKLINGIRDKQSGKTILDFLKSDGFANRNFMQLIHDDSLTFKEDIQKAQVSGQGDSLHEHIANLAGSPAIKKGILQTVKVVDELVKVMGRHKPENIVIEMARENQTTQKGQKNSRERMKRIEEGIKELGSQILKEHPVENTQLQNEKLYLYYLQNGRDMYVDQELDINRLSDYDVDHIVPQSFLKDDSIDNKVLTRSDKARGKSDNVPSEEVVKKMKNYWRQLLNAKLITQRKFDNLTKAERGGLSELDKAGFIKRQLVETRQITKHVAQILDSRMNTKYDENDKLIREVKVITLKSKLVSDFRKDFQFYKVREINNYHHAHDAYLNAVVGTALIKKYPKLESEFVYGDYKVYDVRKMIAKSEQEIGKATAKYFFYSNIMNFFKTEITLANGEIRKRPLIETNGETGEIVWDKGRDFATVRKVLSMPQVNIVKKTEVQTGGFSKESILPKRNSDKLIARKKDWDPKKYGGFDSPTVAYSVLVVAKVEKGKSKKLKSVKELLGITIMERSSFEKNPIDFLEAKGYKEVKKDLIIKLPKYSLFELENGRKRMLASAGELQKGNELALPSKYVNFLYLASHYEKLKGSPEDNEQKQLFVEQHKHYLDEIIEQISEFSKRVILADANLDKVLSAYNKHRDKPIREQAENIIHLFTLTNLGAPAAFKYFDTTIDRKRYTSTKEVLDATLIHQSITGLYETRIDLSQLGGDGGPAPEAAAKGGVQEISDSRPMLHIYLNGRRFLGLLDTGADKTCIAGRDWPANWPIHQTESSLQGLGMACGVARSSQPLRWQHEDKSGIIHPFVIPTLPFTLWGRDIMKDIKVRLMTDSPDDSQDLMIGAIESNLFADQISWKSDQPVWLNQWPLKQEKLQALQQLVTEQLQLGHLEESNSPWNTPVFVIKKKSGKWRLLQDLRAVNATMHDMGALQPGLPSPVAVPKGWEIIIIDLQDCFFNIKLHPEDCKRFAFSVPSPNFKRPYQRFQWKVLPQGMKNSPTLCQKFVDKAILTVRDKYQDSYIVHYMDDILLAHPSRSIVDEILTSMIQALNKHGLVVSTEKIQKYDNLKYLGTHIQGDSVSYQKLQIRTDKLRTLNDFQKLLGNINWIRPFLKLTTGELKPLFEILNPDSNPISTRKLTPEACKALQLMNERLSTARVKRLDLSQPWSLCILKTEYTPTACLWQDGVVEWIHLPHISPKVITPYDIFCTQLIIKGRHRSKELFSKDPDYIVVPYTKVQFDLLLQEKEDWPISLLGFLGEVHFHLPKDPLLTFTLQTAIIFPHMTSTTPLEKGIVIFTDGSANGRSVTYIQGREPIIKENTQNTAQQAEIVAVITAFEEVSQPFNLYTDSKYVTGLFPEIETATLSPRTKIYTELKHLQRLIHKRQEKFYIGHIRGHTGLPGPLAQGNAYADSLTRILTAAGKRTADGSEFEKRTADGSEFESPKKKAKVE

SEQ ID NO: 6791 - protein, 2085 aa, synthetic construct
MPAAKRVKLDGGDKKYSIGLDIGTNSVGWAVITDEYKVPSKKFKVLGNTDRHSIKKNLIGALLFDSGETAEATRLKRTARRRYTRRKNRICYLQEIFSNEMAKVDDSFFHRLEESFLVEEDKKHERHPIFGNIVDEVAYHEKYPTIYHLRKKLVDSTDKADLRLIYLALAHMIKFRGHFLIEGDLNPDNSDVDKLFIQLVQTYNQLFEENPINASGVDAKAILSARLSKSRRLENLIAQLPGEKKNGLFGNLIALSLGLTPNFKSNFDLAEDAKLQLSKDTYDDDLDNLLAQIGDQYADLFLAAKNLSDAILLSDILRVNTEITKAPLSASMIKRYDEHHQDLTLLKALVRQQLPEKYKEIFFDQSKNGYAGYIDGGASQEEFYKFIKPILEKMDGTEELLVKLNREDLLRKQRTFDNGSIPHQIHLGELHAILRRQEDFYPFLKDNREKIEKILTFRIPYYVGPLARGNSRFAWMTRKSEETITPWNFEEVVDKGASAQSFIERMTNFDKNLPNEKVLPKHSLLYEYFTVYNELTKVKYVTEGMRKPAFLSGEQKKAIVDLLFKTNRKVTVKQLKEDYFKKIECFDSVEISGVEDRFNASLGTYHDLLKIIKDKDFLDNEENEDILEDIVLTLTLFEDREMIEERLKTYAHLFDDKVMKQLKRRRYTGWGRLSRKLINGIRDKQSGKTILDFLKSDGFANRNFMQLIHDDSLTFKEDIQKAQVSGQGDSLHEHIANLAGSPAIKKGILQTVKVVDELVKVMGRHKPENIVIEMARENQTTQKGQKNSRERMKRIEEGIKELGSQILKEHPVENTQLQNEKLYLYYLQNGRDMYVDQELDINRLSDYDVDHIVPQSFLKDDSIDNKVLTRSDKARGKSDNVPSEEVVKKMKNYWRQLLNAKLITQRKFDNLTKAERGGLSELDKAGFIKRQLVETRQITKHVAQILDSRMNTKYDENDKLIREVKVITLKSKLVSDFRKDFQFYKVREINNYHHAHDAYLNAVVGTALIKKYPKLESEFVYGDYKVYDVRKMIAKSEQEIGKATAKYFFYSNIMNFFKTEITLANGEIRKRPLIETNGETGEIVWDKGRDFATVRKVLSMPQVNIVKKTEVQTGGFSKESILPKRNSDKLIARKKDWDPKKYGGFDSPTVAYSVLVVAKVEKGKSKKLKSVKELLGITIMERSSFEKNPIDFLEAKGYKEVKKDLIIKLPKYSLFELENGRKRMLASAGELQKGNELALPSKYVNFLYLASHYEKLKGSPEDNEQKQLFVEQHKHYLDEIIEQISEFSKRVILADANLDKVLSAYNKHRDKPIREQAENIIHLFTLTNLGAPAAFKYFDTTIDRKRYTSTKEVLDATLIHQSITGLYETRIDLSQLGGDGGPAPEAAAKGGLDDEYRLYSPLVKPDQNIQFWLEQFPQAWAETAGMGLAKQVPPQVIQLKASATPVSVRQYPLSKEAQEGIRPHVQRLIQQGILVPVQSPWNTPLLPVRKPGTNDYRPVQDLREVNKRVQDIHPTVPNPYNLLCALPPQRSWYTVLDLKDAFFCLRLHPTSQPLFAFEWRDPGTGRTGQLTWTRLPQGFKNSPTIFNEALHRDLANFRIQHPQVTLLQYVDDLLLAGATKQDCLEGTKALLLELSDLGYRASAKKAQICRREVTYLGYSLRDGQRWLTEARKKTVVQIPAPTTAKQVREFLGKAGFCRLFIPGFATLAAPLYPLTKPKGEFSWAPEHQKAFDAIKKALLSAPALALPDVTKPFTLYVDERKGVARGVLTQTLGPWRRPVAYLSKKLDPVASGWPVCLKAIAAVAILVKDADKLTLGQNITVIAPHALENIVRQPPDRWMTNARMTHYQSLLLTERVTFAPPAALNPATLLPEETDEPVTHDCHQLLIEETGVRKDLTDIPLTGEVLTWFTDGSSYVVEGKRMAGAAVVDGTRTIWASSLPEGTSAQKAELMALTQALRLAEGKSINIYTDSRYAFATAHVHGAIYKQRGWLTSAGREIKNKEEILSLLEALHLPKRLAIIHCPGHQKAKDPISRGNQMADRVAKQAAQGVNLLPAGKRTADGSEFEKRTADGSEFESPKKKAKVE

SEQ ID NO: 6792 - protein, 2087 aa, synthetic construct
MPAAKRVKLDGGDKKYSIGLDIGTNSVGWAVITDEYKVPSKKFKVLGNTDRHSIKKNLIGALLFDSGETAEATRLKRTARRRYTRRKNRICYLQEIFSNEMAKVDDSFFHRLEESFLVEEDKKHERHPIFGNIVDEVAYHEKYPTIYHLRKKLVDSTDKADLRLIYLALAHMIKFRGHFLIEGDLNPDNSDVDKLFIQLVQTYNQLFEENPINASGVDAKAILSARLSKSRRLENLIAQLPGEKKNGLFGNLIALSLGLTPNFKSNFDLAEDAKLQLSKDTYDDDLDNLLAQIGDQYADLFLAAKNLSDAILLSDILRVNTEITKAPLSASMIKRYDEHHQDLTLLKALVRQQLPEKYKEIFFDQSKNGYAGYIDGGASQEEFYKFIKPILEKMDGTEELLVKLNREDLLRKQRTFDNGSIPHQIHLGELHAILRRQEDFYPFLKDNREKIEKILTFRIPYYVGPLARGNSRFAWMTRKSEETITPWNFEEVVDKGASAQSFIERMTNFDKNLPNEKVLPKHSLLYEYFTVYNELTKVKYVTEGMRKPAFLSGEQKKAIVDLLFKTNRKVTVKQLKEDYFKKIECFDSVEISGVEDRFNASLGTYHDLLKIIKDKDFLDNEENEDILEDIVLTLTLFEDREMIEERLKTYAHLFDDKVMKQLKRRRYTGWGRLSRKLINGIRDKQSGKTILDFLKSDGFANRNFMQLIHDDSLTFKEDIQKAQVSGQGDSLHEHIANLAGSPAIKKGILQTVKVVDELVKVMGRHKPENIVIEMARENQTTQKGQKNSRERMKRIEEGIKELGSQILKEHPVENTQLQNEKLYLYYLQNGRDMYVDQELDINRLSDYDVDHIVPQSFLKDDSIDNKVLTRSDKARGKSDNVPSEEVVKKMKNYWRQLLNAKLITQRKFDNLTKAERGGLSELDKAGFIKRQLVETRQITKHVAQILDSRMNTKYDENDKLIREVKVITLKSKLVSDFRKDFQFYKVREINNYHHAHDAYLNAVVGTALIKKYPKLESEFVYGDYKVYDVRKMIAKSEQEIGKATAKYFFYSNIMNFFKTEITLANGEIRKRPLIETNGETGEIVWDKGRDFATVRKVLSMPQVNIVKKTEVQTGGFSKESILPKRNSDKLIARKKDWDPKKYGGFDSPTVAYSVLVVAKVEKGKSKKLKSVKELLGITIMERSSFEKNPIDFLEAKGYKEVKKDLIIKLPKYSLFELENGRKRMLASAGELQKGNELALPSKYVNFLYLASHYEKLKGSPEDNEQKQLFVEQHKHYLDEIIEQISEFSKRVILADANLDKVLSAYNKHRDKPIREQAENIIHLFTLTNLGAPAAFKYFDTTIDRKRYTSTKEVLDATLIHQSITGLYETRIDLSQLGGDGGPAPEAAAKGGTLQLDDEYRLYSPLVKPDQNIQFWLEQFPQAWAETAGMGLAKQVPPQVIQLKASATPVSVRQYPLSKEAQEGIRPHVQRLIQQGILVPVQSPWNTPLLPVRKPGTNDYRPVQDLREVNKRVQDIHPTVPNPYNLLCALPPQRSWYTVLDLKDAFFCLRLHPTSQPLFAFEWRDPGTGRTGQLTWTRLPQGFKNSPTIFDEALHRDLANFRIQHPQVTLLQYVDDLLLAGATKQDCLEGTKALLLELSDLGYRASAKKAQICRREVTYLGYSLRDGQRWLTEARKKTVVQIPAPTTAKQVREFLGTAGFCRLWIPGFATLAAPLYPLTKEKGEFSWAPEHQKAFDAIKKALLSAPALALPDVTKPFTLYVDERKGVARGVLTQTLGPWRRPVAYLSKKLDPVASGWPVCLKAIAAVAILVKDADKLTLGQNITVIAPHALENIVRQPPDRWMTNARMTHYQSLLLTERVTFAPPAALNPATLLPEETDEPVTHDCHQLLIEETGVRKDLTDIPLTGEVLTWFTDGSSYVVEGKRMAGAAVVDGTRTIWASSLPEGTSAQKAELMALTQALRLAEGKSINIYTDSRYAFATAHVHGAIYKQRGLLTSAGREIKNKEEILSLLEALHLPKRLAIIHCPGHQKAKDPISRGNQMADRVAKQAAQGVNLLAGKRTADGSEFEKRTADGSEFESPKKKAKVE

SEQ ID NO: 6793 - protein, 2085 aa, synthetic construct; identical to SEQ ID NO: 6791

SEQ ID NO: 6794 - protein, 2087 aa, synthetic construct; identical to SEQ ID NO: 6792

SEQ ID NO: 6795 - protein, 2091 aa, synthetic construct
MPAAKRVKLDGGDKKYSIGLDIGTNSVGWAVITDEYKVPSKKFKVLGNTDRHSIKKNLIGALLFDSGETAEATRLKRTARRRYTRRKNRICYLQEIFSNEMAKVDDSFFHRLEESFLVEEDKKHERHPIFGNIVDEVAYHEKYPTIYHLRKKLVDSTDKADLRLIYLALAHMIKFRGHFLIEGDLNPDNSDVDKLFIQLVQTYNQLFEENPINASGVDAKAILSARLSKSRRLENLIAQLPGEKKNGLFGNLIALSLGLTPNFKSNFDLAEDAKLQLSKDTYDDDLDNLLAQIGDQYADLFLAAKNLSDAILLSDILRVNTEITKAPLSASMIKRYDEHHQDLTLLKALVRQQLPEKYKEIFFDQSKNGYAGYIDGGASQEEFYKFIKPILEKMDGTEELLVKLNREDLLRKQRTFDNGSIPHQIHLGELHAILRRQEDFYPFLKDNREKIEKILTFRIPYYVGPLARGNSRFAWMTRKSEETITPWNFEEVVDKGASAQSFIERMTNFDKNLPNEKVLPKHSLLYEYFTVYNELTKVKYVTEGMRKPAFLSGEQKKAIVDLLFKTNRKVTVKQLKEDYFKKIECFDSVEISGVEDRFNASLGTYHDLLKIIKDKDFLDNEENEDILEDIVLTLTLFEDREMIEERLKTYAHLFDDKVMKQLKRRRYTGWGRLSRKLINGIRDKQSGKTILDFLKSDGFANRNFMQLIHDDSLTFKEDIQKAQVSGQGDSLHEHIANLAGSPAIKKGILQTVKVVDELVKVMGRHKPENIVIEMARENQTTQKGQKNSRERMKRIEEGIKELGSQILKEHPVENTQLQNEKLYLYYLQNGRDMYVDQELDINRLSDYDVDHIVPQSFLKDDSIDNKVLTRSDKARGKSDNVPSEEVVKKMKNYWRQLLNAKLITQRKFDNLTKAERGGLSELDKAGFIKRQLVETRQITKHVAQILDSRMNTKYDENDKLIREVKVITLKSKLVSDFRKDFQFYKVREINNYHHAHDAYLNAVVGTALIKKYPKLESEFVYGDYKVYDVRKMIAKSEQEIGKATAKYFFYSNIMNFFKTEITLANGEIRKRPLIETNGETGEIVWDKGRDFATVRKVLSMPQVNIVKKTEVQTGGFSKESILPKRNSDKLIARKKDWDPKKYGGFDSPTVAYSVLVVAKVEKGKSKKLKSVKELLGITIMERSSFEKNPIDFLEAKGYKEVKKDLIIKLPKYSLFELENGRKRMLASAGELQKGNELALPSKYVNFLYLASHYEKLKGSPEDNEQKQLFVEQHKHYLDEIIEQISEFSKRVILADANLDKVLSAYNKHRDKPIREQAENIIHLFTLTNLGAPAAFKYFDTTIDRKRYTSTKEVLDATLIHQSITGLYETRIDLSQLGGDGGPAPEAAAKGGVLNLEEEYRLHEKPVPSSIDPSWLQLFPTVWAERAGMGLANQVPPVVVELRSGASPVAVRQYPMSKEAREGIRPHIQRFLDLGVLVPCQSPWNTPLLPVKKPGTNDYRPVQDLREINKRVQDIHPTVPNPYNLLSSLPPSHTWYSVLDLKDAFFCLKLHPNSQPLFAFEWRDPEKGNTGQLTWTRLPQGFKNSPTLFDEALHRDLAPFRALNPQVVLLQYVDDLLVAAPTYRDCKEGTQKLLQELSKLGYRVSAKKAQLCQKEVTYLGYLLKEGKRWLTPARKATVMKIPPPTTPRQVREFLGTAGFCRLWIPGFASLAAPLYPLTKESIPFIWTEEHQKAFDRIKEALLSAPALALPDLTKPFTLYVDERAGVARGVLTQTLGPWRRPVAYLSKKLDPVASGWPTCLKAVAAVALLLKDADKLTLGQNVTVIASHSLESIVRQPPDRWMTNARMTHYQSLLLNERVSFAPPAVLNPATLLPVESEATPVHRCSEILAEETGTRRDLKDQPLPGVPAWYTDGSSFIAEGKRRAGAAIVDGKRTVWASSLPEGTSAQKAELVALTQALRLAEGKDINIYTDSRYAFATAHIHGAIYKQRGLLTSAGKDIKNKEEILALLEAIHLPKRVAIIHCPGHQKGNDPVATGNRRADEAAKQAALSTRVLAETTKPAGKRTADGSEFEKRTADGSEFESPKKKAKVE

SEQ ID NO: 6796 - protein, 2093 aa, synthetic construct
MPAAKRVKLDGGDKKYSIGLDIGTNSVGWAVITDEYKVPSKKFKVLGNTDRHSIKKNLIGALLFDSGETAEATRLKRTARRRYTRRKNRICYLQEIFSNEMAKVDDSFFHRLEESFLVEEDKKHERHPIFGNIVDEVAYHEKYPTIYHLRKKLVDSTDKADLRLIYLALAHMIKFRGHFLIEGDLNPDNSDVDKLFIQLVQTYNQLFEENPINASGVDAKAILSARLSKSRRLENLIAQLPGEKKNGLFGNLIALSLGLTPNFKSNFDLAEDAKLQLSKDTYDDDLDNLLAQIGDQYADLFLAAKNLSDAILLSDILRVNTEITKAPLSASMIKRYDEHHQDLTLLKALVRQQLPEKYKEIFFDQSKNGYAGYIDGGASQEEFYKFIKPILEKMDGTEELLVKLNREDLLRKQRTFDNGSIPHQIHLGELHAILRRQEDFYPFLKDNREKIEKILTFRIPYYVGPLARGNSRFAWMTRKSEETITPWNFEEVVDKGASAQSFIERMTNFDKNLPNEKVLPKHSLLYEYFTVYNELTKVKYVTEGMRKPAFLSGEQKKAIVDLLFKTNRKVTVKQLKEDYFKKIECFDSVEISGVEDRFNASLGTYHDLLKIIKDKDFLDNEENEDILEDIVLTLTLFEDREMIEERLKTYAHLFDDKVMKQLKRRRYTGWGRLSRKLINGIRDKQSGKTILDFLKSDGFANRNFMQLIHDDSLTFKEDIQKAQVSGQGDSLHEHIANLAGSPAIKKGILQTVKVVDELVKVMGRHKPENIVIEMARENQTTQKGQKNSRERMKRIEEGIKELGSQILKEHPVENTQLQNEKLYLYYLQNGRDMYVDQELDINRLSDYDVDHIVPQSFLKDDSIDNKVLTRSDKARGKSDNVPSEEVVKKMKNYWRQLLNAKLITQRKFDNLTKAERGGLSELDKAGFIKRQLVETRQITKHVAQILDSRMNTKYDENDKLIREVKVITLKSKLVSDFRKDFQFYKVREINNYHHAHDAYLNAVVGTALIKKYPKLESEFVYGDYKVYDVRKMIAKSEQEIGKATAKYFFYSNIMNFFKTEITLANGEIRKRPLIETNGETGEIVWDKGRDFATVRKVLSMPQVNIVKKTEVQTGGFSKESILPKRNSDKLIARKKDWDPKKYGGFDSPTVAYSVLVVAKVEKGKSKKLKSVKELLGITIMERSSFEKNPIDFLEAKGYKEVKKDLIIKLPKYSLFELENGRKRMLASAGELQKGNELALPSKYVNFLYLASHYEKLKGSPEDNEQKQLFVEQHKHYLDEIIEQISEFSKRVILADANLDKVLSAYNKHRDKPIREQAENIIHLFTLTNLGAPAAFKYFDTTIDRKRYTSTKEVLDATLIHQSITGLYETRIDLSQLGGDGGPAPEAAAKGGTLNIEDEYRLHETSKEPDVPLGSTWLSDFPQAWAETGGMGLAVRQAPLIIPLKATSTPVSIKQYPMSQEARLGIKPHIQRLLDQGILVPCQSPWNTPLLPVKKPGTNDYRPVQDLREVNKRVEDIHPTVPNPYNLLSGLPPSHQWYTVLDLKDAFFCLRLHPTSQPLFAFEWRDPEMGISGQLTWTRLPQGFKNSPTLFNEALHRDLADFRIQHPDLILLQYVDDLLLAATSEQDCQRGTRALLQTLGNLGYRASAKKAQICQKQVKYLGYLLKEGQRWLTEARKETVMGQPTPKTPRQLREFLGTAGFCRLWIPGFAEMAAPLYPLTKPGTLFNWGPDQQKAYQEIKQALLTAPALGLPDLTKPFELFVDEKQGYAKGVLTQKLGPWRRPVAYLSKKLDPVAAGWPPCLRMVAAIAVLTKDAGKLTMGQPLVILAPHAVEALVKQPPDRWLSNARMTHYQAMLLDTDRVQFGPVVALNPATLLPLPEKEAPHDCLEILAETHGTRPDLTDQPIPDADYTWYTDGSSFLQEGQRRAGAAVTTETEVIWARALPAGTSAQRAELIALTQALKMAEGKKLNVYTDSRYAFATAHVHGEIYRRRGWLTSEGREIKNKNEILALLKALFLPKRLSIIHCPGHQKGNSAEARGNRMADQAAREAAMKAVLETSTLLAGKRTADGSEFEKRTADGSEFESPKKKAKVE

SEQ ID NO: 6797 - protein, 2093 aa, synthetic construct
MPAAKRVKLDGGDKKYSIGLDIGTNSVGWAVITDEYKVPSKKFKVLGNTDRHSIKKNLIGALLFDSGETAEATRLKRTARRRYTRRKNRICYLQEIFSNEMAKVDDSFFHRLEESFLVEEDKKHERHPIFGNIVDEVAYHEKYPTIYHLRKKLVDSTDKADLRLIYLALAHMIKFRGHFLIEGDLNPDNSDVDKLFIQLVQTYNQLFEENPINASGVDAKAILSARLSKSRRLENLIAQLPGEKKNGLFGNLIALSLGLTPNFKSNFDLAEDAKLQLSKDTYDDDLDNLLAQIGDQYADLFLAAKNLSDAILLSDILRVNTEITKAPLSASMIKRYDEHHQDLTLLKALVRQQLPEKYKEIFFDQSKNGYAGYIDGGASQEEFYKFIKPILEKMDGTEELLVKLNREDLLRKQRTFDNGSIPHQIHLGELHAILRRQEDFYPFLKDNREKIEKILTFRIPYYVGPLARGNSRFAWMTRKSEETITPWNFEEVVDKGASAQSFIERMTNFDKNLPNEKVLPKHSLLYEYFTVYNELTKVKYVTEGMRKPAFLSGEQKKAIVDLLFKTNRKVTVKQLKEDYFKKIECFDSVEISGVEDRFNASLGTYHDLLKIIKDKDFLDNEENEDILEDIVLTLTLFEDREMIEERLKTYAHLFDDKVMKQLKRRRYTGWGRLSRKLINGIRDKQSGKTILDFLKSDGFANRNFMQLIHDDSLTFKEDIQKAQVSGQGDSLHEHIANLAGSPAIKKGILQTVKVVDELVKVMGRHKPENIVIEMARENQTTQKGQKNSRERMKRIEEGIKELGSQILKEHPVENTQLQNEKLYLYYLQNGRDMYVDQELDINRLSDYDVDHIVPQSFLKDDSIDNKVLTRSDKARGKSDNVPSEEVVKKMKNYWRQLLNAKLITQRKFDNLTKAERGGLSELDKAGFIKRQLVETRQITKHVAQILDSRMNTKYDENDKLIREVKVITLKSKLVSDFRKDFQFYKVREINNYHHAHDAYLNAVVGTALIKKYPKLESEFVYGDYKVYDVRKMIAKSEQEIGKATAKYFFYSNIMNFFKTEITLANGEIRKRPLIETNGETGEIVWDKGRDFATVRKVLSMPQVNIVKKTEVQTGGFSKESILPKRNSDKLIARKKDWDPKKYGGFDSPTVAYSVLVVAKVEKGKSKKLKSVKELLGITIMERSSFEKNPIDFLEAKGYKEVKKDLIIKLPKYSLFELENGRKRMLASAGELQKGNELALPSKYVNFLYLASHYEKLKGSPEDNEQKQLFVEQHKHYLDEIIEQISEFSKRVILADANLDKVLSAYNKHRDKPIREQAENIIHLFTLTNLGAPAAFKYFDTTIDRKRYTSTKEVLDATLIHQSITGLYETRIDLSQLGGDGGPAPEAAAKGGTLNIEDEYRLHETSKEPDVPLGSTWLSDFPQAWAETGGMGLAVRQAPLIIPLKATSTPVSIKQYPMSQEARLGIKPHIQRLLDQGILVPCQSPWNTPLLPVKKPGTNDYRPVQDLREVNKRVEDIHPTVPNPYNLLSGLPPSHQWYTVLDLKDAFFCLRLHPTSQPLFAFEWRDPEMGISGQLTWTRLPQGFKNSPTLFNEALHRDLADFRIQHPDLILLQYVDDLLLAATSEQDCQRGTRALLQTLGNLGYRASAKKAQICQKQVKYLGYLLKEGQRWLTEARKETVMGQPTPKTPRQLREFLGKAGFCRLFIPGFAEMAAPLYPLTKPGTLFNWGPDQQKAYQEIKQALLTAPALGLPDLTKPFELFVDEKQGYAKGVLTQKLGPWRRPVAYLSKKLDPVAAGWPPCLRMVAAIAVLTKDAGKLTMGQPLVILAPHAVEALVKQPPDRWLSNARMTHYQAMLLDTDRVQFGPVVALNPATLLPLPEKEAPHDCLEILAETHGTRPDLTDQPIPDADYTWYTDGSSFLQEGQRRAGAAVTTETEVIWARALPAGTSAQRAELIALTQALKMAEGKKLNVYTDSRYAFATAHVHGEIYRRRGWLTSEGREIKNKNEILALLKALFLPKRLSIIHCPGHQKGNSAEARGNRMADQAAREAAMKAVLETSTLLAGKRTADGSEFEKRTADGSEFESPKKKAKVE

SEQ ID NO: 6798 - protein, 2096 aa, synthetic construct
MPAAKRVKLDGGDKKYSIGLDIGTNSVGWAVITDEYKVPSKKFKVLGNTDRHSIKKNLIGALLFDSGETAEATRLKRTARRRYTRRKNRICYLQEIFSNEMAKVDDSFFHRLEESFLVEEDKKHERHPIFGNIVDEVAYHEKYPTIYHLRKKLVDSTDKADLRLIYLALAHMIKFRGHFLIEGDLNPDNSDVDKLFIQLVQTYNQLFEENPINASGVDAKAILSARLSKSRRLENLIAQLPGEKKNGLFGNLIALSLGLTPNFKSNFDLAEDAKLQLSKDTYDDDLDNLLAQIGDQYADLFLAAKNLSDAILLSDILRVNTEITKAPLSASMIKRYDEHHQDLTLLKALVRQQLPEKYKEIFFDQSKNGYAGYIDGGASQEEFYKFIKPILEKMDGTEELLVKLNREDLLRKQRTFDNGSIPHQIHLGELHAILRRQEDFYPFLKDNREKIEKILTFRIPYYVGPLARGNSRFAWMTRKSEETITPWNFEEVVDKGASAQSFIERMTNFDKNLPNEKVLPKHSLLYEYFTVYNELTKVKYVTEGMRKPAFLSGEQKKAIVDLLFKTNRKVTVKQLKEDYFKKIECFDSVEISGVEDRFNASLGTYHDLLKIIKDKDFLDNEENEDILEDIVLTLTLFEDREMIEERLKTYAHLFDDKVMKQLKRRRYTGWGRLSRKLINGIRDKQSGKTILDFLKSDGFANRNFMQLIHDDSLTFKEDIQKAQVSGQGDSLHEHIANLAGSPAIKKGILQTVKVVDELVKVMGRHKPENIVIEMARENQTTQKGQKNSRERMKRIEEGIKELGSQILKEHPVENTQLQNEKLYLYYLQNGRDMYVDQELDINRLSDYDVDHIVPQSFLKDDSIDNKVLTRSDKARGKSDNVPSEEVVKKMKNYWRQLLNAKLITQRKFDNLTKAERGGLSELDKAGFIKRQLVETRQITKHVAQILDSRMNTKYDENDKLIREVKVITLKSKLVSDFRKDFQFYKVREINNYHHAHDAYLNAVVGTALIKKYPKLESEFVYGDYKVYDVRKMIAKSEQEIGKATAKYFFYSNIMNFFKTEITLANGEIRKRPLIETNGETGEIVWDKGRDFATVRKVLSMPQVNIVKKTEVQTGGFSKESILPKRNSDKLIARKKDWDPKKYGGFDSPTVAYSVLVVAKVEKGKSKKLKSVKELLGITIMERSSFEKNPIDFLEAKGYKEVKKDLIIKLPKYSLFELENGRKRMLASAGELQKGNELALPSKYVNFLYLASHYEKLKGSPEDNEQKQLFVEQHKHYLDEIIEQISEFSKRVILADANLDKVLSAYNKHRDKPIREQAENIIHLFTLTNLGAPAAFKYFDTTIDRKRYTSTKEVLDATLIHQSITGLYETRIDLSQLGGDGGGGSGGGGSSGGTAPLEEEYRLFLEAPIQNVTLLEQWKREIPKVWAEINPPGLASTQAPIHVQLLSTALPVRVRQYPITLEAKRSLRETIRKFRAAGILRPVHSPWNTPLLPVRKSGTSEYRMVQDLREVNKRVETIHPTVPNPYTLLSLLPPDRIWYSVLDLKDAFFCIPLAPESQLIFAFEWADAEEGESGQLTWTRLPQGFKNSPTLFNEALNRDLQGFRLDHPSVSLLQYVDDLLIAADTQAACLSATRDLLMTLAELGYRVSGKKAQLCQEEVTYLGFKIHKGSRSLSNSRTQAILQIPVPKTKRQVREFLGKIGYCRLFIPGFAELAQPLYAATRPGNDPLVWGEKEEEAFQSLKLALTQPPALALPSLDKPFQLFVEETSGAAKGVLTQALGPWKRPVAYLSKRLDPVAAGWPRCLRAIAAAALLTREASKLTFGQDIEITSSHNLESLLRSPPDKWLTNARITQYQVLLLDPPRVRFKQTAALNPATLLPETDDTLPIHHCLDTLDSLTSTRPDLTDQPLAQAEATLFTDGSSYIRDGKRYAGAAVVTLDSVIWAEPLPIGTSAQKAELIALTKALEWSKDKSVNIYTDSRYAFATLHVHGMIYRERGWLTAGGKAIKNAPEILALLTAVWLPKRVAVMHCKGHQKDDAPTSTGNRRADEVAREVAIRPLSTQATISAGKRTADGSEFEKRTADGSEFESPKKKAKVE

SEQ ID NO: 6799 - protein, 2100 aa, synthetic construct
MPAAKRVKLDGGDKKYSIGLDIGTNSVGWAVITDEYKVPSKKFKVLGNTDRHSIKKNLIGALLFDSGETAEATRLKRTARRRYTRRKNRICYLQEIFSNEMAKVDDSFFHRLEESFLVEEDKKHERHPIFGNIVDEVAYHEKYPTIYHLRKKLVDSTDKADLRLIYLALAHMIKFRGHFLIEGDLNPDNSDVDKLFIQLVQTYNQLFEENPINASGVDAKAILSARLSKSRRLENLIAQLPGEKKNGLFGNLIALSLGLTPNFKSNFDLAEDAKLQLSKDTYDDDLDNLLAQIGDQYADLFLAAKNLSDAILLSDILRVNTEITKAPLSASMIKRYDEHHQDLTLLKALVRQQLPEKYKEIFFDQSKNGYAGYIDGGASQEEFYKFIKPILEKMDGTEELLVKLNREDLLRKQRTFDNGSIPHQIHLGELHAILRRQEDFYPFLKDNREKIEKILTFRIPYYVGPLARGNSRFAWMTRKSEETITPWNFEEVVDKGASAQSFIERMTNFDKNLPNEKVLPKHSLLYEYFTVYNELTKVKYVTEGMRKPAFLSGEQKKAIVDLLFKTNRKVTVKQLKEDYFKKIECFDSVEISGVEDRFNASLGTYHDLLKIIKDKDFLDNEENEDILEDIVLTLTLFEDREMIEERLKTYAHLFDDKVMKQLKRRRYTGWGRLSRKLINGIRDKQSGKTILDFLKSDGFANRNFMQLIHDDSLTFKEDIQKAQVSGQGDSLHEHIANLAGSPAIKKGILQTVKVVDELVKVMGRHKPENIVIEMARENQTTQKGQKNSRERMKRIEEGIKELGSQILKEHPVENTQLQNEKLYLYYLQNGRDMYVDQELDINRLSDYDVDHIVPQSFLKDDSIDNKVLTRSDKARGKSDNVPSEEVVKKMKNYWRQLLNAKLITQRKFDNLTKAERGGLSELDKAGFIKRQLVETRQITKHVAQILDSRMNTKYDENDKLIREVKVITLKSKLVSDFRKDFQFYKVREINNYHHAHDAYLNAVVGTALIKKYPKLESEFVYGDYKVYDVRKMIAKSEQEIGKATAKYFFYSNIMNFFKTEITLANGEIRKRPLIETNGETGEIVWDKGRDFATVRKVLSMPQVNIVKKTEVQTGGFSKESILPKRNSDKLIARKKDWDPKKYGGFDSPTVAYSVLVVAKVEKGKSKKLKSVKELLGITIMERSSFEKNPIDFLEAKGYKEVKKDLIIKLPKYSLFELENGRKRMLASAGELQKGNELALPSKYVNFLYLASHYEKLKGSPEDNEQKQLFVEQHKHYLDEIIEQISEFSKRVILADANLDKVLSAYNKHRDKPIREQAENIIHLFTLTNLGAPAAFKYFDTTIDRKRYTSTKEVLDATLIHQSITGLYETRIDLSQLGGDGGGGSGGGGSSGGTVSLQDEHRLFDIPVTTSLPDVWLQDFPQAWAETGGLGRAKCQAPIIIDLKPTAVPVSIKQYPMSLEAHMGIRQHIIKFLELGVLRPCRSPWNTPLLPVKKPGTQDYRPVQDLREINKRTVDIHPTVPNPYNLLSTLKPDYSWYTVLDLKDAFFCLPLAPQSQELFAFEWKDPERGISGQLTWTRLPQGFKNSPTLFDEALHRDLTDFRTQHPEVTLLQYVDDLLLAAPTKKACTQGTRHLLQELGEKGYRASAKKAQICQTKVTYLGYILSEGKRWLTPGRIETVARIPPPRNPREVREFLGTAGFCRLWIPGFAELAAPLYALTKESTPFTWQTEHQLAFEALKKALLSAPALGLPDTSKPFTLFLDERQGIAKGVLTQKLGPWKRPVAYLSKKLDPVAAGWPPCLRIMAATAMLVKDSAKLTLGQPLTVITPHTLEAIVRQPPDRWITNARLTHYQALLLDTDRVQFGPPVTLNPATLLPVPENQPSPHDCRQVLAETHGTREDLKDQELPDADHTWYTDGSSYLDSGTRRAGAAVVDGHNTIWAQSLPPGTSAQKAELIALTKALELSKGKKANIYTDSRYAFATAHTHGSIYERRGLLTSEGKEIKNKAEIIALLKALFLPQEVAIIHCPGHQKGQDPVAVGNRQADRVARQAAMAEVLTLATEPDNTSHITAGKRTADGSEFEKRTADGSEFESPKKKAKVE

SEQ ID NO: 6800 - protein, 1999 aa, synthetic construct
MPAAKRVKLDGGDKKYSIGLDIGTNSVGWAVITDEYKVPSKKFKVLGNTDRHSIKKNLIGALLFDSGETAEATRLKRTARRRYTRRKNRICYLQEIFSNEMAKVDDSFFHRLEESFLVEEDKKHERHPIFGNIVDEVAYHEKYPTIYHLRKKLVDSTDKADLRLIYLALAHMIKFRGHFLIEGDLNPDNSDVDKLFIQLVQTYNQLFEENPINASGVDAKAILSARLSKSRRLENLIAQLPGEKKNGLFGNLIALSLGLTPNFKSNFDLAEDAKLQLSKDTYDDDLDNLLAQIGDQYADLFLAAKNLSDAILLSDILRVNTEITKAPLSASMIKRYDEHHQDLTLLKALVRQQLPEKYKEIFFDQSKNGYAGYIDGGASQEEFYKFIKPILEKMDGTEELLVKLNREDLLRKQRTFDNGSIPHQIHLGELHAILRRQEDFYPFLKDNREKIEKILTFRIPYYVGPLARGNSRFAWMTRKSEETITPWNFEEVVDKGASAQSFIERMTNFDKNLPNEKVLPKHSLLYEYFTVYNELTKVKYVTEGMRKPAFLSGEQKKAIVDLLFKTNRKVTVKQLKEDYFKKIECFDSVEISGVEDRFNASLGTYHDLLKIIKDKDFLDNEENEDILEDIVLTLTLFEDREMIEERLKTYAHLFDDKVMKQLKRRRYTGWGRLSRKLINGIRDKQSGKTILDFLKSDGFANRNFMQLIHDDSLTFKEDIQKAQVSGQGDSLHEHIANLAGSPAIKKGILQTVKVVDELVKVMGRHKPENIVIEMARENQTTQKGQKNSRERMKRIEEGIKELGSQILKEHPVENTQLQNEKLYLYYLQNGRDMYVDQELDINRLSDYDVDHIVPQSFLKDDSIDNKVLTRSDKARGKSDNVPSEEVVKKMKNYWRQLLNAKLITQRKFDNLTKAERGGLSELDKAGFIKRQLVETRQITKHVAQILDSRMNTKYDENDKLIREVKVITLKSKLVSDFRKDFQFYKVREINNYHHAHDAYLNAVVGTALIKKYPKLESEFVYGDYKVYDVRKMIAKSEQEIGKATAKYFFYSNIMNFFKTEITLANGEIRKRPLIETNGETGEIVWDKGRDFATVRKVLSMPQVNIVKKTEVQTGGFSKESILPKRNSDKLIARKKDWDPKKYGGFDSPTVAYSVLVVAKVEKGKSKKLKSVKELLGITIMERSSFEKNPIDFLEAKGYKEVKKDLIIKLPKYSLFELENGRKRMLASAGELQKGNELALPSKYVNFLYLASHYEKLKGSPEDNEQKQLFVEQHKHYLDEIIEQISEFSKRVILADANLDKVLSAYNKHRDKPIREQAENIIHLFTLTNLGAPAAFKYFDTTIDRKRYTSTKEVLDATLIHQSITGLYETRIDLSQLGGDGGGGSGGGGSSGGGVLDTPPSHIGLEHLPPPPEVPQFPLNLERLQALQDLVHRSLEAGYISPWDGPGNNPVFPVRKPNGAWRFVHDLRATNALTKPIPALSPGPPDLTAPPTHPPHIICLDLKDAFFQIPVEDRFRFYLSFTLPSPGGLQPHRRFAWRVLPQGFINSPALFQRALQEPLRQVSAAFSQSLLVSYMDDILYASPTEEQRSQCYQALAARLRDLGFQVASEKTSQTPSPVPFLGQMVHEQIVTYQSLPTLQISSPISLHQLQAVLGDLQWVSRGTPTTRRPLQLLYSSLKRHHDPRAIIQLSPEQLQGIAELRQALSHNARSRYNEQEPLLAYVHLTRAGSTLVLFQKGAQFPLAYFQTPLTDNQASPWGLLLLLGCQYLQTQALSSYAKPILKYYHNLPKTSLDNWIQSSEDPRVQELLQLWPQISSQGIQPPGPWKTLITRAEVFLTPQFSPDPIPAALCLFSDGATGRGAYCLWKDHLLDFQAVPAPESAQKGELAGLLAGLAAAPPEPVNIWVDSKYLYSLLRTWVLGAWLQPDPVPSYALLYKSLLRHPAIVVGHVRSHSSASHPIASLNNYVDQLAGKRTADGSEFEKRTADGSEFESPKKKAKVE

SEQ ID NO: 6801 - protein, 2085 aa, synthetic construct
MPAAKRVKLDGGDKKYSIGLDIGTNSVGWAVITDEYKVPSKKFKVLGNTDRHSIKKNLIGALLFDSGETAEATRLKRTARRRYTRRKNRICYLQEIFSNEMAKVDDSFFHRLEESFLVEEDKKHERHPIFGNIVDEVAYHEKYPTIYHLRKKLVDSTDKADLRLIYLALAHMIKFRGHFLIEGDLNPDNSDVDKLFIQLVQTYNQLFEENPINASGVDAKAILSARLSKSRRLENLIAQLPGEKKNGLFGNLIALSLGLTPNFKSNFDLAEDAKLQLSKDTYDDDLDNLLAQIGDQYADLFLAAKNLSDAILLSDILRVNTEITKAPLSASMIKRYDEHHQDLTLLKALVRQQLPEKYKEIFFDQSKNGYAGYIDGGASQEEFYKFIKPILEKMDGTEELLVKLNREDLLRKQRTFDNGSIPHQIHLGELHAILRRQEDFYPFLKDNREKIEKILTFRIPYYVGPLARGNSRFAWMTRKSEETITPWNFEEVVDKGASAQSFIERMTNFDKNLPNEKVLPKHSLLYEYFTVYNELTKVKYVTEGMRKPAFLSGEQKKAIVDLLFKTNRKVTVKQLKEDYFKKIECFDSVEISGVEDRFNASLGTYHDLLKIIKDKDFLDNEENEDILEDIVLTLTLFEDREMIEERLKTYAHLFDDKVMKQLKRRRYTGWGRLSRKLINGIRDKQSGKTILDFLKSDGFANRNFMQLIHDDSLTFKEDIQKAQVSGQGDSLHEHIANLAGSPAIKKGILQTVKVVDELVKVMGRHKPENIVIEMARENQTTQKGQKNSRERMKRIEEGIKELGSQILKEHPVENTQLQNEKLYLYYLQNGRDMYVDQELDINRLSDYDVDHIVPQSFLKDDSIDNKVLTRSDKARGKSDNVPSEEVVKKMKNYWRQLLNAKLITQRKFDNLTKAERGGLSELDKAGFIKRQLVETRQITKHVAQILDSRMNTKYDENDKLIREVKVITLKSKLVSDFRKDFQFYKVREINNYHHAHDAYLNAVVGTALIKKYPKLESEFVYGDYKVYDVRKMIAKSEQEIGKATAKYFFYSNIMNFFKTEITLANGEIRKRPLIETNGETGEIVWDKGRDFATVRKVLSMPQVNIVKKTEVQTGGFSKESILPKRNSDKLIARKKDWDPKKYGGFDSPTVAYSVLVVAKVEKGKSKKLKSVKELLGITIMERSSFEKNPIDFLEAKGYKEVKKDLIIKLPKYSLFELENGRKRMLASAGELQKGNELALPSKYVNFLYLASHYEKLKGSPEDNEQKQLFVEQHKHYLDEIIEQISEFSKRVILADANLDKVLSAYNKHRDKPIREQAENIIHLFTLTNLGAPAAFKYFDTTIDRKRYTSTKEVLDATLIHQSITGLYETRIDLSQLGGDGGGGSGGGGSSGGVPWILKKPLELTIKLDLEEQQGTLLNNSILSKKGKEELKQLFEKYSALWQSWENQVGHRRIRPHKIATGTVKPTPQKQYHINPKAKPDIQIVINDLLKQGVLIQKESTMNTPVYPVPKPNGRWRMVLDYRAVNKVTPLIAVQNQHSYGILGSLFKGRYKTTIDLSNGFWAHPIVPEDYWITAFTWQGKQYCWTVLPQGFLNSPGLFTGDVVDLLQGIPNVEVYVDDVYISHDSEKEHLEYLDILFNRLKEAGYIISLKKSNIANSIVDFLGFQITNEGRGLTDTFKEKLENITAPTTLKQLQSILGLLNFARNFIPDFTELIAPLYALIPKSTKNYVPWQIEHSTTLETLITKLNGAEYLQGRKGDKTLIMKVNASYTTGYIRYYNEGEKKPISYVSIVFSKTELKFTELEKLLTTVHKGLLKALDLSMGQNIHVYSPIVSMQNIQKTPQTAKKALASRWLSWLSYLEDPRIRFFYDPQMPALKDLPAVDTGKDNKKHPSNFQHIFYTDGSAITSPTKEGHLNAGMGIVYFINKDGNLQKQQEWSISLGNHTAQFAEIAAFEFALKKCLPLGGNILVVTDSNYVAKAYNEELDVWASNGFVNNRKKPLKHISKWKSVADLKRLRPDVVVTHEPGHQKLDSSPHAYGNNLADQLATQASFKVHAGKRTADGSEFEKRTADGSEFESPKKKAKVE

SEQ ID NO: 6802 - protein, 2093 aa, synthetic construct
MPAAKRVKLDGGDKKYSIGLDIGTNSVGWAVITDEYKVPSKKFKVLGNTDRHSIKKNLIGALLFDSGETAEATRLKRTARRRYTRRKNRICYLQEIFSNEMAKVDDSFFHRLEESFLVEEDKKHERHPIFGNIVDEVAYHEKYPTIYHLRKKLVDSTDKADLRLIYLALAHMIKFRGHFLIEGDLNPDNSDVDKLFIQLVQTYNQLFEENPINASGVDAKAILSARLSKSRRLENLIAQLPGEKKNGLFGNLIALSLGLTPNFKSNFDLAEDAKLQLSKDTYDDDLDNLLAQIGDQYADLFLAAKNLSDAILLSDILRVNTEITKAPLSASMIKRYDEHHQDLTLLKALVRQQLPEKYKEIFFDQSKNGYAGYIDGGASQEEFYKFIKPILEKMDGTEELLVKLNREDLLRKQRTFDNGSIPHQIHLGELHAILRRQEDFYPFLKDNREKIEKILTFRIPYYVGPLARGNSRFAWMTRKSEETITPWNFEEVVDKGASAQSFIERMTNFDKNLPNEKVLPKHSLLYEYFTVYNELTKVKYVTEGMRKPAFLSGEQKKAIVDLLFKTNRKVTVKQLKEDYFKKIECFDSVEISGVEDRFNASLGTYHDLLKIIKDKDFLDNEENEDILEDIVLTLTLFEDREMIEERLKTYAHLFDDKVMKQLKRRRYTGWGRLSRKLINGIRDKQSGKTILDFLKSDGFANRNFMQLIHDDSLTFKEDIQKAQVSGQGDSLHEHIANLAGSPAIKKGILQTVKVVDELVKVMGRHKPENIVIEMARENQTTQKGQKNSRERMKRIEEGIKELGSQILKEHPVENTQLQNEKLYLYYLQNGRDMYVDQELDINRLSDYDVDHIVPQSFLKDDSIDNKVLTRSDKARGKSDNVPSEEVVKKMKNYWRQLLNAKLITQRKFDNLTKAERGGLSELDKAGFIKRQLVETRQITKHVAQILDSRMNTKYDENDKLIREVKVITLKSKLVSDFRKDFQFYKVREINNYHHAHDAYLNAVVGTALIKKYPKLESEFVYGDYKVYDVRKMIAKSEQEIGKATAKYFFYSNIMNFFKTEITLANGEIRKRPLIETNGETGEIVWDKGRDFATVRKVLSMPQVNIVKKTEVQTGGFSKESILPKRNSDKLIARKKDWDPKKYGGFDSPTVAYSVLVVAKVEKGKSKKLKSVKELLGITIMERSSFEKNPIDFLEAKGYKEVKKDLIIKLPKYSLFELENGRKRMLASAGELQKGNELALPSKYVNFLYLASHYEKLKGSPEDNEQKQLFVEQHKHYLDEIIEQISEFSKRVILADANLDKVLSAYNKHRDKPIREQAENIIHLFTLTNLGAPAAFKYFDTTIDRKRYTSTKEVLDATLIHQSITGLYETRIDLSQLGGDGGGGSGGGGSSGGTLQLEEEYRLFEPESTQKQEMDIWLKNFPQAWAETGGMGTAHCQAPVLIQLKATATPISIRQYPMPHEAYQGIKPHIRRMLDQGILKPCQSPWNTPLLPVKKPGTEDYRPVQDLREVNKRVEDIHPTVPNPYNLLSTLPPSHPWYTVLDLKDAFFCLRLHSESQLLFAFEWRDPEIGLSGQLTWTRLPQGFKNSPTLFNEALHSDLADFRVRYPALVLLQYVDDLLLAAATRTECLEGTKALLETLGNKGYRASAKKAQICLQEVTYLGYSLKDGQRWLTKARKEAILSIPVPKNSRQVREFLGTAGYCRLWIPGFAELAAPLYPLTRPGTLFQWGTEQQLAFEDIKKALLSSPALGLPDITKPFELFIDENSGFAKGVLVQKLGPWKRPVAYLSKKLDTVASGWPPCLRMVAAIAILVKDAGKLTLGQPLTILTSHPVEALVRQPPNKWLSNARMTHYQAMLLDAERVHFGPTVSLNPATLLPLPSGGNHHDCLQILAETHGTRPDLTDQPLPDADLTWYTDGSSFIRNGEREAGAAVTTESEVIWAAPLPPGTSAQRAELIALTQALKMAEGKKLTVYTDSRYAFATTHVHGEIYRRRGWLTSEGKEIKNKNEILALLEALFLPKRLSIIHCPGHQKGDSPQAKGNRLADDTAKKAATETHSSLTVLPAGKRTADGSEFEKRTADGSEFESPKKKAKVE

SEQ ID NO: 6803 - protein, 2125 aa, synthetic construct
MPAAKRVKLDGGDKKYSIGLDIGTNSVGWAVITDEYKVPSKKFKVLGNTDRHSIKKNLIGALLFDSGETAEATRLKRTARRRYTRRKNRICYLQEIFSNEMAKVDDSFFHRLEESFLVEEDKKHERHPIFGNIVDEVAYHEKYPTIYHLRKKLVDSTDKADLRLIYLALAHMIKFRGHFLIEGDLNPDNSDVDKLFIQLVQTYNQLFEENPINASGVDAKAILSARLSKSRRLENLIAQLPGEKKNGLFGNLIALSLGLTPNFKSNFDLAEDAKLQLSKDTYDDDLDNLLAQIGDQYADLFLAAKNLSDAILLSDILRVNTEITKAPLSASMIKRYDEHHQDLTLLKALVRQQLPEKYKEIFFDQSKNGYAGYIDGGASQEEFYKFIKPILEKMDGTEELLVKLNREDLLRKQRTFDNGSIPHQIHLGELHAILRRQEDFYPFLKDNREKIEKILTFRIPYYVGPLARGNSRFAWMTRKSEETITPWNFEEVVDKGASAQSFIERMTNFDKNLPNEKVLPKHSLLYEYFTVYNELTKVKYVTEGMRKPAFLSGEQKKAIVDLLFKTNRKVTVKQLKEDYFKKIECFDSVEISGVEDRFNASLGTYHDLLKIIKDKDFLDNEENEDILEDIVLTLTLFEDREMIEERLKTYAHLFDDKVMKQLKRRRYTGWGRLSRKLINGIRDKQSGKTILDFLKSDGFANRNFMQLIHDDSLTFKEDIQKAQVSGQGDSLHEHIANLAGSPAIKKGILQTVKVVDELVKVMGRHKPENIVIEMARENQTTQKGQKNSRERMKRIEEGIKELGSQILKEHPVENTQLQNEKLYLYYLQNGRDMYVDQELDINRLSDYDVDHIVPQSFLKDDSIDNKVLTRSDKARGKSDNVPSEEVVKKMKNYWRQLLNAKLITQRKFDNLTKAERGGLSELDKAGFIKRQLVETRQITKHVAQILDSRMNTKYDENDKLIREVKVITLKSKLVSDFRKDFQFYKVREINNYHHAHDAYLNAVVGTALIKKYPKLESEFVYGDYKVYDVRKMIAKSEQEIGKATAKYFFYSNIMNFFKTEITLANGEIRKRPLIETNGETGEIVWDKGRDFATVRKVLSMPQVNIVKKTEVQTGGFSKESILPKRNSDKLIARKKDWDPKKYGGFDSPTVAYSVLVVAKVEKGKSKKLKSVKELLGITIMERSSFEKNPIDFLEAKGYKEVKKDLIIKLPKYSLFELENGRKRMLASAGELQKGNELALPSKYVNFLYLASHYEKLKGSPEDNEQKQLFVEQHKHYLDEIIEQISEFSKRVILADANLDKVLSAYNKHRDKPIREQAENIIHLFTLTNLGAPAAFKYFDTTIDRKRYTSTKEVLDATLIHQSITGLYETRIDLSQLGGDGGGGSGGGGSSGGLLGRDLLTKLKAQIQFSTEGPQVTWEDRPAMCLVLNLEEEYRLHEKPVPPSIDPSWLQLFPMVWAEKAGMGLANQVPPVVVELKSDASPVAVRQYPMSKEAREGIRPHIQRFLDLGILVPCQSPWNTPLLPVKKPGTNDYRPVQDLREVNKRVQDIHPTVPNPYNLLSSLPPSHTWYSVLDLKDAFFCLKLHPNSQPLFAFEWRDPEKGNTGQLTWTRLPQGFKNSPTLFNEALHRDLASFRALNPQVVMLQYVDDLLVAAPTYRDCKEGTRRLLQELSKLGYRVSAKKAQLCREEVTYLGYLLKGGKRWLTPARKATVMKIPTPTTPRQVREFLGTAGFCRLWIPGFASLAAPLYPLTRPKVPFTWTEAHQEAFGRIKEALLSAPALALPDLTKPFALYVDEKEGVARGVLTQTLGPWRRPVAYLSKKLDPVASGWPTCLKAIAAVALLLKDADKLTLGQNVLVIAPHNLESIVRQPPDRWMTNARMTHYQSLLLNERVSFAPPAILNPATLLPVESDDTPIHICSEILAEETGTRPDLRDQPLPGVPAWYTDGSSFIMDGRRQAGAAIVDNKRTVWASNLPEGTSAQKAELIALTQALRLAEGKSINIYTDSRYAFATAHVHGAIYKQRGWLTSAGKDIKNKEEILALLEAIHLPKRVAIIHCPGHQRGTDPVATGNRKADEAAKQAAQSTRILTETTKNAGKRTADGSEFEKRTADGSEFESPKKKAKVE

SEQ ID NO: 6804 - protein, 2125 aa, synthetic construct
MPAAKRVKLDGGDKKYSIGLDIGTNSVGWAVITDEYKVPSKKFKVLGNTDRHSIKKNLIGALLFDSGETAEATRLKRTARRRYTRRKNRICYLQEIFSNEMAKVDDSFFHRLEESFLVEEDKKHERHPIFGNIVDEVAYHEKYPTIYHLRKKLVDSTDKADLRLIYLALAHMIKFRGHFLIEGDLNPDNSDVDKLFIQLVQTYNQLFEENPINASGVDAKAILSARLSKSRRLENLIAQLPGEKKNGLFGNLIALSLGLTPNFKSNFDLAEDAKLQLSKDTYDDDLDNLLAQIGDQYADLFLAAKNLSDAILLSDILRVNTEITKAPLSASMIKRYDEHHQDLTLLKALVRQQLPEKYKEIFFDQSKNGYAGYIDGGASQEEFYKFIKPILEKMDGTEELLVKLNREDLLRKQRTFDNGSIPHQIHLGELHAILRRQEDFYPFLKDNREKIEKILTFRIPYYVGPLARGNSRFAWMTRKSEETITPWNFEEVVDKGASAQSFIERMTNFDKNLPNEKVLPKHSLLYEYFTVYNELTKVKYVTEGMRKPAFLSGEQKKAIVDLLFKTNRKVTVKQLKEDYFKKIECFDSVEISGVEDRFNASLGTYHDLLKIIKDKDFLDNEENEDILEDIVLTLTLFEDREMIEERLKTYAHLFDDKVMKQLKRRRYTGWGRLSRKLINGIRDKQSGKTILDFLKSDGFANRNFMQLIHDDSLTFKEDIQKAQVSGQGDSLHEHIANLAGSPAIKKGILQTVKVVDELVKVMGRHKPENIVIEMARENQTTQKGQKNSRERMKRIEEGIKELGSQILKEHPVENTQLQNEKLYLYYLQNGRDMYVDQELDINRLSDYDVDHIVPQSFLKDDSIDNKVLTRSDKARGKSDNVPSEEVVKKMKNYWRQLLNAKLITQRKFDNLTKAERGGLSELDKAGFIKRQLVETRQITKHVAQILDSRMNTKYDENDKLIREVKVITLKSKLVSDFRKDFQFYKVREINNYHHAHDAYLNAVVGTALIKKYPKLESEFVYGDYKVYDVRKMIAKSEQEIGKATAKYFFYSNIMNFFKTEITLANGEIRKRPLIETNGETGEIVWDKGRDFATVRKVLSMPQVNIVKKTEVQTGGFSKESILPKRNSDKLIARKKDWDPKKYGGFDSPTVAYSVLVVAKVEKGKSKKLKSVKELLGITIMERSSFEKNPIDFLEAKGYKEVKKDLIIKLPKYSLFELENGRKRMLASAGELQKGNELALPSKYVNFLYLASHYEKLKGSPEDNEQKQLFVEQHKHYLDEIIEQISEFSKRVILADANLDKVLSAYNKHRDKPIREQAENIIHLFTLTNLGAPAAFKYFDTTIDRKRYTSTKEVLDATLIHQSITGLYETRIDLSQLGGDGGGGSGGGGSSGGLLGRDLLTKLKAQIQFSTEGPQVTWEDRPAMCLVLNLEEEYRLHEKPVPPSIDPSWLQLFPMVWAEKAGMGLANQVPPVVVELKSDASPVAVRQYPMSKEAREGIRPHIQRFLDLGILVPCQSPWNTPLLPVKKPGTNDYRPVQDLREVNKRVQDIHPTVPNPYNLLSSLPPSHTWYSVLDLKDAFFCLKLHPNSQPLFAFEWRDPEKGNTGQLTWTRLPQGFKNSPTLFNEALHRDLASFRALNPQVVMLQYVDDLLVAAPTYRDCKEGTRRLLQELSKLGYRVSAKKAQLCREEVTYLGYLLKGGKRWLTPARKATVMKIPTPTTPRQVREFLGKAGFCRLFIPGFASLAAPLYPLTRPKVPFTWTEAHQEAFGRIKEALLSAPALALPDLTKPFALYVDEKEGVARGVLTQTLGPWRRPVAYLSKKLDPVASGWPTCLKAIAAVALLLKDADKLTLGQNVLVIAPHNLESIVRQPPDRWMTNARMTHYQSLLLNERVSFAPPAILNPATLLPVESDDTPIHICSEILAEETGTRPDLRDQPLPGVPAWYTDGSSFIMDGRRQAGAAIVDNKRTVWASNLPEGTSAQKAELIALTQALRLAEGKSINIYTDSRYAFATAHVHGAIYKQRGWLTSAGKDIKNKEEILALLEAIHLPKRVAIIHCPGHQRGTDPVATGNRKADEAAKQAAQSTRILTETTKNAGKRTADGSEFEKRTADGSEFESPKKKAKVE

SEQ ID NO: 6805 - protein, 2094 aa, synthetic construct
MPAAKRVKLDGGDKKYSIGLDIGTNSVGWAVITDEYKVPSKKFKVLGNTDRHSIKKNLIGALLFDSGETAEATRLKRTARRRYTRRKNRICYLQEIFSNEMAKVDDSFFHRLEESFLVEEDKKHERHPIFGNIVDEVAYHEKYPTIYHLRKKLVDSTDKADLRLIYLALAHMIKFRGHFLIEGDLNPDNSDVDKLFIQLVQTYNQLFEENPINASGVDAKAILSARLSKSRRLENLIAQLPGEKKNGLFGNLIALSLGLTPNFKSNFDLAEDAKLQLSKDTYDDDLDNLLAQIGDQYADLFLAAKNLSDAILLSDILRVNTEITKAPLSASMIKRYDEHHQDLTLLKALVRQQLPEKYKEIFFDQSKNGYAGYIDGGASQEEFYKFIKPILEKMDGTEELLVKLNREDLLRKQRTFDNGSIPHQIHLGELHAILRRQEDFYPFLKDNREKIEKILTFRIPYYVGPLARGNSRFAWMTRKSEETITPWNFEEVVDKGASAQSFIERMTNFDKNLPNEKVLPKHSLLYEYFTVYNELTKVKYVTEGMRKPAFLSGEQKKAIVDLLFKTNRKVTVKQLKEDYFKKIECFDSVEISGVEDRFNASLGTYHDLLKIIKDKDFLDNEENEDILEDIVLTLTLFEDREMIEERLKTYAHLFDDKVMKQLKRRRYTGWGRLSRKLINGIRDKQSGKTILDFLKSDGFANRNFMQLIHDDSLTFKEDIQKAQVSGQGDSLHEHIANLAGSPAIKKGILQTVKVVDELVKVMGRHKPENIVIEMARENQTTQKGQKNSRERMKRIEEGIKELGSQILKEHPVENTQLQNEKLYLYYLQNGRDMYVDQELDINRLSDYDVDHIVPQSFLKDDSIDNKVLTRSDKARGKSDNVPSEEVVKKMKNYWRQLLNAKLITQRKFDNLTKAERGGLSELDKAGFIKRQLVETRQITKHVAQILDSRMNTKYDENDKLIREVKVITLKSKLVSDFRKDFQFYKVREINNYHHAHDAYLNAVVGTALIKKYPKLESEFVYGDYKVYDVRKMIAKSEQEIGKATAKYFFYSNIMNFFKTEITLANGEIRKRPLIETNGETGEIVWDKGRDFATVRKVLSMPQVNIVKKTEVQTGGFSKESILPKRNSDKLIARKKDWDPKKYGGFDSPTVAYSVLVVAKVEKGKSKKLKSVKELLGITIMERSSFEKNPIDFLEAKGYKEVKKDLIIKLPKYSLFELENGRKRMLASAGELQKGNELALPSKYVNFLYLASHYEKLKGSPEDNEQKQLFVEQHKHYLDEIIEQISEFSKRVILADANLDKVLSAYNKHRDKPIREQAENIIHLFTLTNLGAPAAFKYFDTTIDRKRYTSTKEVLDATLIHQSITGLYETRIDLSQLGGDGGGGSGGGGSSGGTLNLEDEYRLYETSAEPEVSPGSTWLSDFPQAWAETGGMGLAVRQAPLIIPLKATSTPVSIKQYPMSQEAKLGIKPHIQRLLDQGILVPCQSPWNTPLLPVKKPGTNDYRPVQDLREVNKRVEDIHPTVPNPYNLLSGLPPSHRWYTVLDLKDAFFCLRLHPTSQPLFAFEWRDPGMGISGQLTWTRLPQGFKNSPTLFNEALHRDLADFRIQHPDLILLQYVDDILLAATSELDCQQGTRALLLTLGNLGYRASAKKAQLCQKQVKYLGYLLKEGQRWLTEARKETVMGQPTPKTPRQLREFLGKAGFCRLFIPGFAEMAAPLYPLTKPGTLFNWGPDQQKAYQEIKQALLTAPALGLPDLTKPFELFVDEKQGYAKGVLTQKLGPWRRPVAYLSKKLDPVAAGWPPCLRMVAAIAVLRKDAGKLTMGQPLVILAPHAVEALVKQPPDRWLSNARMTHYQAMLLDTDRVQFGPVVALNPATLLPLPEEGAPHDCLEILAETHGTRPDLTDQPIPDADHTWYTDGSSFLQEGQRKAGAAVTTETEVIWARALPAGTSAQRAELIALTQALKMAEGKRLNVYTDSRYAFATAHIHGEIYRRRGWLTSEGREIKNKSEILALLKALFLPKRLSIIHCLGHQKGDSAEARGNRLADQAAREAAIKTPPDTSTLLAGKRTADGSEFEKRTADGSEFESPKKKAKVE

SEQ ID NO: 6806 - protein, 2094 aa, synthetic construct
MPAAKRVKLDGGDKKYSIGLDIGTNSVGWAVITDEYKVPSKKFKVLGNTDRHSIKKNLIGALLFDSGETAEATRLKRTARRRYTRRKNRICYLQEIFSNEMAKVDDSFFHRLEESFLVEEDKKHERHPIFGNIVDEVAYHEKYPTIYHLRKKLVDSTDKADLRLIYLALAHMIKFRGHFLIEGDLNPDNSDVDKLFIQLVQTYNQLFEENPINASGVDAKAILSARLSKSRRLENLIAQLPGEKKNGLFGNLIALSLGLTPNFKSNFDLAEDAKLQLSKDTYDDDLDNLLAQIGDQYADLFLAAKNLSDAILLSDILRVNTEITKAPLSASMIKRYDEHHQDLTLLKALVRQQLPEKYKEIFFDQSKNGYAGYIDGGASQEEFYKFIKPILEKMDGTEELLVKLNREDLLRKQRTFDNGSIPHQIHLGELHAILRRQEDFYPFLKDNREKIEKILTFRIPYYVGPLARGNSRFAWMTRKSEETITPWNFEEVVDKGASAQSFIERMTNFDKNLPNEKVLPKHSLLYEYFTVYNELTKVKYVTEGMRKPAFLSGEQKKAIVDLLFKTNRKVTVKQLKEDYFKKIECFDSVEISGVEDRFNASLGTYHDLLKIIKDKDFLDNEENEDILEDIVLTLTLFEDREMIEERLKTYAHLFDDKVMKQLKRRRYTGWGRLSRKLINGIRDKQSGKTILDFLKSDGFANRNFMQLIHDDSLTFKEDIQKAQVSGQGDSLHEHIANLAGSPAIKKGILQTVKVVDELVKVMGRHKPENIVIEMARENQTTQKGQKNSRERMKRIEEGIKELGSQILKEHPVENTQLQNEKLYLYYLQNGRDMYVDQELDINRLSDYDVDHIVPQSFLKDDSIDNKVLTRSDKARGKSDNVPSEEVVKKMKNYWRQLLNAKLITQRKFDNLTKAERGGLSELDKAGFIKRQLVETRQITKHVAQILDSRMNTKYDENDKLIREVKVITLKSKLVSDFRKDFQFYKVREINNYHHAHDAYLNAVVGTALIKKYPKLESEFVYGDYKVYDVRKMIAKSEQEIGKATAKYFFYSNIMNFFKTEITLANGEIRKRPLIETNGETGEIVWDKGRDFATVRKVLSMPQVNIVKKTEVQTGGFSKESILPKRNSDKLIARKKDWDPKKYGGFDSPTVAYSVLVVAKVEKGKSKKLKSVKELLGITIMERSSFEKNPIDFLEAKGYKEVKKDLIIKLPKYSLFELENGRKRMLASAGELQKGNELALPSKYVNFLYLASHYEKLKGSPEDNEQKQLFVEQHKHYLDEIIEQISEFSKRVILADANLDKVLSAYNKHRDKPIREQAENIIHLFTLTNLGAPAAFKYFDTTIDRKRYTSTKEVLDATLIHQSITGLYETRIDLSQLGGDGGGGSGGGGSSGGTLGIEDEYRLHETSTEPDVSLGSTWLSDFPQAWAETGGMGLAVRQAPLIIPLKATSTPVSIQQYPMSHEARLGIKPHIQRLLDQGILVPCQSPWNTPLLPVKKPGTNDYRPVQDLREVNKRVEDIHPTVPNPYNLLSGLPPSHQWYTVLDLKDAFFCLRLHPTSQPLFAFEWRDPGMGISGQLTWTRLPQGFKNSPTLFNEALHRDLADFRIQHPDLILLQYVDDILLAATSELDCQQGTRALLQTLGDLGYRASAKKAQICQKQVKYLGYLLREGQRWLTEARKETVMGQPVPKTPRQLREFLGTAGFCRLWIPGFAEMAAPLYPLTKPGTLFSWGPDQQKAYQEIKQALLTAPALGLPDLTKPFELFVDEKQGYAKGVLTQKLGPWRRPVAYLSKKLDPVAAGWPPCLRMVAAIAVLTKDAGKLTMGQPLVILAPHAVEALVKQPPDRWLSNARMTHYQAMLLDTDRVQFGPVVALNPATLLPLPEEGAPHDCLEILAETHGTRPDLTDQPIPDADHTWYTDGSSFLQEGQRKAGAAVTTETEVIWAGALPAGTSAQRAELIALTQALKMAEGKRLNVYTDSRYAFATAHIHGEIYRRRGWLTSEGREIKNKSEILALLKALFLPKRLSIIHCLGHQKGDSAEARGNRLADQAAREAAIKTPPDTSTLLAGKRTADGSEFEKRTADGSEFESPKKKAKVE

SEQ ID NO: 6807 - protein, 2094 aa, synthetic construct; identical to SEQ ID NO: 6806

SEQ ID NO: 6808 - protein, 2094 aa, synthetic construct
MPAAKRVKLDGGDKKYSIGLDIGTNSVGWAVITDEYKVPSKKFKVLGNTDRHSIKKNLIGALLFDSGETAEATRLKRTARRRYTRRKNRICYLQEIFSNEMAKVDDSFFHRLEESFLVEEDKKHERHPIFGNIVDEVAYHEKYPTIYHLRKKLVDSTDKADLRLIYLALAHMIKFRGHFLIEGDLNPDNSDVDKLFIQLVQTYNQLFEENPINASGVDAKAILSARLSKSRRLENLIAQLPGEKKNGLFGNLIALSLGLTPNFKSNFDLAEDAKLQLSKDTYDDDLDNLLAQIGDQYADLFLAAKNLSDAILLSDILRVNTEITKAPLSASMIKRYDEHHQDLTLLKALVRQQLPEKYKEIFFDQSKNGYAGYIDGGASQEEFYKFIKPILEKMDGTEELLVKLNREDLLRKQRTFDNGSIPHQIHLGELHAILRRQEDFYPFLKDNREKIEKILTFRIPYYVGPLARGNSRFAWMTRKSEETITPWNFEEVVDKGASAQSFIERMTNFDKNLPNEKVLPKHSLLYEYFTVYNELTKVKYVTEGMRKPAFLSGEQKKAIVDLLFKTNRKVTVKQLKEDYFKKIECFDSVEISGVEDRFNASLGTYHDLLKIIKDKDFLDNEENEDILEDIVLTLTLFEDREMIEERLKTYAHLFDDKVMKQLKRRRYTGWGRLSRKLINGIRDKQSGKTILDFLKSDGFANRNFMQLIHDDSLTFKEDIQKAQVSGQGDSLHEHIANLAGSPAIKKGILQTVKVVDELVKVMGRHKPENIVIEMARENQTTQKGQKNSRERMKRIEEGIKELGSQILKEHPVENTQLQNEKLYLYYLQNGRDMYVDQELDINRLSDYDVDHIVPQSFLKDDSIDNKVLTRSDKARGKSDNVPSEEVVKKMKNYWRQLLNAKLITQRKFDNLTKAERGGLSELDKAGFIKRQLVETRQITKHVAQILDSRMNTKYDENDKLIREVKVITLKSKLVSDFRKDFQFYKVREINNYHHAHDAYLNAVVGTALIKKYPKLESEFVYGDYKVYDVRKMIAKSEQEIGKATAKYFFYSNIMNFFKTEITLANGEIRKRPLIETNGETGEIVWDKGRDFATVRKVLSMPQVNIVKKTEVQTGGFSKESILPKRNSDKLIARKKDWDPKKYGGFDSPTVAYSVLVVAKVEKGKSKKLKSVKELLGITIMERSSFEKNPIDFLEAKGYKEVKKDLIIKLPKYSLFELENGRKRMLASAGELQKGNELALPSKYVNFLYLASHYEKLKGSPEDNEQKQLFVEQHKHYLDEIIEQISEFSKRVILADANLDKVLSAYNKHRDKPIREQAENIIHLFTLTNLGAPAAFKYFDTTIDRKRYTSTKEVLDATLIHQSITGLYETRIDLSQLGGDGGGGSGGGGSSGGTLNIEDEYRLHETSKEPDVSLGSTWLSDFPQAWAETGGMGLAVRQAPLIIPLKATSTPVSIKQYPMSQEARLGIKPHIQRLLDQGILVPCQSPWNTPLLPVKKPGTNDYRPVQDLREVNKRVEDIHPTVPNPYNLLSGLPPSHQWYTVLDLKDAFFCLRLHPTSQPLFAFEWRDPEMGISGQLTWTRLPQGFKNSPTLFNEALHRDLAGFRIQHPDLILLQYVDDLLLAATSELDCQQGTRALLQTLGDLGYRASAKKAQICQKQVKYLGYLLKEGQRWLTEARKETVMGQPIPKTPRQLREFLGTAGFCRLWIPGFAEMAAPLYPLTKPGTLFNWGPDQQKAFQEIKQALLTAPALGLPDLTKPFELFVDEKQGYAKGVLTQKLGPWRRPVAYLSKKLDPVAAGWPPCLRMVAAIAVLTKDAGKLTMGQPLVILAPHAVEALVKQPPDRWLSNARMTHYQALLLDTDRVQFGPVVALNPATLLPLPEEGLQHDCLDILAEAHGTRSDLMDQPLPDADHTWYTDGSSFLQEGQRKAGAAVTTETEVIWARALPAGTSAQRAELIALTQALKMAEGKKLNVYTDSRYAFATAHIHGEIYRRRGWLTSEGKEIKNKDEILALLKALFLPKRLSIIHCPGHQKGNSAEARGNRMADQAAREVATRETPETSTLLAGKRTADGSEFEKRTADGSEFESPKKKAKVE

SEQ ID NO: 6809 - protein, 2094 aa, synthetic construct
MPAAKRVKLDGGDKKYSIGLDIGTNSVGWAVITDEYKVPSKKFKVLGNTDRHSIKKNLIGALLFDSGETAEATRLKRTARRRYTRRKNRICYLQEIFSNEMAKVDDSFFHRLEESFLVEEDKKHERHPIFGNIVDEVAYHEKYPTIYHLRKKLVDSTDKADLRLIYLALAHMIKFRGHFLIEGDLNPDNSDVDKLFIQLVQTYNQLFEENPINASGVDAKAILSARLSKSRRLENLIAQLPGEKKNGLFGNLIALSLGLTPNFKSNFDLAEDAKLQLSKDTYDDDLDNLLAQIGDQYADLFLAAKNLSDAILLSDILRVNTEITKAPLSASMIKRYDEHHQDLTLLKALVRQQLPEKYKEIFFDQSKNGYAGYIDGGASQEEFYKFIKPILEKMDGTEELLVKLNREDLLRKQRTFDNGSIPHQIHLGELHAILRRQEDFYPFLKDNREKIEKILTFRIPYYVGPLARGNSRFAWMTRKSEETITPWNFEEVVDKGASAQSFIERMTNFDKNLPNEKVLPKHSLLYEYFTVYNELTKVKYVTEGMRKPAFLSGEQKKAIVDLLFKTNRKVTVKQLKEDYFKKIECFDSVEISGVEDRFNASLGTYHDLLKIIKDKDFLDNEENEDILEDIVLTLTLFEDREMIEERLKTYAHLFDDKVMKQLKRRRYTGWGRLSRKLINGIRDKQSGKTILDFLKSDGFANRNFMQLIHDDSLTFKEDIQKAQVSGQGDSLHEHIANLAGSPAIKKGILQTVKVVDELVKVMGRHKPENIVIEMARENQTTQKGQKNSRERMKRIEEGIKELGSQILKEHPVENTQLQNEKLYLYYLQNGRDMYVDQELDINRLSDYDVDHIVPQSFLKDDSIDNKVLTRSDKARGKSDNVPSEEVVKKMKNYWRQLLNAKLITQRKFDNLTKAERGGLSELDKAGFIKRQLVETRQITKHVAQILDSRMNTKYDENDKLIREVKVITLKSKLVSDFRKDFQFYKVREINNYHHAHDAYLNAVVGTALIKKYPKLESEFVYGDYKVYDVRKMIAKSEQEIGKATAKYFFYSNIMNFFKTEITLANGEIRKRPLIETNGETGEIVWDKGRDFATVRKVLSMPQVNIVKKTEVQTGGFSKESILPKRNSDKLIARKKDWDPKKYGGFDSPTVAYSVLVVAKVEKGKSKKLKSVKELLGITIMERSSFEKNPIDFLEAKGYKEVKKDLIIKLPKYSLFELENGRKRMLASAGELQKGNELALPSKYVNFLYLASHYEKLKGSPEDNEQKQLFVEQHKHYLDEIIEQISEFSKRVILADANLDKVLSAYNKHRDKPIREQAENIIHLFTLTNLGAPAAFKYFDTTIDRKRYTSTKEVLDATLIHQSITGLYETRIDLSQLGGDGGGGSGGGGSSGGTLNIEDEHRLHETSKEPDVSLGSTWLSDFPQAWAETGGMGLAVRQAPLIIPLKATSTPVSIKQYPMSQEARLGIKPHIQRLLDQGILVPCQSPWNTPLLPVKKPGTNDYRPVQDLREVNKRVEDIHPTVPNPYNLLSGLPPSHQWYTVLDLKDAFFCLRLHPTSQPLFAFEWRDPEMGISGQLTWTRLPQGFKNSPTLFNEALHRDLADFRIQHPDLILLQYVDDLLLAATSELDCQQGTRALLQTLGNLGYRASAKKAQICQKQVKYLGYLLKEGQRWLTEARKETVMGQPTPKTPRQLREFLGTAGFCRLWIPGFAEMAAPLYPLTKPGTLFNWGPDQQKAYQEIKQALLTAPALGLPDLTKPFELFVDEKQGYAKGVLTQKLGPWRRPVAYLSKKLDPVAAGWPPCLRMVAAIAVLTKDAGKLTMGQPLVILAPHAVEALVKQPPDRWLSNARMTHYQALLLDTDRVQFGPVVALNPATLLPLPEEGLQHNCLDILAEAHGTRPDLTDQPLPDADHTWYTDGSSLLQEGQRKAGAAVTTETEVIWAKALPAGTSAQRAELIALTQALKMAEGKKLNVYTDSRYAFATAHIHGEIYRRRGWLTSEGKEIKNKDEILALLKALFLPKRLSIIHCPGHQKGHSAEARGNRMADQAARKAAITETPDTSTLLAGKRTADGSEFEKRTADGSEFESPKKKAKVE

SEQ ID NO: 6810 - protein, 2088 aa, synthetic construct
MPAAKRVKLDGGDKKYSIGLDIGTNSVGWAVITDEYKVPSKKFKVLGNTDRHSIKKNLIGALLFDSGETAEATRLKRTARRRYTRRKNRICYLQEIFSNEMAKVDDSFFHRLEESFLVEEDKKHERHPIFGNIVDEVAYHEKYPTIYHLRKKLVDSTDKADLRLIYLALAHMIKFRGHFLIEGDLNPDNSDVDKLFIQLVQTYNQLFEENPINASGVDAKAILSARLSKSRRLENLIAQLPGEKKNGLFGNLIALSLGLTPNFKSNFDLAEDAKLQLSKDTYDDDLDNLLAQIGDQYADLFLAAKNLSDAILLSDILRVNTEITKAPLSASMIKRYDEHHQDLTLLKALVRQQLPEKYKEIFFDQSKNGYAGYIDGGASQEEFYKFIKPILEKMDGTEELLVKLNREDLLRKQRTFDNGSIPHQIHLGELHAILRRQEDFYPFLKDNREKIEKILTFRIPYYVGPLARGNSRFAWMTRKSEETITPWNFEEVVDKGASAQSFIERMTNFDKNLPNEKVLPKHSLLYEYFTVYNELTKVKYVTEGMRKPAFLSGEQKKAIVDLLFKTNRKVTVKQLKEDYFKKIECFDSVEISGVEDRFNASLGTYHDLLKIIKDKDFLDNEENEDILEDIVLTLTLFEDREMIEERLKTYAHLFDDKVMKQLKRRRYTGWGRLSRKLINGIRDKQSGKTILDFLKSDGFANRNFMQLIHDDSLTFKEDIQKAQVSGQGDSLHEHIANLAGSPAIKKGILQTVKVVDELVKVMGRHKPENIVIEMARENQTTQKGQKNSRERMKRIEEGIKELGSQILKEHPVENTQLQNEKLYLYYLQNGRDMYVDQELDINRLSDYDVDHIVPQSFLKDDSIDNKVLTRSDKARGKSDNVPSEEVVKKMKNYWRQLLNAKLITQRKFDNLTKAERGGLSELDKAGFIKRQLVETRQITKHVAQILDSRMNTKYDENDKLIREVKVITLKSKLVSDFRKDFQFYKVREINNYHHAHDAYLNAVVGTALIKKYPKLESEFVYGDYKVYDVRKMIAKSEQEIGKATAKYFFYSNIMNFFKTEITLANGEIRKRPLIETNGETGEIVWDKGRDFATVRKVLSMPQVNIVKKTEVQTGGFSKESILPKRNSDKLIARKKDWDPKKYGGFDSPTVAYSVLVVAKVEKGKSKKLKSVKELLGITIMERSSFEKNPIDFLEAKGYKEVKKDLIIKLPKYSLFELENGRKRMLASAGELQKGNELALPSKYVNFLYLASHYEKLKGSPEDNEQKQLFVEQHKHYLDEIIEQISEFSKRVILADANLDKVLSAYNKHRDKPIREQAENIIHLFTLTNLGAPAAFKYFDTTIDRKRYTSTKEVLDATLIHQSITGLYETRIDLSQLGGDGGGGSGGGGSSGGTLQLDDEYRLYSPLVKPDQNIQFWLEQFPQAWAETAGMGLAKQVPPQVIQLKASATPVSVRQYPLSKEAQEGIRPHVQRLIQQGILVPVQSPWNTPLLPVRKPGTNDYRPVQDLREVNKRVQDIHPTVPNPYNLLCALPPQRSWYTVLDLKDAFFCLRLHPTSQPLFAFEWRDPGTGRTGQLTWTRLPQGFKNSPTIFDEALHRDLANFRIQHPQVTLLQYVDDLLLAGATKQDCLEGTKALLLELSDLGYRASAKKAQICRREVTYLGYSLRDGQRWLTEARKKTVVQIPAPTTAKQVREFLGTAGFCRLWIPGFATLAAPLYPLTKEKGEFSWAPEHQKAFDAIKKALLSAPALALPDVTKPFTLYVDERKGVARGVLTQTLGPWRRPVAYLSKKLDPVASGWPVCLKAIAAVAILVKDADKLTLGQNITVIAPHALENIVRQPPDRWMTNARMTHYQSLLLTERVTFAPPAALNPATLLPEETDEPVTHDCHQLLIEETGVRKDLTDIPLTGEVLTWFTDGSSYVVEGKRMAGAAVVDGTRTIWASSLPEGTSAQKAELMALTQALRLAEGKSINIYTDSRYAFATAHVHGAIYKQRGLLTSAGREIKNKEEILSLLEALHLPKRLAIIHCPGHQKAKDPISRGNQMADRVAKQAAQGVNLLAGKRTADGSEFEKRTADGSEFESPKKKAKVE

SEQ ID NO: 6811 - protein, 2088 aa, synthetic construct; identical to SEQ ID NO: 6810

SEQ ID NO: 6812 - protein, 2174 aa, synthetic construct
MPAAKRVKLDGGDKKYSIGLDIGTNSVGWAVITDEYKVPSKKFKVLGNTDRHSIKKNLIGALLFDSGETAEATRLKRTARRRYTRRKNRICYLQEIFSNEMAKVDDSFFHRLEESFLVEEDKKHERHPIFGNIVDEVAYHEKYPTIYHLRKKLVDSTDKADLRLIYLALAHMIKFRGHFLIEGDLNPDNSDVDKLFIQLVQTYNQLFEENPINASGVDAKAILSARLSKSRRLENLIAQLPGEKKNGLFGNLIALSLGLTPNFKSNFDLAEDAKLQLSKDTYDDDLDNLLAQIGDQYADLFLAAKNLSDAILLSDILRVNTEITKAPLSASMIKRYDEHHQDLTLLKALVRQQLPEKYKEIFFDQSKNGYAGYIDGGASQEEFYKFIKPILEKMDGTEELLVKLNREDLLRKQRTFDNGSIPHQIHLGELHAILRRQEDFYPFLKDNREKIEKILTFRIPYYVGPLARGNSRFAWMTRKSEETITPWNFEEVVDKGASAQSFIERMTNFDKNLPNEKVLPKHSLLYEYFTVYNELTKVKYVTEGMRKPAFLSGEQKKAIVDLLFKTNRKVTVKQLKEDYFKKIECFDSVEISGVEDRFNASLGTYHDLLKIIKDKDFLDNEENEDILEDIVLTLTLFEDREMIEERLKTYAHLFDDKVMKQLKRRRYTGWGRLSRKLINGIRDKQSGKTILDFLKSDGFANRNFMQLIHDDSLTFKEDIQKAQVSGQGDSLHEHIANLAGSPAIKKGILQTVKVVDELVKVMGRHKPENIVIEMARENQTTQKGQKNSRERMKRIEEGIKELGSQILKEHPVENTQLQNEKLYLYYLQNGRDMYVDQELDINRLSDYDVDHIVPQSFLKDDSIDNKVLTRSDKARGKSDNVPSEEVVKKMKNYWRQLLNAKLITQRKFDNLTKAERGGLSELDKAGFIKRQLVETRQITKHVAQILDSRMNTKYDENDKLIREVKVITLKSKLVSDFRKDFQFYKVREINNYHHAHDAYLNAVVGTALIKKYPKLESEFVYGDYKVYDVRKMIAKSEQEIGKATAKYFFYSNIMNFFKTEITLANGEIRKRPLIETNGETGEIVWDKGRDFATVRKVLSMPQVNIVKKTEVQTGGFSKESILPKRNSDKLIARKKDWDPKKYGGFDSPTVAYSVLVVAKVEKGKSKKLKSVKELLGITIMERSSFEKNPIDFLEAKGYKEVKKDLIIKLPKYSLFELENGRKRMLASAGELQKGNELALPSKYVNFLYLASHYEKLKGSPEDNEQKQLFVEQHKHYLDEIIEQISEFSKRVILADANLDKVLSAYNKHRDKPIREQAENIIHLFTLTNLGAPAAFKYFDTTIDRKRYTSTKEVLDATLIHQSITGLYETRIDLSQLGGDGGGGSGGGGSSGGMDPLQLLQPLEAEIKGTKLKAHWNSGATITCVPEAFLEDERPIQTMLIKTIHGEKQQDVYYLTFKVQGRKVEAEVLASPYDYILLNPSDVPWLMKKPLQLTVLVPLHEYQERLLQQTALPKEQKELLQKLFLKYDALWQHWENQVGHRRIKPHNIATGTLAPRPQKQYPINPKAKPSIQIVIDDLLKQGVLIQQNSTMNTPVYPVPKPDGKWRMVLDYREVNKTIPLIAAQNQHSAGILSSIYRGKYKTTLDLTNGFWAHPITPESYWLTAFTWQGKQYCWTRLPQGFLNSPALFTADVVDLLKEIPNVQAYVDDIYISHDDPQEHLEQLEKIFSILLNAGYVVSLKKSEIAQREVEFLGFNITKEGRGLTDTFKQKLLNITPPKDLKQLQSILGLLNFARNFIPNYSELVKPLYTIVANANGKFISWTEDNSNQLQHIISVLNQADNLEERNPETRLIIKVNSSPSAGYIRYYNEGSKRPIMYVNYIFSKAEAKFTQTEKLLTTMHKGLIKAMDLAMGQEILVYSPIVSMTKIQRTPLPERKALPVRWITWMTYLEDPRIQFHYDKSLPELQQIPNVTEDVIAKTKHPSEFAMVFYTDGSAIKHPDVNKSHSAGMGIAQVQFIPEYKIVHQWSIPLGDHTAQLAEIAAVEFACKKALKISGPVLIVTDSFYVAESANKELPYWKSNGFLNNKKKPLRHVSKWKSIAECLQLKPDIIIMHEKGHQQPMTTLHTEGNNLADKLATQGSYVVHAGKRTADGSEFEKRTADGSEFESPKKKAKVE

SEQ ID NO: 6813 - protein, 2085 aa, synthetic construct
MPAAKRVKLDGGDKKYSIGLDIGTNSVGWAVITDEYKVPSKKFKVLGNTDRHSIKKNLIGALLFDSGETAEATRLKRTARRRYTRRKNRICYLQEIFSNEMAKVDDSFFHRLEESFLVEEDKKHERHPIFGNIVDEVAYHEKYPTIYHLRKKLVDSTDKADLRLIYLALAHMIKFRGHFLIEGDLNPDNSDVDKLFIQLVQTYNQLFEENPINASGVDAKAILSARLSKSRRLENLIAQLPGEKKNGLFGNLIALSLGLTPNFKSNFDLAEDAKLQLSKDTYDDDLDNLLAQIGDQYADLFLAAKNLSDAILLSDILRVNTEITKAPLSASMIKRYDEHHQDLTLLKALVRQQLPEKYKEIFFDQSKNGYAGYIDGGASQEEFYKFIKPILEKMDGTEELLVKLNREDLLRKQRTFDNGSIPHQIHLGELHAILRRQEDFYPFLKDNREKIEKILTFRIPYYVGPLARGNSRFAWMTRKSEETITPWNFEEVVDKGASAQSFIERMTNFDKNLPNEKVLPKHSLLYEYFTVYNELTKVKYVTEGMRKPAFLSGEQKKAIVDLLFKTNRKVTVKQLKEDYFKKIECFDSVEISGVEDRFNASLGTYHDLLKIIKDKDFLDNEENEDILEDIVLTLTLFEDREMIEERLKTYAHLFDDKVMKQLKRRRYTGWGRLSRKLINGIRDKQSGKTILDFLKSDGFANRNFMQLIHDDSLTFKEDIQKAQVSGQGDSLHEHIANLAGSPAIKKGILQTVKVVDELVKVMGRHKPENIVIEMARENQTTQKGQKNSRERMKRIEEGIKELGSQILKEHPVENTQLQNEKLYLYYLQNGRDMYVDQELDINRLSDYDVDHIVPQSFLKDDSIDNKVLTRSDKARGKSDNVPSEEVVKKMKNYWRQLLNAKLITQRKFDNLTKAERGGLSELDKAGFIKRQLVETRQITKHVAQILDSRMNTKYDENDKLIREVKVITLKSKLVSDFRKDFQFYKVREINNYHHAHDAYLNAVVGTALIKKYPKLESEFVYGDYKVYDVRKMIAKSEQEIGKATAKYFFYSNIMNFFKTEITLANGEIRKRPLIETNGETGEIVWDKGRDFATVRKVLSMPQVNIVKKTEVQTGGFSKESILPKRNSDKLIARKKDWDPKKYGGFDSPTVAYSVLVVAKVEKGKSKKLKSVKELLGITIMERSSFEKNPIDFLEAKGYKEVKKDLIIKLPKYSLFELENGRKRMLASAGELQKGNELALPSKYVNFLYLASHYEKLKGSPEDNEQKQLFVEQHKHYLDEIIEQISEFSKRVILADANLDKVLSAYNKHRDKPIREQAENIIHLFTLTNLGAPAAFKYFDTTIDRKRYTSTKEVLDATLIHQSITGLYETRIDLSQLGGDGGGGSGGGGSSGGVPWLMKKPLQLTVLVPLHEYQERLLQQTALPKEQKELLQKLFLKYDALWQHWENQVGHRRIKPHNIATGTLAPRPQKQYPINPKAKPSIQIVIDDLLKQGVLIQQNSTMNTPVYPVPKPDGKWRMVLDYREVNKTIPLIAAQNQHSAGILSSIYRGKYKTTLDLTNGFWAHPITPESYWLTAFTWQGKQYCWTRLPQGFLNSPALFTADVVDLLKEIPNVQAYVDDIYISHDDPQEHLEQLEKIFSILLNAGYVVSLKKSEIAQREVEFLGFNITKEGRGLTDTFKQKLLNITPPKDLKQLQSILGLLNFARNFIPNYSELVKPLYTIVANANGKFISWTEDNSNQLQHIISVLNQADNLEERNPETRLIIKVNSSPSAGYIRYYNEGSKRPIMYVNYIFSKAEAKFTQTEKLLTTMHKGLIKAMDLAMGQEILVYSPIVSMTKIQRTPLPERKALPVRWITWMTYLEDPRIQFHYDKSLPELQQIPNVTEDVIAKTKHPSEFAMVFYTDGSAIKHPDVNKSHSAGMGIAQVQFIPEYKIVHQWSIPLGDHTAQLAEIAAVEFACKKALKISGPVLIVTDSFYVAESANKELPYWKSNGFLNNKKKPLRHVSKWKSIAECLQLKPDIIIMHEKGHQQPMTTLHTEGNNLADKLATQGSYVVHAGKRTADGSEFEKRTADGSEFESPKKKAKVE

SEQ ID NO: 6814 - protein, 2085 aa, synthetic construct
MPAAKRVKLDGGDKKYSIGLDIGTNSVGWAVITDEYKVPSKKFKVLGNTDRHSIKKNLIGALLFDSGETAEATRLKRTARRRYTRRKNRICYLQEIFSNEMAKVDDSFFHRLEESFLVEEDKKHERHPIFGNIVDEVAYHEKYPTIYHLRKKLVDSTDKADLRLIYLALAHMIKFRGHFLIEGDLNPDNSDVDKLFIQLVQTYNQLFEENPINASGVDAKAILSARLSKSRRLENLIAQLPGEKKNGLFGNLIALSLGLTPNFKSNFDLAEDAKLQLSKDTYDDDLDNLLAQIGDQYADLFLAAKNLSDAILLSDILRVNTEITKAPLSASMIKRYDEHHQDLTLLKALVRQQLPEKYKEIFFDQSKNGYAGYIDGGASQEEFYKFIKPILEKMDGTEELLVKLNREDLLRKQRTFDNGSIPHQIHLGELHAILRRQEDFYPFLKDNREKIEKILTFRIPYYVGPLARGNSRFAWMTRKSEETITPWNFEEVVDKGASAQSFIERMTNFDKNLPNEKVLPKHSLLYEYFTVYNELTKVKYVTEGMRKPAFLSGEQKKAIVDLLFKTNRKVTVKQLKEDYFKKIECFDSVEISGVEDRFNASLGTYHDLLKIIKDKDFLDNEENEDILEDIVLTLTLFEDREMIEERLKTYAHLFDDKVMKQLKRRRYTGWGRLSRKLINGIRDKQSGKTILDFLKSDGFANRNFMQLIHDDSLTFKEDIQKAQVSGQGDSLHEHIANLAGSPAIKKGILQTVKVVDELVKVMGRHKPENIVIEMARENQTTQKGQKNSRERMKRIEEGIKELGSQILKEHPVENTQLQNEKLYLYYLQNGRDMYVDQELDINRLSDYDVDHIVPQSFLKDDSIDNKVLTRSDKARGKSDNVPSEEVVKKMKNYWRQLLNAKLITQRKFDNLTKAERGGLSELDKAGFIKRQLVETRQITKHVAQILDSRMNTKYDENDKLIREVKVITLKSKLVSDFRKDFQFYKVREINNYHHAHDAYLNAVVGTALIKKYPKLESEFVYGDYKVYDVRKMIAKSEQEIGKATAKYFFYSNIMNFFKTEITLANGEIRKRPLIETNGETGEIVWDKGRDFATVRKVLSMPQVNIVKKTEVQTGGFSKESILPKRNSDKLIARKKDWDPKKYGGFDSPTVAYSVLVVAKVEKGKSKKLKSVKELLGITIMERSSFEKNPIDFLEAKGYKEVKKDLIIKLPKYSLFELENGRKRMLASAGELQKGNELALPSKYVNFLYLASHYEKLKGSPEDNEQKQLFVEQHKHYLDEIIEQISEFSKRVILADANLDKVLSAYNKHRDKPIREQAENIIHLFTLTNLGAPAAFKYFDTTIDRKRYTSTKEVLDATLIHQSITGLYETRIDLSQLGGDGGGGSGGGGSSGGIPWLMKKPLQLTTLVPLQEYEERLLKQTMLTGSYKEKLQSLFLKYDALWQHWENQVGHRRIKPHHIATGTVNPRPQKQYPINPKAKASIQTVINDLLKQGVLIQQNSIMNTPVYPVPKPDGKWRMVLDYREVNKTIPLIAAQNQHSAGILSSIFRGKYKTTLDLSNGFWAHSITPESYWLTAFTWLGQQYCWTRLPQGFLNSPALFNADVVDLLKEVPNVQVYVDDIYISHDDPREHLEQLEKVFSLLLNAGYVVSLKKSEIAQHEVEFLGFNITKEGRGLTETFKQKLLNITPPRDLKQLQSILGKLNFARNFIPNFSELVKPLYNIIATAPGKYITWTTDNSQQLQNIISMLNSAENLEERNPEVRLIMKVNTSPSAGYIRFYNEFAKRPIMYLNYVYTKAEVKFTNTEKLLTTIHKGLIKALDLGMGQEILVYSPIVSMTKIQKTPLPERKALPIRWITWMSYLEDPRIQFHYDKTLPELQQVPTVTDDIIAKIKHPSEFSMVFYTDGSAIKHPNVNKSHNAGMGIAQVQFKPEFTVINTWSIPLGDHTAQLAEVAAVEFACKKALKIDGPVLIVTDSFYVAESVNKELPYWQSNGFFNNKKKPLKHVSKWKSIADCIQLKPDIIIIHEKGHQPTASTFHTEGNNLADKLATQGSYVVNAGKRTADGSEFEKRTADGSEFESPKKKAKVE

SEQ ID NO: 6815 - protein, 2094 aa, synthetic construct
MPAAKRVKLDGGDKKYSIGLDIGTNSVGWAVITDEYKVPSKKFKVLGNTDRHSIKKNLIGALLFDSGETAEATRLKRTARRRYTRRKNRICYLQEIFSNEMAKVDDSFFHRLEESFLVEEDKKHERHPIFGNIVDEVAYHEKYPTIYHLRKKLVDSTDKADLRLIYLALAHMIKFRGHFLIEGDLNPDNSDVDKLFIQLVQTYNQLFEENPINASGVDAKAILSARLSKSRRLENLIAQLPGEKKNGLFGNLIALSLGLTPNFKSNFDLAEDAKLQLSKDTYDDDLDNLLAQIGDQYADLFLAAKNLSDAILLSDILRVNTEITKAPLSASMIKRYDEHHQDLTLLKALVRQQLPEKYKEIFFDQSKNGYAGYIDGGASQEEFYKFIKPILEKMDGTEELLVKLNREDLLRKQRTFDNGSIPHQIHLGELHAILRRQEDFYPFLKDNREKIEKILTFRIPYYVGPLARGNSRFAWMTRKSEETITPWNFEEVVDKGASAQSFIERMTNFDKNLPNEKVLPKHSLLYEYFTVYNELTKVKYVTEGMRKPAFLSGEQKKAIVDLLFKTNRKVTVKQLKEDYFKKIECFDSVEISGVEDRFNASLGTYHDLLKIIKDKDFLDNEENEDILEDIVLTLTLFEDREMIEERLKTYAHLFDDKVMKQLKRRRYTGWGRLSRKLINGIRDKQSGKTILDFLKSDGFANRNFMQLIHDDSLTFKEDIQKAQVSGQGDSLHEHIANLAGSPAIKKGILQTVKVVDELVKVMGRHKPENIVIEMARENQTTQKGQKNSRERMKRIEEGIKELGSQILKEHPVENTQLQNEKLYLYYLQNGRDMYVDQELDINRLSDYDVDHIVPQSFLKDDSIDNKVLTRSDKARGKSDNVPSEEVVKKMKNYWRQLLNAKLITQRKFDNLTKAERGGLSELDKAGFIKRQLVETRQITKHVAQILDSRMNTKYDENDKLIREVKVITLKSKLVSDFRKDFQFYKVREINNYHHAHDAYLNAVVGTALIKKYPKLESEFVYGDYKVYDVRKMIAKSEQEIGKATAKYFFYSNIMNFFKTEITLANGEIRKRPLIETNGETGEIVWDKGRDFATVRKVLSMPQVNIVKKTEVQTGGFSKESILPKRNSDKLIARKKDWDPKKYGGFDSPTVAYSVLVVAKVEKGKSKKLKSVKELLGITIMERSSFEKNPIDFLEAKGYKEVKKDLIIKLPKYSLFELENGRKRMLASAGELQKGNELALPSKYVNFLYLASHYEKLKGSPEDNEQKQLFVEQHKHYLDEIIEQISEFSKRVILADANLDKVLSAYNKHRDKPIREQAENIIHLFTLTNLGAPAAFKYFDTTIDRKRYTSTKEVLDATLIHQSITGLYETRIDLSQLGGDGGGGSGGGGSSGGTLNIEDEYRLHETSKEPDVPLGSTWLSDFPQAWAETGGMGLAVRQAPLIIPLKATSTPVSIKQYPMSQEARLGIKPHIQRLLDQGILVPCQSPWNTPLLPVKKPGTNDYRPVQDLREVNKRVEDIHPTVPNPYNLLSGLPPSHQWYTVLDLKDAFFCLRLHPTSQPLFAFEWRDPEMGISGQLTWTRLPQGFKNSPTLFNEALHRDLADFRIQHPDLILLQYVDDLLLAATSEQDCQRGTRALLQTLGNLGYRASAKKAQICQKQVKYLGYLLKEGQRWLTEARKETVMGQPTPKTPRQLREFLGTAGFCRLWIPGFAEMAAPLYPLTKPGTLFNWGPDQQKAYQEIKQALLTAPALGLPDLTKPFELFVDEKQGYAKGVLTQKLGPWRRPVAYLSKKLDPVAAGWPPCLRMVAAIAVLTKDAGKLTMGQPLVILAPHAVEALVKQPPDRWLSNARMTHYQAMLLDTDRVQFGPVVALNPATLLPLPEKEAPHDCLEILAETHGTRPDLTDQPIPDADYTWYTDGSSFLQEGQRRAGAAVTTETEVIWARALPAGTSAQRAELIALTQALKMAEGKKLNVYTDSRYAFATAHVHGEIYRRRGWLTSEGREIKNKNEILALLKALFLPKRLSIIHCPGHQKGNSAEARGNRMADQAAREAAMKAVLETSTLLAGKRTADGSEFEKRTADGSEFESPKKKAKVE

SEQ ID NO: 6816 - protein, 2094 aa, synthetic construct
MPAAKRVKLDGGDKKYSIGLDIGTNSVGWAVITDEYKVPSKKFKVLGNTDRHSIKKNLIGALLFDSGETAEATRLKRTARRRYTRRKNRICYLQEIFSNEMAKVDDSFFHRLEESFLVEEDKKHERHPIFGNIVDEVAYHEKYPTIYHLRKKLVDSTDKADLRLIYLALAHMIKFRGHFLIEGDLNPDNSDVDKLFIQLVQTYNQLFEENPINASGVDAKAILSARLSKSRRLENLIAQLPGEKKNGLFGNLIALSLGLTPNFKSNFDLAEDAKLQLSKDTYDDDLDNLLAQIGDQYADLFLAAKNLSDAILLSDILRVNTEITKAPLSASMIKRYDEHHQDLTLLKALVRQQLPEKYKEIFFDQSKNGYAGYIDGGASQEEFYKFIKPILEKMDGTEELLVKLNREDLLRKQRTFDNGSIPHQIHLGELHAILRRQEDFYPFLKDNREKIEKILTFRIPYYVGPLARGNSRFAWMTRKSEETITPWNFEEVVDKGASAQSFIERMTNFDKNLPNEKVLPKHSLLYEYFTVYNELTKVKYVTEGMRKPAFLSGEQKKAIVDLLFKTNRKVTVKQLKEDYFKKIECFDSVEISGVEDRFNASLGTYHDLLKIIKDKDFLDNEENEDILEDIVLTLTLFEDREMIEERLKTYAHLFDDKVMKQLKRRRYTGWGRLSRKLINGIRDKQSGKTILDFLKSDGFANRNFMQLIHDDSLTFKEDIQKAQVSGQGDSLHEHIANLAGSPAIKKGILQTVKVVDELVKVMGRHKPENIVIEMARENQTTQKGQKNSRERMKRIEEGIKELGSQILKEHPVENTQLQNEKLYLYYLQNGRDMYVDQELDINRLSDYDVDHIVPQSFLKDDSIDNKVLTRSDKARGKSDNVPSEEVVKKMKNYWRQLLNAKLITQRKFDNLTKAERGGLSELDKAGFIKRQLVETRQITKHVAQILDSRMNTKYDENDKLIREVKVITLKSKLVSDFRKDFQFYKVREINNYHHAHDAYLNAVVGTALIKKYPKLESEFVYGDYKVYDVRKMIAKSEQEIGKATAKYFFYSNIMNFFKTEITLANGEIRKRPLIETNGETGEIVWDKGRDFATVRKVLSMPQVNIVKKTEVQTGGFSKESILPKRNSDKLIARKKDWDPKKYGGFDSPTVAYSVLVVAKVEKGKSKKLKSVKELLGITIMERSSFEKNPIDFLEAKGYKEVKKDLIIKLPKYSLFELENGRKRMLASAGELQKGNELALPSKYVNFLYLASHYEKLKGSPEDNEQKQLFVEQHKHYLDEIIEQISEFSKRVILADANLDKVLSAYNKHRDKPIREQAENIIHLFTLTNLGAPAAFKYFDTTIDRKRYTSTKEVLDATLIHQSITGLYETRIDLSQLGGDGGGGSGGGGSSGGTLNIEDEYRLHETSKEPDVPLGSTWLSDFPQAWAETGGMGLAVRQAPLIIPLKATSTPVSIKQYPMSQEARLGIKPHIQRLLDQGILVPCQSPWNTPLLPVKKPGTNDYRPVQDLREVNKRVEDIHPTVPNPYNLLSGLPPSHQWYTVLDLKDAFFCLRLHPTSQPLFAFEWRDPEMGISGQLTWTRLPQGFKNSPTLFNEALHRDLADFRIQHPDLILLQYVDDLLLAATSEQDCQRGTRALLQTLGNLGYRASAKKAQICQKQVKYLGYLLKEGQRWLTEARKETVMGQPTPKTPRQLREFLGKAGFCRLFIPGFAEMAAPLYPLTKPGTLFNWGPDQQKAYQEIKQALLTAPALGLPDLTKPFELFVDEKQGYAKGVLTQKLGPWRRPVAYLSKKLDPVAAGWPPCLRMVAAIAVLTKDAGKLTMGQPLVILAPHAVEALVKQPPDRWLSNARMTHYQAMLLDTDRVQFGPVVALNPATLLPLPEKEAPHDCLEILAETHGTRPDLTDQPIPDADYTWYTDGSSFLQEGQRRAGAAVTTETEVIWARALPAGTSAQRAELIALTQALKMAEGKKLNVYTDSRYAFATAHVHGEIYRRRGWLTSEGREIKNKNEILALLKALFLPKRLSIIHCPGHQKGNSAEARGNRMADQAAREAAMKAVLETSTLLAGKRTADGSEFEKRTADGSEFESPKKKAKVE

SEQ ID NO: 6817 - protein, 2096 aa, synthetic construct
MPAAKRVKLDGGDKKYSIGLDIGTNSVGWAVITDEYKVPSKKFKVLGNTDRHSIKKNLIGALLFDSGETAEATRLKRTARRRYTRRKNRICYLQEIFSNEMAKVDDSFFHRLEESFLVEEDKKHERHPIFGNIVDEVAYHEKYPTIYHLRKKLVDSTDKADLRLIYLALAHMIKFRGHFLIEGDLNPDNSDVDKLFIQLVQTYNQLFEENPINASGVDAKAILSARLSKSRRLENLIAQLPGEKKNGLFGNLIALSLGLTPNFKSNFDLAEDAKLQLSKDTYDDDLDNLLAQIGDQYADLFLAAKNLSDAILLSDILRVNTEITKAPLSASMIKRYDEHHQDLTLLKALVRQQLPEKYKEIFFDQSKNGYAGYIDGGASQEEFYKFIKPILEKMDGTEELLVKLNREDLLRKQRTFDNGSIPHQIHLGELHAILRRQEDFYPFLKDNREKIEKILTFRIPYYVGPLARGNSRFAWMTRKSEETITPWNFEEVVDKGASAQSFIERMTNFDKNLPNEKVLPKHSLLYEYFTVYNELTKVKYVTEGMRKPAFLSGEQKKAIVDLLFKTNRKVTVKQLKEDYFKKIECFDSVEISGVEDRFNASLGTYHDLLKIIKDKDFLDNEENEDILEDIVLTLTLFEDREMIEERLKTYAHLFDDKVMKQLKRRRYTGWGRLSRKLINGIRDKQSGKTILDFLKSDGFANRNFMQLIHDDSLTFKEDIQKAQVSGQGDSLHEHIANLAGSPAIKKGILQTVKVVDELVKVMGRHKPENIVIEMARENQTTQKGQKNSRERMKRIEEGIKELGSQILKEHPVENTQLQNEKLYLYYLQNGRDMYVDQELDINRLSDYDVDHIVPQSFLKDDSIDNKVLTRSDKARGKSDNVPSEEVVKKMKNYWRQLLNAKLITQRKFDNLTKAERGGLSELDKAGFIKRQLVETRQITKHVAQILDSRMNTKYDENDKLIREVKVITLKSKLVSDFRKDFQFYKVREINNYHHAHDAYLNAVVGTALIKKYPKLESEFVYGDYKVYDVRKMIAKSEQEIGKATAKYFFYSNIMNFFKTEITLANGEIRKRPLIETNGETGEIVWDKGRDFATVRKVLSMPQVNIVKKTEVQTGGFSKESILPKRNSDKLIARKKDWDPKKYGGFDSPTVAYSVLVVAKVEKGKSKKLKSVKELLGITIMERSSFEKNPIDFLEAKGYKEVKKDLIIKLPKYSLFELENGRKRMLASAGELQKGNELALPSKYVNFLYLASHYEKLKGSPEDNEQKQLFVEQHKHYLDEIIEQISEFSKRVILADANLDKVLSAYNKHRDKPIREQAENIIHLFTLTNLGAPAAFKYFDTTIDRKRYTSTKEVLDATLIHQSITGLYETRIDLSQLGGDGGGGSGSSGGGGGTAPLEEEYRLFLEAPIQNVTLLEQWKREIPKVWAEINPPGLASTQAPIHVQLLSTALPVRVRQYPITLEAKRSLRETIRKFRAAGILRPVHSPWNTPLLPVRKSGTSEYRMVQDLREVNKRVETIHPTVPNPYTLLSLLPPDRIWYSVLDLKDAFFCIPLAPESQLIFAFEWADAEEGESGQLTWTRLPQGFKNSPTLFNEALNRDLQGFRLDHPSVSLLQYVDDLLIAADTQAACLSATRDLLMTLAELGYRVSGKKAQLCQEEVTYLGFKIHKGSRSLSNSRTQAILQIPVPKTKRQVREFLGTIGYCRLWIPGFAELAQPLYAATRPGNDPLVWGEKEEEAFQSLKLALTQPPALALPSLDKPFQLFVEETSGAAKGVLTQALGPWKRPVAYLSKRLDPVAAGWPRCLRAIAAAALLTREASKLTFGQDIEITSSHNLESLLRSPPDKWLTNARITQYQVLLLDPPRVRFKQTAALNPATLLPETDDTLPIHHCLDTLDSLTSTRPDLTDQPLAQAEATLFTDGSSYIRDGKRYAGAAVVTLDSVIWAEPLPIGTSAQKAELIALTKALEWSKDKSVNIYTDSRYAFATLHVHGMIYRERGWLTAGGKAIKNAPEILALLTAVWLPKRVAVMHCKGHQKDDAPTSTGNRRADEVAREVAIRPLSTQATISAGKRTADGSEFEKRTADGSEFESPKKKAKVE

SEQ ID NO: 6818 - protein, 2100 aa, synthetic construct
MPAAKRVKLDGGDKKYSIGLDIGTNSVGWAVITDEYKVPSKKFKVLGNTDRHSIKKNLIGALLFDSGETAEATRLKRTARRRYTRRKNRICYLQEIFSNEMAKVDDSFFHRLEESFLVEEDKKHERHPIFGNIVDEVAYHEKYPTIYHLRKKLVDSTDKADLRLIYLALAHMIKFRGHFLIEGDLNPDNSDVDKLFIQLVQTYNQLFEENPINASGVDAKAILSARLSKSRRLENLIAQLPGEKKNGLFGNLIALSLGLTPNFKSNFDLAEDAKLQLSKDTYDDDLDNLLAQIGDQYADLFLAAKNLSDAILLSDILRVNTEITKAPLSASMIKRYDEHHQDLTLLKALVRQQLPEKYKEIFFDQSKNGYAGYIDGGASQEEFYKFIKPILEKMDGTEELLVKLNREDLLRKQRTFDNGSIPHQIHLGELHAILRRQEDFYPFLKDNREKIEKILTFRIPYYVGPLARGNSRFAWMTRKSEETITPWNFEEVVDKGASAQSFIERMTNFDKNLPNEKVLPKHSLLYEYFTVYNELTKVKYVTEGMRKPAFLSGEQKKAIVDLLFKTNRKVTVKQLKEDYFKKIECFDSVEISGVEDRFNASLGTYHDLLKIIKDKDFLDNEENEDILEDIVLTLTLFEDREMIEERLKTYAHLFDDKVMKQLKRRRYTGWGRLSRKLINGIRDKQSGKTILDFLKSDGFANRNFMQLIHDDSLTFKEDIQKAQVSGQGDSLHEHIANLAGSPAIKKGILQTVKVVDELVKVMGRHKPENIVIEMARENQTTQKGQKNSRERMKRIEEGIKELGSQILKEHPVENTQLQNEKLYLYYLQNGRDMYVDQELDINRLSDYDVDHIVPQSFLKDDSIDNKVLTRSDKARGKSDNVPSEEVVKKMKNYWRQLLNAKLITQRKFDNLTKAERGGLSELDKAGFIKRQLVETRQITKHVAQILDSRMNTKYDENDKLIREVKVITLKSKLVSDFRKDFQFYKVREINNYHHAHDAYLNAVVGTALIKKYPKLESEFVYGDYKVYDVRKMIAKSEQEIGKATAKYFFYSNIMNFFKTEITLANGEIRKRPLIETNGETGEIVWDKGRDFATVRKVLSMPQVNIVKKTEVQTGGFSKESILPKRNSDKLIARKKDWDPKKYGGFDSPTVAYSVLVVAKVEKGKSKKLKSVKELLGITIMERSSFEKNPIDFLEAKGYKEVKKDLIIKLPKYSLFELENGRKRMLASAGELQKGNELALPSKYVNFLYLASHYEKLKGSPEDNEQKQLFVEQHKHYLDEIIEQISEFSKRVILADANLDKVLSAYNKHRDKPIREQAENIIHLFTLTNLGAPAAFKYFDTTIDRKRYTSTKEVLDATLIHQSITGLYETRIDLSQLGGDGGGGSGSSGGGGGTVSLQDEHRLFDIPVTTSLPDVWLQDFPQAWAETGGLGRAKCQAPIIIDLKPTAVPVSIKQYPMSLEAHMGIRQHIIKFLELGVLRPCRSPWNTPLLPVKKPGTQDYRPVQDLREINKRTVDIHPTVPNPYNLLSTLKPDYSWYTVLDLKDAFFCLPLAPQSQELFAFEWKDPERGISGQLTWTRLPQGFKNSPTLFDEALHRDLTDFRTQHPEVTLLQYVDDLLLAAPTKKACTQGTRHLLQELGEKGYRASAKKAQICQTKVTYLGYILSEGKRWLTPGRIETVARIPPPRNPREVREFLGTAGFCRLWIPGFAELAAPLYALTKESTPFTWQTEHQLAFEALKKALLSAPALGLPDTSKPFTLFLDERQGIAKGVLTQKLGPWKRPVAYLSKKLDPVAAGWPPCLRIMAATAMLVKDSAKLTLGQPLTVITPHTLEAIVRQPPDRWITNARLTHYQALLLDTDRVQFGPPVTLNPATLLPVPENQPSPHDCRQVLAETHGTREDLKDQELPDADHTWYTDGSSYLDSGTRRAGAAVVDGHNTIWAQSLPPGTSAQKAELIALTKALELSKGKKANIYTDSRYAFATAHTHGSIYERRGLLTSEGKEIKNKAEIIALLKALFLPQEVAIIHCPGHQKGQDPVAVGNRQADRVARQAAMAEVLTLATEPDNTSHITAGKRTADGSEFEKRTADGSEFESPKKKAKVE

SEQ ID NO: 6819 - protein, 2094 aa, synthetic construct
MPAAKRVKLDGGDKKYSIGLDIGTNSVGWAVITDEYKVPSKKFKVLGNTDRHSIKKNLIGALLFDSGETAEATRLKRTARRRYTRRKNRICYLQEIFSNEMAKVDDSFFHRLEESFLVEEDKKHERHPIFGNIVDEVAYHEKYPTIYHLRKKLVDSTDKADLRLIYLALAHMIKFRGHFLIEGDLNPDNSDVDKLFIQLVQTYNQLFEENPINASGVDAKAILSARLSKSRRLENLIAQLPGEKKNGLFGNLIALSLGLTPNFKSNFDLAEDAKLQLSKDTYDDDLDNLLAQIGDQYADLFLAAKNLSDAILLSDILRVNTEITKAPLSASMIKRYDEHHQDLTLLKALVRQQLPEKYKEIFFDQSKNGYAGYIDGGASQEEFYKFIKPILEKMDGTEELLVKLNREDLLRKQRTFDNGSIPHQIHLGELHAILRRQEDFYPFLKDNREKIEKILTFRIPYYVGPLARGNSRFAWMTRKSEETITPWNFEEVVDKGASAQSFIERMTNFDKNLPNEKVLPKHSLLYEYFTVYNELTKVKYVTEGMRKPAFLSGEQKKAIVDLLFKTNRKVTVKQLKEDYFKKIECFDSVEISGVEDRFNASLGTYHDLLKIIKDKDFLDNEENEDILEDIVLTLTLFEDREMIEERLKTYAHLFDDKVMKQLKRRRYTGWGRLSRKLINGIRDKQSGKTILDFLKSDGFANRNFMQLIHDDSLTFKEDIQKAQVSGQGDSLHEHIANLAGSPAIKKGILQTVKVVDELVKVMGRHKPENIVIEMARENQTTQKGQKNSRERMKRIEEGIKELGSQILKEHPVENTQLQNEKLYLYYLQNGRDMYVDQELDINRLSDYDVDHIVPQSFLKDDSIDNKVLTRSDKARGKSDNVPSEEVVKKMKNYWRQLLNAKLITQRKFDNLTKAERGGLSELDKAGFIKRQLVETRQITKHVAQILDSRMNTKYDENDKLIREVKVITLKSKLVSDFRKDFQFYKVREINNYHHAHDAYLNAVVGTALIKKYPKLESEFVYGDYKVYDVRKMIAKSEQEIGKATAKYFFYSNIMNFFKTEITLANGEIRKRPLIETNGETGEIVWDKGRDFATVRKVLSMPQVNIVKKTEVQTGGFSKESILPKRNSDKLIARKKDWDPKKYGGFDSPTVAYSVLVVAKVEKGKSKKLKSVKELLGITIMERSSFEKNPIDFLEAKGYKEVKKDLIIKLPKYSLFELENGRKRMLASAGELQKGNELALPSKYVNFLYLASHYEKLKGSPEDNEQKQLFVEQHKHYLDEIIEQISEFSKRVILADANLDKVLSAYNKHRDKPIREQAENIIHLFTLTNLGAPAAFKYFDTTIDRKRYTSTKEVLDATLIHQSITGLYETRIDLSQLGGDGGGGSGSSGGGGGTLNLEDEYRLYETSAEPEVSPGSTWLSDFPQAWAETGGMGLAVRQAPLIIPLKATSTPVSIKQYPMSQEAKLGIKPHIQRLLDQGILVPCQSPWNTPLLPVKKPGTNDYRPVQDLREVNKRVEDIHPTVPNPYNLLSGLPPSHRWYTVLDLKDAFFCLRLHPTSQPLFAFEWRDPGMGISGQLTWTRLPQGFKNSPTLFNEALHRDLADFRIQHPDLILLQYVDDILLAATSELDCQQGTRALLLTLGNLGYRASAKKAQLCQKQVKYLGYLLKEGQRWLTEARKETVMGQPTPKTPRQLREFLGKAGFCRLFIPGFAEMAAPLYPLTKPGTLFNWGPDQQKAYQEIKQALLTAPALGLPDLTKPFELFVDEKQGYAKGVLTQKLGPWRRPVAYLSKKLDPVAAGWPPCLRMVAAIAVLRKDAGKLTMGQPLVILAPHAVEALVKQPPDRWLSNARMTHYQAMLLDTDRVQFGPVVALNPATLLPLPEEGAPHDCLEILAETHGTRPDLTDQPIPDADHTWYTDGSSFLQEGQRKAGAAVTTETEVIWARALPAGTSAQRAELIALTQALKMAEGKRLNVYTDSRYAFATAHIHGEIYRRRGWLTSEGREIKNKSEILALLKALFLPKRLSIIHCLGHQKGDSAEARGNRLADQAAREAAIKTPPDTSTLLAGKRTADGSEFEKRTADGSEFESPKKKAKVE

SEQ ID NO: 6820 - protein, 2094 aa, synthetic construct
MPAAKRVKLDGGDKKYSIGLDIGTNSVGWAVITDEYKVPSKKFKVLGNTDRHSIKKNLIGALLFDSGETAEATRLKRTARRRYTRRKNRICYLQEIFSNEMAKVDDSFFHRLEESFLVEEDKKHERHPIFGNIVDEVAYHEKYPTIYHLRKKLVDSTDKADLRLIYLALAHMIKFRGHFLIEGDLNPDNSDVDKLFIQLVQTYNQLFEENPINASGVDAKAILSARLSKSRRLENLIAQLPGEKKNGLFGNLIALSLGLTPNFKSNFDLAEDAKLQLSKDTYDDDLDNLLAQIGDQYADLFLAAKNLSDAILLSDILRVNTEITKAPLSASMIKRYDEHHQDLTLLKALVRQQLPEKYKEIFFDQSKNGYAGYIDGGASQEEFYKFIKPILEKMDGTEELLVKLNREDLLRKQRTFDNGSIPHQIHLGELHAILRRQEDFYPFLKDNREKIEKILTFRIPYYVGPLARGNSRFAWMTRKSEETITPWNFEEVVDKGASAQSFIERMTNFDKNLPNEKVLPKHSLLYEYFTVYNELTKVKYVTEGMRKPAFLSGEQKKAIVDLLFKTNRKVTVKQLKEDYFKKIECFDSVEISGVEDRFNASLGTYHDLLKIIKDKDFLDNEENEDILEDIVLTLTLFEDREMIEERLKTYAHLFDDKVMKQLKRRRYTGWGRLSRKLINGIRDKQSGKTILDFLKSDGFANRNFMQLIHDDSLTFKEDIQKAQVSGQGDSLHEHIANLAGSPAIKKGILQTVKVVDELVKVMGRHKPENIVIEMARENQTTQKGQKNSRERMKRIEEGIKELGSQILKEHPVENTQLQNEKLYLYYLQNGRDMYVDQELDINRLSDYDVDHIVPQSFLKDDSIDNKVLTRSDKARGKSDNVPSEEVVKKMKNYWRQLLNAKLITQRKFDNLTKAERGGLSELDKAGFIKRQLVETRQITKHVAQILDSRMNTKYDENDKLIREVKVITLKSKLVSDFRKDFQFYKVREINNYHHAHDAYLNAVVGTALIKKYPKLESEFVYGDYKVYDVRKMIAKSEQEIGKATAKYFFYSNIMNFFKTEITLANGEIRKRPLIETNGETGEIVWDKGRDFATVRKVLSMPQVNIVKKTEVQTGGFSKESILPKRNSDKLIARKKDWDPKKYGGFDSPTVAYSVLVVAKVEKGKSKKLKSVKELLGITIMERSSFEKNPIDFLEAKGYKEVKKDLIIKLPKYSLFELENGRKRMLASAGELQKGNELALPSKYVNFLYLASHYEKLKGSPEDNEQKQLFVEQHKHYLDEIIEQISEFSKRVILADANLDKVLSAYNKHRDKPIREQAENIIHLFTLTNLGAPAAFKYFDTTIDRKRYTSTKEVLDATLIHQSITGLYETRIDLSQLGGDGGGGSGSSGGGGGLGIEDEYRLHETSTEPDVSLGSTWLSDFPQAWAETGGMGLAVRQAPLIIPLKATSTPVSIQQYPMSHEARLGIKPHIQRLLDQGILVPCQSPWNTPLLPVKKPGTNDYRPVQDLREVNKRVEDIHPTVPNPYNLLSGLPPSHQWYTVLDLKDAFFCLRLHPTSQPLFAFEWRDPGMGISGQLTWTRLPQGFKNSPTLFNEALHRDLADFRIQHPDLILLQYVDDILLAATSELDCQQGTRALLQTLGDLGYRASAKKAQICQKQVKYLGYLLREGQRWLTEARKETVMGQPVPKTPRQLREFLGKAGFCRLFIPGFAEMAAPLYPLTKPGTLFSWGPDQQKAYQEIKQALLTAPALGLPDLTKPFELFVDEKQGYAKGVLTQKLGPWRRPVAYLSKKLDPVAAGWPPCLRMVAAIAVLTKDAGKLTMGQPLVILAPHAVEALVKQPPDRWLSNARMTHYQAMLLDTDRVQFGPVVALNPATLLPLPEEGAPHDCLEILAETHGTRPDLTDQPIPDADHTWYTDGSSFLQEGQRKAGAAVTTETEVIWAGALPAGTSAQRAELIALTQALKMAEGKRLNVYTDSRYAFATAHIHGEIYRRRGWLTSEGREIKNKSEILALLKALFLPKRLSIIHCLGHQKGDSAEARGNRLADQAAREAAIKTPPDTSTLLIAGKRTADGSEFEKRTADGSEFESPKKKAKVE

SEQ ID NO: 6821 - protein, 2174 aa, synthetic construct
MPAAKRVKLDGGDKKYSIGLDIGTNSVGWAVITDEYKVPSKKFKVLGNTDRHSIKKNLIGALLFDSGETAEATRLKRTARRRYTRRKNRICYLQEIFSNEMAKVDDSFFHRLEESFLVEEDKKHERHPIFGNIVDEVAYHEKYPTIYHLRKKLVDSTDKADLRLIYLALAHMIKFRGHFLIEGDLNPDNSDVDKLFIQLVQTYNQLFEENPINASGVDAKAILSARLSKSRRLENLIAQLPGEKKNGLFGNLIALSLGLTPNFKSNFDLAEDAKLQLSKDTYDDDLDNLLAQIGDQYADLFLAAKNLSDAILLSDILRVNTEITKAPLSASMIKRYDEHHQDLTLLKALVRQQLPEKYKEIFFDQSKNGYAGYIDGGASQEEFYKFIKPILEKMDGTEELLVKLNREDLLRKQRTFDNGSIPHQIHLGELHAILRRQEDFYPFLKDNREKIEKILTFRIPYYVGPLARGNSRFAWMTRKSEETITPWNFEEVVDKGASAQSFIERMTNFDKNLPNEKVLPKHSLLYEYFTVYNELTKVKYVTEGMRKPAFLSGEQKKAIVDLLFKTNRKVTVKQLKEDYFKKIECFDSVEISGVEDRFNASLGTYHDLLKIIKDKDFLDNEENEDILEDIVLTLTLFEDREMIEERLKTYAHLFDDKVMKQLKRRRYTGWGRLSRKLINGIRDKQSGKTILDFLKSDGFANRNFMQLIHDDSLTFKEDIQKAQVSGQGDSLHEHIANLAGSPAIKKGILQTVKVVDELVKVMGRHKPENIVIEMARENQTTQKGQKNSRERMKRIEEGIKELGSQILKEHPVENTQLQNEKLYLYYLQNGRDMYVDQELDINRLSDYDVDHIVPQSFLKDDSIDNKVLTRSDKARGKSDNVPSEEVVKKMKNYWRQLLNAKLITQRKFDNLTKAERGGLSELDKAGFIKRQLVETRQITKHVAQILDSRMNTKYDENDKLIREVKVITLKSKLVSDFRKDFQFYKVREINNYHHAHDAYLNAVVGTALIKKYPKLESEFVYGDYKVYDVRKMIAKSEQEIGKATAKYFFYSNIMNFFKTEITLANGEIRKRPLIETNGETGEIVWDKGRDFATVRKVLSMPQVNIVKKTEVQTGGFSKESILPKRNSDKLIARKKDWDPKKYGGFDSPTVAYSVLVVAKVEKGKSKKLKSVKELLGITIMERSSFEKNPIDFLEAKGYKEVKKDLIIKLPKYSLFELENGRKRMLASAGELQKGNELALPSKYVNFLYLASHYEKLKGSPEDNEQKQLFVEQHKHYLDEIIEQISEFSKRVILADANLDKVLSAYNKHRDKPIREQAENIIHLFTLTNLGAPAAFKYFDTTIDRKRYTSTKEVLDATLIHQSITGLYETRIDLSQLGGDGGGGSGSSGGGGGMDPLQLLQPLEAEIKGTKLKAHWNSGATITCVPEAFLEDERPIQTMLIKTIHGEKQQDVYYLTFKVQGRKVEAEVLASPYDYILLNPSDVPWLMKKPLQLTVLVPLHEYQERLLQQTALPKEQKELLQKLFLKYDALWQHWENQVGHRRIKPHNIATGTLAPRPQKQYPINPKAKPSIQIVIDDLLKQGVLIQQNSTMNTPVYPVPKPDGKWRMVLDYREVNKTIPLIAAQNQHSAGILSSIYRGKYKTTLDLTNGFWAHPITPESYWLTAFTWQGKQYCWTRLPQGFLNSPALFNADVVDLLKEIPNVQAYVDDIYISHDDPQEHLEQLEKIFSILLNAGYVVSLKKSEIAQREVEFLGFNITKEGRGLTDTFKQKLLNITPPKDLKQLQSILGLLNFARNFIPNYSELVKPLYTIVAPANGKFISWTEDNSNQLQHIISVLNQADNLEERNPETRLIIKVNSSPSAGYIRYYNEGSKRPIMYVNYIFSKAEAKFTQTEKLLTTMHKGLIKAMDLAMGQEILVYSPIVSMTKIQRTPLPERKALPVRWITWMTYLEDPRIQFHYDKSLPELQQIPNVTEDVIAKTKHPSEFAMVFYTDGSAIKHPDVNKSHSAGMGIAQVQFIPEYKIVHQWSIPLGDHTAQLAEIAAVEFACKKALKISGPVLIVTDSFYVAESANKELPYWKSNGFLNNKKKPLRHVSKWKSIAECLQLKPDIIIMHEKGHQQPMTTLHTEGNNLADKLATQGSYVVHAGKRTADGSEFEKRTADGSEFESPKKKAKVE

SEQ ID NO: 6822 - protein, 2096 aa, synthetic construct
MPAAKRVKLDGGDKKYSIGLDIGTNSVGWAVITDEYKVPSKKFKVLGNTDRHSIKKNLIGALLFDSGETAEATRLKRTARRRYTRRKNRICYLQEIFSNEMAKVDDSFFHRLEESFLVEEDKKHERHPIFGNIVDEVAYHEKYPTIYHLRKKLVDSTDKADLRLIYLALAHMIKFRGHFLIEGDLNPDNSDVDKLFIQLVQTYNQLFEENPINASGVDAKAILSARLSKSRRLENLIAQLPGEKKNGLFGNLIALSLGLTPNFKSNFDLAEDAKLQLSKDTYDDDLDNLLAQIGDQYADLFLAAKNLSDAILLSDILRVNTEITKAPLSASMIKRYDEHHQDLTLLKALVRQQLPEKYKEIFFDQSKNGYAGYIDGGASQEEFYKFIKPILEKMDGTEELLVKLNREDLLRKQRTFDNGSIPHQIHLGELHAILRRQEDFYPFLKDNREKIEKILTFRIPYYVGPLARGNSRFAWMTRKSEETITPWNFEEVVDKGASAQSFIERMTNFDKNLPNEKVLPKHSLLYEYFTVYNELTKVKYVTEGMRKPAFLSGEQKKAIVDLLFKTNRKVTVKQLKEDYFKKIECFDSVEISGVEDRFNASLGTYHDLLKIIKDKDFLDNEENEDILEDIVLTLTLFEDREMIEERLKTYAHLFDDKVMKQLKRRRYTGWGRLSRKLINGIRDKQSGKTILDFLKSDGFANRNFMQLIHDDSLTFKEDIQKAQVSGQGDSLHEHIANLAGSPAIKKGILQTVKVVDELVKVMGRHKPENIVIEMARENQTTQKGQKNSRERMKRIEEGIKELGSQILKEHPVENTQLQNEKLYLYYLQNGRDMYVDQELDINRLSDYDVDHIVPQSFLKDDSIDNKVLTRSDKARGKSDNVPSEEVVKKMKNYWRQLLNAKLITQRKFDNLTKAERGGLSELDKAGFIKRQLVETRQITKHVAQILDSRMNTKYDENDKLIREVKVITLKSKLVSDFRKDFQFYKVREINNYHHAHDAYLNAVVGTALIKKYPKLESEFVYGDYKVYDVRKMIAKSEQEIGKATAKYFFYSNIMNFFKTEITLANGEIRKRPLIETNGETGEIVWDKGRDFATVRKVLSMPQVNIVKKTEVQTGGFSKESILPKRNSDKLIARKKDWDPKKYGGFDSPTVAYSVLVVAKVEKGKSKKLKSVKELLGITIMERSSFEKNPIDFLEAKGYKEVKKDLIIKLPKYSLFELENGRKRMLASAGELQKGNELALPSKYVNFLYLASHYEKLKGSPEDNEQKQLFVEQHKHYLDEIIEQISEFSKRVILADANLDKVLSAYNKHRDKPIREQAENIIHLFTLTNLGAPAAFKYFDTTIDRKRYTSTKEVLDATLIHQSITGLYETRIDLSQLGGDGGGGGGGSGSSGGTAPLEEEYRLFLEAPIQNVTLLEQWKREIPKVWAEINPPGLASTQAPIHVQLLSTALPVRVRQYPITLEAKRSLRETIRKFRAAGILRPVHSPWNTPLLPVRKSGTSEYRMVQDLREVNKRVETIHPTVPNPYTLLSLLPPDRIWYSVLDLKDAFFCIPLAPESQLIFAFEWADAEEGESGQLTWTRLPQGFKNSPTLFDEALNRDLQGFRLDHPSVSLLQYVDDLLIAADTQAACLSATRDLLMTLAELGYRVSGKKAQLCQEEVTYLGFKIHKGSRSLSNSRTQAILQIPVPKTKRQVREFLGTIGYCRLWIPGFAELAQPLYAATRGGNDPLVWGEKEEEAFQSLKLALTQPPALALPSLDKPFQLFVEETSGAAKGVLTQALGPWKRPVAYLSKRLDPVAAGWPRCLRAIAAAALLTREASKLTFGQDIEITSSHNLESLLRSPPDKWLTNARITQYQVLLLDPPRVRFKQTAALNPATLLPETDDTLPIHHCLDTLDSLTSTRPDLTDQPLAQAEATLFTDGSSYIRDGKRYAGAAVVTLDSVIWAEPLPIGTSAQKAELIALTKALEWSKDKSVNIYTDSRYAFATLHVHGMIYRERGLLTAGGKAIKNAPEILALLTAVWLPKRVAVMHCKGHQKDDAPTSTGNRRADEVAREVAIRPLSTQATISAGKRTADGSEFEKRTADGSEFESPKKKAKVE

SEQ ID NO: 6823 - protein, 2096 aa, synthetic construct
MPAAKRVKLDGGDKKYSIGLDIGTNSVGWAVITDEYKVPSKKFKVLGNTDRHSIKKNLIGALLFDSGETAEATRLKRTARRRYTRRKNRICYLQEIFSNEMAKVDDSFFHRLEESFLVEEDKKHERHPIFGNIVDEVAYHEKYPTIYHLRKKLVDSTDKADLRLIYLALAHMIKFRGHFLIEGDLNPDNSDVDKLFIQLVQTYNQLFEENPINASGVDAKAILSARLSKSRRLENLIAQLPGEKKNGLFGNLIALSLGLTPNFKSNFDLAEDAKLQLSKDTYDDDLDNLLAQIGDQYADLFLAAKNLSDAILLSDILRVNTEITKAPLSASMIKRYDEHHQDLTLLKALVRQQLPEKYKEIFFDQSKNGYAGYIDGGASQEEFYKFIKPILEKMDGTEELLVKLNREDLLRKQRTFDNGSIPHQIHLGELHAILRRQEDFYPFLKDNREKIEKILTFRIPYYVGPLARGNSRFAWMTRKSEETITPWNFEEVVDKGASAQSFIERMTNFDKNLPNEKVLPKHSLLYEYFTVYNELTKVKYVTEGMRKPAFLSGEQKKAIVDLLFKTNRKVTVKQLKEDYFKKIECFDSVEISGVEDRFNASLGTYHDLLKIIKDKDFLDNEENEDILEDIVLTLTLFEDREMIEERLKTYAHLFDDKVMKQLKRRRYTGWGRLSRKLINGIRDKQSGKTILDFLKSDGFANRNFMQLIHDDSLTFKEDIQKAQVSGQGDSLHEHIANLAGSPAIKKGILQTVKVVDELVKVMGRHKPENIVIEMARENQTTQKGQKNSRERMKRIEEGIKELGSQILKEHPVENTQLQNEKLYLYYLQNGRDMYVDQELDINRLSDYDVDHIVPQSFLKDDSIDNKVLTRSDKARGKSDNVPSEEVVKKMKNYWRQLLNAKLITQRKFDNLTKAERGGLSELDKAGFIKRQLVETRQITKHVAQILDSRMNTKYDENDKLIREVKVITLKSKLVSDFRKDFQFYKVREINNYHHAHDAYLNAVVGTALIKKYPKLESEFVYGDYKVYDVRKMIAKSEQEIGKATAKYFFYSNIMNFFKTEITLANGEIRKRPLIETNGETGEIVWDKGRDFATVRKVLSMPQVNIVKKTEVQTGGFSKESILPKRNSDKLIARKKDWDPKKYGGFDSPTVAYSVLVVAKVEKGKSKKLKSVKELLGITIMERSSFEKNPIDFLEAKGYKEVKKDLIIKLPKYSLFELENGRKRMLASAGELQKGNELALPSKYVNFLYLASHYEKLKGSPEDNEQKQLFVEQHKHYLDEIIEQISEFSKRVILADANLDKVLSAYNKHRDKPIREQAENIIHLFTLTNLGAPAAFKYFDTTIDRKRYTSTKEVLDATLIHQSITGLYETRIDLSQLGGDGGGGGGGSGSSGGTAPLEEEYRLFLEAPIQNVTLLEQWKREIPKVWAEINPPGLASTQAPIHVQLLSTALPVRVRQYPITLEAKRSLRETIRKFRAAGILRPVHSPWNTPLLPVRKSGTSEYRMVQDLREVNKRVETIHPTVPNPYTLLSLLPPDRIWYSVLDLKDAFFCIPLAPESQLIFAFEWADAEEGESGQLTWTRLPQGFKNSPTLFNEALNRDLQGFRLDHPSVSLLQYVDDLLIAADTQAACLSATRDLLMTLAELGYRVSGKKAQLCQEEVTYLGFKIHKGSRSLSNSRTQAILQIPVPKTKRQVREFLGTIGYCRLWIPGFAELAQPLYAATRPGNDPLVWGEKEEEAFQSLKLALTQPPALALPSLDKPFQLFVEETSGAAKGVLTQALGPWKRPVAYLSKRLDPVAAGWPRCLRAIAAAALLTREASKLTFGQDIEITSSHNLESLLRSPPDKWLTNARITQYQVLLLDPPRVRFKQTAALNPATLLPETDDTLPIHHCLDTLDSLTSTRPDLTDQPLAQAEATLFTDGSSYIRDGKRYAGAAVVTLDSVIWAEPLPIGTSAQKAELIALTKALEWSKDKSVNIYTDSRYAFATLHVHGMIYRERGWLTAGGKAIKNAPEILALLTAVWLPKRVAVMHCKGHQKDDAPTSTGNRRADEVAREVAIRPLSTQATISAGKRTADGSEFEKRTADGSEFESPKKKAKVE

SEQ ID NO: 6824 - protein, 2096 aa, synthetic construct
MPAAKRVKLDGGDKKYSIGLDIGTNSVGWAVITDEYKVPSKKFKVLGNTDRHSIKKNLIGALLFDSGETAEATRLKRTARRRYTRRKNRICYLQEIFSNEMAKVDDSFFHRLEESFLVEEDKKHERHPIFGNIVDEVAYHEKYPTIYHLRKKLVDSTDKADLRLIYLALAHMIKFRGHFLIEGDLNPDNSDVDKLFIQLVQTYNQLFEENPINASGVDAKAILSARLSKSRRLENLIAQLPGEKKNGLFGNLIALSLGLTPNFKSNFDLAEDAKLQLSKDTYDDDLDNLLAQIGDQYADLFLAAKNLSDAILLSDILRVNTEITKAPLSASMIKRYDEHHQDLTLLKALVRQQLPEKYKEIFFDQSKNGYAGYIDGGASQEEFYKFIKPILEKMDGTEELLVKLNREDLLRKQRTFDNGSIPHQIHLGELHAILRRQEDFYPFLKDNREKIEKILTFRIPYYVGPLARGNSRFAWMTRKSEETITPWNFEEVVDKGASAQSFIERMTNFDKNLPNEKVLPKHSLLYEYFTVYNELTKVKYVTEGMRKPAFLSGEQKKAIVDLLFKTNRKVTVKQLKEDYFKKIECFDSVEISGVEDRFNASLGTYHDLLKIIKDKDFLDNEENEDILEDIVLTLTLFEDREMIEERLKTYAHLFDDKVMKQLKRRRYTGWGRLSRKLINGIRDKQSGKTILDFLKSDGFANRNFMQLIHDDSLTFKEDIQKAQVSGQGDSLHEHIANLAGSPAIKKGILQTVKVVDELVKVMGRHKPENIVIEMARENQTTQKGQKNSRERMKRIEEGIKELGSQILKEHPVENTQLQNEKLYLYYLQNGRDMYVDQELDINRLSDYDVDHIVPQSFLKDDSIDNKVLTRSDKARGKSDNVPSEEVVKKMKNYWRQLLNAKLITQRKFDNLTKAERGGLSELDKAGFIKRQLVETRQITKHVAQILDSRMNTKYDENDKLIREVKVITLKSKLVSDFRKDFQFYKVREINNYHHAHDAYLNAVVGTALIKKYPKLESEFVYGDYKVYDVRKMIAKSEQEIGKATAKYFFYSNIMNFFKTEITLANGEIRKRPLIETNGETGEIVWDKGRDFATVRKVLSMPQVNIVKKTEVQTGGFSKESILPKRNSDKLIARKKDWDPKKYGGFDSPTVAYSVLVVAKVEKGKSKKLKSVKELLGITIMERSSFEKNPIDFLEAKGYKEVKKDLIIKLPKYSLFELENGRKRMLASAGELQKGNELALPSKYVNFLYLASHYEKLKGSPEDNEQKQLFVEQHKHYLDEIIEQISEFSKRVILADANLDKVLSAYNKHRDKPIREQAENIIHLFTLTNLGAPAAFKYFDTTIDRKRYTSTKEVLDATLIHQSITGLYETRIDLSQLGGDGGGGGGGSGSSGGTAPLEEEYRLFLEAPIQNVTLLEQWKREIPKVWAEINPPGLASTQAPIHVQLLSTALPVRVRQYPITLEAKRSLRETIRKFRAAGILRPVHSPWNTPLLPVRKSGTSEYRMVQDLREVNKRVETIHPTVPNPYTLLSLLPPDRIWYSVLDLKDAFFCIPLAPESQLIFAFEWADAEEGESGQLTWTRLPQGFKNSPTLFNEALNRDLQGFRLDHPSVSLLQYVDDLLIAADTQAACLSATRDLLMTLAELGYRVSGKKAQLCQEEVTYLGFKIHKGSRSLSNSRTQAILQIPVPKTKRQVREFLGKIGYCRLFIPGFAELAQPLYAATRPGNDPLVWGEKEEEAFQSLKLALTQPPALALPSLDKPFQLFVEETSGAAKGVLTQALGPWKRPVAYLSKRLDPVAAGWPRCLRAIAAAALLTREASKLTFGQDIEITSSHNLESLLRSPPDKWLTNARITQYQVLLLDPPRVRFKQTAALNPATLLPETDDTLPIHHCLDTLDSLTSTRPDLTDQPLAQAEATLFTDGSSYIRDGKRYAGAAVVTLDSVIWAEPLPIGTSAQKAELIALTKALEWSKDKSVNIYTDSRYAFATLHVHGMIYRERGWLTAGGKAIKNAPEILALLTAVWLPKRVAVMHCKGHQKDDAPTSTGNRRADEVAREVAIRPLSTQATISAGKRTADGSEFEKRTADGSEFESPKKKAKVE

SEQ ID NO: 6825 - protein, 2100 aa, synthetic construct
MPAAKRVKLDGGDKKYSIGLDIGTNSVGWAVITDEYKVPSKKFKVLGNTDRHSIKKNLIGALLFDSGETAEATRLKRTARRRYTRRKNRICYLQEIFSNEMAKVDDSFFHRLEESFLVEEDKKHERHPIFGNIVDEVAYHEKYPTIYHLRKKLVDSTDKADLRLIYLALAHMIKFRGHFLIEGDLNPDNSDVDKLFIQLVQTYNQLFEENPINASGVDAKAILSARLSKSRRLENLIAQLPGEKKNGLFGNLIALSLGLTPNFKSNFDLAEDAKLQLSKDTYDDDLDNLLAQIGDQYADLFLAAKNLSDAILLSDILRVNTEITKAPLSASMIKRYDEHHQDLTLLKALVRQQLPEKYKEIFFDQSKNGYAGYIDGGASQEEFYKFIKPILEKMDGTEELLVKLNREDLLRKQRTFDNGSIPHQIHLGELHAILRRQEDFYPFLKDNREKIEKILTFRIPYYVGPLARGNSRFAWMTRKSEETITPWNFEEVVDKGASAQSFIERMTNFDKNLPNEKVLPKHSLLYEYFTVYNELTKVKYVTEGMRKPAFLSGEQKKAIVDLLFKTNRKVTVKQLKEDYFKKIECFDSVEISGVEDRFNASLGTYHDLLKIIKDKDFLDNEENEDILEDIVLTLTLFEDREMIEERLKTYAHLFDDKVMKQLKRRRYTGWGRLSRKLINGIRDKQSGKTILDFLKSDGFANRNFMQLIHDDSLTFKEDIQKAQVSGQGDSLHEHIANLAGSPAIKKGILQTVKVVDELVKVMGRHKPENIVIEMARENQTTQKGQKNSRERMKRIEEGIKELGSQILKEHPVENTQLQNEKLYLYYLQNGRDMYVDQELDINRLSDYDVDHIVPQSFLKDDSIDNKVLTRSDKARGKSDNVPSEEVVKKMKNYWRQLLNAKLITQRKFDNLTKAERGGLSELDKAGFIKRQLVETRQITKHVAQILDSRMNTKYDENDKLIREVKVITLKSKLVSDFRKDFQFYKVREINNYHHAHDAYLNAVVGTALIKKYPKLESEFVYGDYKVYDVRKMIAKSEQEIGKATAKYFFYSNIMNFFKTEITLANGEIRKRPLIETNGETGEIVWDKGRDFATVRKVLSMPQVNIVKKTEVQTGGFSKESILPKRNSDKLIARKKDWDPKKYGGFDSPTVAYSVLVVAKVEKGKSKKLKSVKELLGITIMERSSFEKNPIDFLEAKGYKEVKKDLIIKLPKYSLFELENGRKRMLASAGELQKGNELALPSKYVNFLYLASHYEKLKGSPEDNEQKQLFVEQHKHYLDEIIEQISEFSKRVILADANLDKVLSAYNKHRDKPIREQAENIIHLFTLTNLGAPAAFKYFDTTIDRKRYTSTKEVLDATLIHQSITGLYETRIDLSQLGGDGGGGGGGSGSSGGTVSLQDEHRLFDIPVTTSLPDVWLQDFPQAWAETGGLGRAKCQAPIIIDLKPTAVPVSIKQYPMSLEAHMGIRQHIIKFLELGVLRPCRSPWNTPLLPVKKPGTQDYRPVQDLREINKRTVDIHPTVPNPYNLLSTLKPDYSWYTVLDLKDAFFCLPLAPQSQELFAFEWKDPERGISGQLTWTRLPQGFKNSPTLFNEALHRDLTDFRTQHPEVTLLQYVDDLLLAAPTKKACTQGTRHLLQELGEKGYRASAKKAQICQTKVTYLGYILSEGKRWLTPGRIETVARIPPPRNPREVREFLGTAGFCRLWIPGFAELAAPLYALTKPSTPFTWQTEHQLAFEALKKALLSAPALGLPDTSKPFTLFLDERQGIAKGVLTQKLGPWKRPVAYLSKKLDPVAAGWPPCLRIMAATAMLVKDSAKLTLGQPLTVITPHTLEAIVRQPPDRWITNARLTHYQALLLDTDRVQFGPPVTLNPATLLPVPENQPSPHDCRQVLAETHGTREDLKDQELPDADHTWYTDGSSYLDSGTRRAGAAVVDGHNTIWAQSLPPGTSAQKAELIALTKALELSKGKKANIYTDSRYAFATAHTHGSIYERRGWLTSEGKEIKNKAEIIALLKALFLPQEVAIIHCPGHQKGQDPVAVGNRQADRVARQAAMAEVLTLATEPDNTSHITAGKRTADGSEFEKRTADGSEFESPKKKAKVE

SEQ ID NO: 6826 - protein, 2093 aa, synthetic construct
MPAAKRVKLDGGDKKYSIGLDIGTNSVGWAVITDEYKVPSKKFKVLGNTDRHSIKKNLIGALLFDSGETAEATRLKRTARRRYTRRKNRICYLQEIFSNEMAKVDDSFFHRLEESFLVEEDKKHERHPIFGNIVDEVAYHEKYPTIYHLRKKLVDSTDKADLRLIYLALAHMIKFRGHFLIEGDLNPDNSDVDKLFIQLVQTYNQLFEENPINASGVDAKAILSARLSKSRRLENLIAQLPGEKKNGLFGNLIALSLGLTPNFKSNFDLAEDAKLQLSKDTYDDDLDNLLAQIGDQYADLFLAAKNLSDAILLSDILRVNTEITKAPLSASMIKRYDEHHQDLTLLKALVRQQLPEKYKEIFFDQSKNGYAGYIDGGASQEEFYKFIKPILEKMDGTEELLVKLNREDLLRKQRTFDNGSIPHQIHLGELHAILRRQEDFYPFLKDNREKIEKILTFRIPYYVGPLARGNSRFAWMTRKSEETITPWNFEEVVDKGASAQSFIERMTNFDKNLPNEKVLPKHSLLYEYFTVYNELTKVKYVTEGMRKPAFLSGEQKKAIVDLLFKTNRKVTVKQLKEDYFKKIECFDSVEISGVEDRFNASLGTYHDLLKIIKDKDFLDNEENEDILEDIVLTLTLFEDREMIEERLKTYAHLFDDKVMKQLKRRRYTGWGRLSRKLINGIRDKQSGKTILDFLKSDGFANRNFMQLIHDDSLTFKEDIQKAQVSGQGDSLHEHIANLAGSPAIKKGILQTVKVVDELVKVMGRHKPENIVIEMARENQTTQKGQKNSRERMKRIEEGIKELGSQILKEHPVENTQLQNEKLYLYYLQNGRDMYVDQELDINRLSDYDVDHIVPQSFLKDDSIDNKVLTRSDKARGKSDNVPSEEVVKKMKNYWRQLLNAKLITQRKFDNLTKAERGGLSELDKAGFIKRQLVETRQITKHVAQILDSRMNTKYDENDKLIREVKVITLKSKLVSDFRKDFQFYKVREINNYHHAHDAYLNAVVGTALIKKYPKLESEFVYGDYKVYDVRKMIAKSEQEIGKATAKYFFYSNIMNFFKTEITLANGEIRKRPLIETNGETGEIVWDKGRDFATVRKVLSMPQVNIVKKTEVQTGGFSKESILPKRNSDKLIARKKDWDPKKYGGFDSPTVAYSVLVVAKVEKGKSKKLKSVKELLGITIMERSSFEKNPIDFLEAKGYKEVKKDLIIKLPKYSLFELENGRKRMLASAGELQKGNELALPSKYVNFLYLASHYEKLKGSPEDNEQKQLFVEQHKHYLDEIIEQISEFSKRVILADANLDKVLSAYNKHRDKPIREQAENIIHLFTLTNLGAPAAFKYFDTTIDRKRYTSTKEVLDATLIHQSITGLYETRIDLSQLGGDGGGGGGGSGSSGGTLQLEEEYRLFEPESTQKQEMDIWLKNFPQAWAETGGMGTAHCQAPVLIQLKATATPISIRQYPMPHEAYQGIKPHIRRMLDQGILKPCQSPWNTPLLPVKKPGTEDYRPVQDLREVNKRVEDIHPTVPNPYNLLSTLPPSHPWYTVLDLKDAFFCLRLHSESQLLFAFEWRDPEIGLSGQLTWTRLPQGFKNSPTLFNEALHSDLADFRVRYPALVLLQYVDDLLLAAATRTECLEGTKALLETLGNKGYRASAKKAQICLQEVTYLGYSLKDGQRWLTKARKEAILSIPVPKNSRQVREFLGKAGYCRLFIPGFAELAAPLYPLTRPGTLFQWGTEQQLAFEDIKKALLSSPALGLPDITKPFELFIDENSGFAKGVLVQKLGPWKRPVAYLSKKLDTVASGWPPCLRMVAAIAILVKDAGKLTLGQPLTILTSHPVEALVRQPPNKWLSNARMTHYQAMLLDAERVHFGPTVSLNPATLLPLPSGGNHHDCLQILAETHGTRPDLTDQPLPDADLTWYTDGSSFIRNGEREAGAAVTTESEVIWAAPLPPGTSAQRAELIALTQALKMAEGKKLTVYTDSRYAFATTHVHGEIYRRRGWLTSEGKEIKNKNEILALLEALFLPKRLSIIHCPGHQKGDSPQAKGNRLADDTAKKAATETHSSLTVLPAGKRTADGSEFEKRTADGSEFESPKKKAKVE

SEQ ID NO: 6827 - protein, 2174 aa, synthetic construct
MPAAKRVKLDGGDKKYSIGLDIGTNSVGWAVITDEYKVPSKKFKVLGNTDRHSIKKNLIGALLFDSGETAEATRLKRTARRRYTRRKNRICYLQEIFSNEMAKVDDSFFHRLEESFLVEEDKKHERHPIFGNIVDEVAYHEKYPTIYHLRKKLVDSTDKADLRLIYLALAHMIKFRGHFLIEGDLNPDNSDVDKLFIQLVQTYNQLFEENPINASGVDAKAILSARLSKSRRLENLIAQLPGEKKNGLFGNLIALSLGLTPNFKSNFDLAEDAKLQLSKDTYDDDLDNLLAQIGDQYADLFLAAKNLSDAILLSDILRVNTEITKAPLSASMIKRYDEHHQDLTLLKALVRQQLPEKYKEIFFDQSKNGYAGYIDGGASQEEFYKFIKPILEKMDGTEELLVKLNREDLLRKQRTFDNGSIPHQIHLGELHAILRRQEDFYPFLKDNREKIEKILTFRIPYYVGPLARGNSRFAWMTRKSEETITPWNFEEVVDKGASAQSFIERMTNFDKNLPNEKVLPKHSLLYEYFTVYNELTKVKYVTEGMRKPAFLSGEQKKAIVDLLFKTNRKVTVKQLKEDYFKKIECFDSVEISGVEDRFNASLGTYHDLLKIIKDKDFLDNEENEDILEDIVLTLTLFEDREMIEERLKTYAHLFDDKVMKQLKRRRYTGWGRLSRKLINGIRDKQSGKTILDFLKSDGFANRNFMQLIHDDSLTFKEDIQKAQVSGQGDSLHEHIANLAGSPAIKKGILQTVKVVDELVKVMGRHKPENIVIEMARENQTTQKGQKNSRERMKRIEEGIKELGSQILKEHPVENTQLQNEKLYLYYLQNGRDMYVDQELDINRLSDYDVDHIVPQSFLKDDSIDNKVLTRSDKARGKSDNVPSEEVVKKMKNYWRQLLNAKLITQRKFDNLTKAERGGLSELDKAGFIKRQLVETRQITKHVAQILDSRMNTKYDENDKLIREVKVITLKSKLVSDFRKDFQFYKVREINNYHHAHDAYLNAVVGTALIKKYPKLESEFVYGDYKVYDVRKMIAKSEQEIGKATAKYFFYSNIMNFFKTEITLANGEIRKRPLIETNGETGEIVWDKGRDFATVRKVLSMPQVNIVKKTEVQTGGFSKESILPKRNSDKLIARKKDWDPKKYGGFDSPTVAYSVLVVAKVEKGKSKKLKSVKELLGITIMERSSFEKNPIDFLEAKGYKEVKKDLIIKLPKYSLFELENGRKRMLASAGELQKGNELALPSKYVNFLYLASHYEKLKGSPEDNEQKQLFVEQHKHYLDEIIEQISEFSKRVILADANLDKVLSAYNKHRDKPIREQAENIIHLFTLTNLGAPAAFKYFDTTIDRKRYTSTKEVLDATLIHQSITGLYETRIDLSQLGGDGGGGGGGSGSSGGMNPLQLLQPLPAEIKGTKLLAHWNSGATITCIPESFLEDEQPIKKTLIKTIHGEKQQNVYYVTFKVKGRKVEAEVIASPYEYILLSPTDVPWLTQQPLQLTILVPLQEYQEKILSKTALPEDQKQQLKTLFVKYDNLWQHWENQVGHRKIRPHNIATGDYPPRPQKQYPINPKAKPSIQIVIDDLLKQGVLTPQNSTMNTPVYPVPKPDGRWRMVLDYREVNKTIPLTAAQNQHSAGILATIVRQKYKTTLDLANGFWAHPITPESYWLTAFTWQGKQYCWTRLPQGFLNSPALFNADVVDLLKEIPNVQVYVDDIYLSHDDPKEHVQQLEKVFQILLQAGYVVSLKKSEIGQKTVEFLGFNITKEGRGLTDTFKTKLLNITPPKDLKQLQSILGKLNFARNFIPNFAELVQPLYNLIAPAKGKYIEWSEENTKQLNMVIEALNTASNLEERLPEQRLVIKVNTSPSAGYVRYYNETGKKPIMYLNYVFSKAELKFSMLEKLLTTMHKALIKAMDLAMGQEILVYSPIVSMTKIQKTPLPERKALPIRWITWMTYLEDPRIQFHYDKTLPELKHIPDVYTSSQSPVKHPSQYEGVFYTDGSAIKSPDPTKSNNAGMGIVHATYKPEYQVLNQWSIPLGNHTAQMAEIAAVEFACKKALKIPGPVLVITDSFYVAESANKELPYWKSNGFVNNKKKPLKHISKWKSIAECLSMKPDITIQHEKGISLQIPVFILKGNALADKLATQGSYVVNAGKRTADGSEFEKRTADGSEFESPKKKAKVE

SEQ ID NO: 6828 - protein, 2125 aa, synthetic construct
MPAAKRVKLDGGDKKYSIGLDIGTNSVGWAVITDEYKVPSKKFKVLGNTDRHSIKKNLIGALLFDSGETAEATRLKRTARRRYTRRKNRICYLQEIFSNEMAKVDDSFFHRLEESFLVEEDKKHERHPIFGNIVDEVAYHEKYPTIYHLRKKLVDSTDKADLRLIYLALAHMIKFRGHFLIEGDLNPDNSDVDKLFIQLVQTYNQLFEENPINASGVDAKAILSARLSKSRRLENLIAQLPGEKKNGLFGNLIALSLGLTPNFKSNFDLAEDAKLQLSKDTYDDDLDNLLAQIGDQYADLFLAAKNLSDAILLSDILRVNTEITKAPLSASMIKRYDEHHQDLTLLKALVRQQLPEKYKEIFFDQSKNGYAGYIDGGASQEEFYKFIKPILEKMDGTEELLVKLNREDLLRKQRTFDNGSIPHQIHLGELHAILRRQEDFYPFLKDNREKIEKILTFRIPYYVGPLARGNSRFAWMTRKSEETITPWNFEEVVDKGASAQSFIERMTNFDKNLPNEKVLPKHSLLYEYFTVYNELTKVKYVTEGMRKPAFLSGEQKKAIVDLLFKTNRKVTVKQLKEDYFKKIECFDSVEISGVEDRFNASLGTYHDLLKIIKDKDFLDNEENEDILEDIVLTLTLFEDREMIEERLKTYAHLFDDKVMKQLKRRRYTGWGRLSRKLINGIRDKQSGKTILDFLKSDGFANRNFMQLIHDDSLTFKEDIQKAQVSGQGDSLHEHIANLAGSPAIKKGILQTVKVVDELVKVMGRHKPENIVIEMARENQTTQKGQKNSRERMKRIEEGIKELGSQILKEHPVENTQLQNEKLYLYYLQNGRDMYVDQELDINRLSDYDVDHIVPQSFLKDDSIDNKVLTRSDKARGKSDNVPSEEVVKKMKNYWRQLLNAKLITQRKFDNLTKAERGGLSELDKAGFIKRQLVETRQITKHVAQILDSRMNTKYDENDKLIREVKVITLKSKLVSDFRKDFQFYKVREINNYHHAHDAYLNAVVGTALIKKYPKLESEFVYGDYKVYDVRKMIAKSEQEIGKATAKYFFYSNIMNFFKTEITLANGEIRKRPLIETNGETGEIVWDKGRDFATVRKVLSMPQVNIVKKTEVQTGGFSKESILPKRNSDKLIARKKDWDPKKYGGFDSPTVAYSVLVVAKVEKGKSKKLKSVKELLGITIMERSSFEKNPIDFLEAKGYKEVKKDLIIKLPKYSLFELENGRKRMLASAGELQKGNELALPSKYVNFLYLASHYEKLKGSPEDNEQKQLFVEQHKHYLDEIIEQISEFSKRVILADANLDKVLSAYNKHRDKPIREQAENIIHLFTLTNLGAPAAFKYFDTTIDRKRYTSTKEVLDATLIHQSITGLYETRIDLSQLGGDGGGGGGGSGSSGGLLGRDLLTKLKAQIQFSTEGPQVTWEDRPAMCLVLNLEEEYRLHEKPVPPSIDPSWLQLFPMVWAEKAGMGLANQVPPVVVELKSDASPVAVRQYPMSKEAREGIRPHIQRFLDLGILVPCQSPWNTPLLPVKKPGTNDYRPVQDLREVNKRVQDIHPTVPNPYNLLSSLPPSHTWYSVLDLKDAFFCLKLHPNSQPLFAFEWRDPEKGNTGQLTWTRLPQGFKNSPTLFNEALHRDLASFRALNPQVVMLQYVDDLLVAAPTYRDCKEGTRRLLQELSKLGYRVSAKKAQLCREEVTYLGYLLKGGKRWLTPARKATVMKIPTPTTPRQVREFLGTAGFCRLWIPGFASLAAPLYPLTRPKVPFTWTEAHQEAFGRIKEALLSAPALALPDLTKPFALYVDEKEGVARGVLTQTLGPWRRPVAYLSKKLDPVASGWPTCLKAIAAVALLLKDADKLTLGQNVLVIAPHNLESIVRQPPDRWMTNARMTHYQSLLLNERVSFAPPAILNPATLLPVESDDTPIHICSEILAEETGTRPDLRDQPLPGVPAWYTDGSSFIMDGRRQAGAAIVDNKRTVWASNLPEGTSAQKAELIALTQALRLAEGKSINIYTDSRYAFATAHVHGAIYKQRGWLTSAGKDIKNKEEILALLEAIHLPKRVAIIHCPGHQRGTDPVATGNRKADEAAKQAAQSTRILTETTKNAGKRTADGSEFEKRTADGSEFESPKKKAKVE

SEQ ID NO: 6829 - protein, 2125 aa, synthetic construct
MPAAKRVKLDGGDKKYSIGLDIGTNSVGWAVITDEYKVPSKKFKVLGNTDRHSIKKNLIGALLFDSGETAEATRLKRTARRRYTRRKNRICYLQEIFSNEMAKVDDSFFHRLEESFLVEEDKKHERHPIFGNIVDEVAYHEKYPTIYHLRKKLVDSTDKADLRLIYLALAHMIKFRGHFLIEGDLNPDNSDVDKLFIQLVQTYNQLFEENPINASGVDAKAILSARLSKSRRLENLIAQLPGEKKNGLFGNLIALSLGLTPNFKSNFDLAEDAKLQLSKDTYDDDLDNLLAQIGDQYADLFLAAKNLSDAILLSDILRVNTEITKAPLSASMIKRYDEHHQDLTLLKALVRQQLPEKYKEIFFDQSKNGYAGYIDGGASQEEFYKFIKPILEKMDGTEELLVKLNREDLLRKQRTFDNGSIPHQIHLGELHAILRRQEDFYPFLKDNREKIEKILTFRIPYYVGPLARGNSRFAWMTRKSEETITPWNFEEVVDKGASAQSFIERMTNFDKNLPNEKVLPKHSLLYEYFTVYNELTKVKYVTEGMRKPAFLSGEQKKAIVDLLFKTNRKVTVKQLKEDYFKKIECFDSVEISGVEDRFNASLGTYHDLLKIIKDKDFLDNEENEDILEDIVLTLTLFEDREMIEERLKTYAHLFDDKVMKQLKRRRYTGWGRLSRKLINGIRDKQSGKTILDFLKSDGFANRNFMQLIHDDSLTFKEDIQKAQVSGQGDSLHEHIANLAGSPAIKKGILQTVKVVDELVKVMGRHKPENIVIEMARENQTTQKGQKNSRERMKRIEEGIKELGSQILKEHPVENTQLQNEKLYLYYLQNGRDMYVDQELDINRLSDYDVDHIVPQSFLKDDSIDNKVLTRSDKARGKSDNVPSEEVVKKMKNYWRQLLNAKLITQRKFDNLTKAERGGLSELDKAGFIKRQLVETRQITKHVAQILDSRMNTKYDENDKLIREVKVITLKSKLVSDFRKDFQFYKVREINNYHHAHDAYLNAVVGTALIKKYPKLESEFVYGDYKVYDVRKMIAKSEQEIGKATAKYFFYSNIMNFFKTEITLANGEIRKRPLIETNGETGEIVWDKGRDFATVRKVLSMPQVNIVKKTEVQTGGFSKESILPKRNSDKLIARKKDWDPKKYGGFDSPTVAYSVLVVAKVEKGKSKKLKSVKELLGITIMERSSFEKNPIDFLEAKGYKEVKKDLIIKLPKYSLFELENGRKRMLASAGELQKGNELALPSKYVNFLYLASHYEKLKGSPEDNEQKQLFVEQHKHYLDEIIEQISEFSKRVILADANLDKVLSAYNKHRDKPIREQAENIIHLFTLTNLGAPAAFKYFDTTIDRKRYTSTKEVLDATLIHQSITGLYETRIDLSQLGGDGGGGGGGSGSSGGLLGRDLLTKLKAQIQFSTEGPQVTWEDRPAMCLVLNLEEEYRLHEKPVPPSIDPSWLQLFPMVWAEKAGMGLANQVPPVVVELKSDASPVAVRQYPMSKEAREGIRPHIQRFLDLGILVPCQSPWNTPLLPVKKPGTNDYRPVQDLREVNKRVQDIHPTVPNPYNLLSSLPPSHTWYSVLDLKDAFFCLKLHPNSQPLFAFEWRDPEKGNTGQLTWTRLPQGFKNSPTLFNEALHRDLASFRALNPQVVMLQYVDDLLVAAPTYRDCKEGTRRLLQELSKLGYRVSAKKAQLCREEVTYLGYLLKGGKRWLTPARKATVMKIPTPTTPRQVREFLGKAGFCRLFIPGFASLAAPLYPLTRPKVPFTWTEAHQEAFGRIKEALLSAPALALPDLTKPFALYVDEKEGVARGVLTQTLGPWRRPVAYLSKKLDPVASGWPTCLKAIAAVALLLKDADKLTLGQNVLVIAPHNLESIVRQPPDRWMTNARMTHYQSLLLNERVSFAPPAILNPATLLPVESDDTPIHICSEILAEETGTRPDLRDQPLPGVPAWYTDGSSFIMDGRRQAGAAIVDNKRTVWASNLPEGTSAQKAELIALTQALRLAEGKSINIYTDSRYAFATAHVHGAIYKQRGWLTSAGKDIKNKEEILALLEAIHLPKRVAIIHCPGHQRGTDPVATGNRKADEAAKQAAQSTRILTETTKNAGKRTADGSEFEKRTADGSEFESPKKKAKVE

SEQ ID NO: 6830 - protein, 2094 aa, synthetic construct
MPAAKRVKLDGGDKKYSIGLDIGTNSVGWAVITDEYKVPSKKFKVLGNTDRHSIKKNLIGALLFDSGETAEATRLKRTARRRYTRRKNRICYLQEIFSNEMAKVDDSFFHRLEESFLVEEDKKHERHPIFGNIVDEVAYHEKYPTIYHLRKKLVDSTDKADLRLIYLALAHMIKFRGHFLIEGDLNPDNSDVDKLFIQLVQTYNQLFEENPINASGVDAKAILSARLSKSRRLENLIAQLPGEKKNGLFGNLIALSLGLTPNFKSNFDLAEDAKLQLSKDTYDDDLDNLLAQIGDQYADLFLAAKNLSDAILLSDILRVNTEITKAPLSASMIKRYDEHHQDLTLLKALVRQQLPEKYKEIFFDQSKNGYAGYIDGGASQEEFYKFIKPILEKMDGTEELLVKLNREDLLRKQRTFDNGSIPHQIHLGELHAILRRQEDFYPFLKDNREKIEKILTFRIPYYVGPLARGNSRFAWMTRKSEETITPWNFEEVVDKGASAQSFIERMTNFDKNLPNEKVLPKHSLLYEYFTVYNELTKVKYVTEGMRKPAFLSGEQKKAIVDLLFKTNRKVTVKQLKEDYFKKIECFDSVEISGVEDRFNASLGTYHDLLKIIKDKDFLDNEENEDILEDIVLTLTLFEDREMIEERLKTYAHLFDDKVMKQLKRRRYTGWGRLSRKLINGIRDKQSGKTILDFLKSDGFANRNFMQLIHDDSLTFKEDIQKAQVSGQGDSLHEHIANLAGSPAIKKGILQTVKVVDELVKVMGRHKPENIVIEMARENQTTQKGQKNSRERMKRIEEGIKELGSQILKEHPVENTQLQNEKLYLYYLQNGRDMYVDQELDINRLSDYDVDHIVPQSFLKDDSIDNKVLTRSDKARGKSDNVPSEEVVKKMKNYWRQLLNAKLITQRKFDNLTKAERGGLSELDKAGFIKRQLVETRQITKHVAQILDSRMNTKYDENDKLIREVKVITLKSKLVSDFRKDFQFYKVREINNYHHAHDAYLNAVVGTALIKKYPKLESEFVYGDYKVYDVRKMIAKSEQEIGKATAKYFFYSNIMNFFKTEITLANGEIRKRPLIETNGETGEIVWDKGRDFATVRKVLSMPQVNIVKKTEVQTGGFSKESILPKRNSDKLIARKKDWDPKKYGGFDSPTVAYSVLVVAKVEKGKSKKLKSVKELLGITIMERSSFEKNPIDFLEAKGYKEVKKDLIIKLPKYSLFELENGRKRMLASAGELQKGNELALPSKYVNFLYLASHYEKLKGSPEDNEQKQLFVEQHKHYLDEIIEQISEFSKRVILADANLDKVLSAYNKHRDKPIREQAENIIHLFTLTNLGAPAAFKYFDTTIDRKRYTSTKEVLDATLIHQSITGLYETRIDLSQLGGDGGGGGGGSGSSGGTLNIEDEYRLHETSKGPDVPLGSTWLSDFPQAWAETGGMGLAVRQAPLIIPLKATSTPVSIKQYPMSQEARLGIKPHIQRLLDQGILVPCQSPWNTPLLPVKKPGTNDYRPVQDLREVNKRVEDIHPTVPNPYNLLSGLPPSHQWYTVLDLKDAFFCLRLHPTSQSLFAFEWRDPEMGISGQLTWTRLPQGFKNSPTLFNEALHRDLADFRIQHPDLILLQYVDDLLLAATSELDCQQGTRALLQTLGDLGYRASAKKAQICQKQVKYLGYLLKEGQRWLTEARKETVMGQPTPKTPRQLREFLGTAGFCRLWIPGFAEMAAPLYPLTKPGTLFEWGPDQQKAYQEIKQALLTAPALGLPDLTKPFELFVDEKQGYAKGVLTQKLGPWRRPVAYLSKKLDPVAAGWPPCLRMVAAIAVLTKDAGKLTMGQPLVILAPHAVEALVKQPPDRWLSNARMTHYQALLLDTDRVQFGPIVALNPATLLPLPEEGLQHDCLDILAEAHGTRPDLTDQPLPDADHTWYTDGSSFLQEGQRKAGAAVTTETEVVWAKALPAGTSAQRAELIALTQALKMAEGKKLNVYTDSRYAFATAHIHGEIYRRRGWLTSEGKEIKNKDEILALLKALFLPKRLSIIHCPGHQKGNRAEARGNRMADQAAREVATRETPETSTLLAGKRTADGSEFEKRTADGSEFESPKKKAKVE

SEQ ID NO: 6831 - protein, 2094 aa, synthetic construct
MPAAKRVKLDGGDKKYSIGLDIGTNSVGWAVITDEYKVPSKKFKVLGNTDRHSIKKNLIGALLFDSGETAEATRLKRTARRRYTRRKNRICYLQEIFSNEMAKVDDSFFHRLEESFLVEEDKKHERHPIFGNIVDEVAYHEKYPTIYHLRKKLVDSTDKADLRLIYLALAHMIKFRGHFLIEGDLNPDNSDVDKLFIQLVQTYNQLFEENPINASGVDAKAILSARLSKSRRLENLIAQLPGEKKNGLFGNLIALSLGLTPNFKSNFDLAEDAKLQLSKDTYDDDLDNLLAQIGDQYADLFLAAKNLSDAILLSDILRVNTEITKAPLSASMIKRYDEHHQDLTLLKALVRQQLPEKYKEIFFDQSKNGYAGYIDGGASQEEFYKFIKPILEKMDGTEELLVKLNREDLLRKQRTFDNGSIPHQIHLGELHAILRRQEDFYPFLKDNREKIEKILTFRIPYYVGPLARGNSRFAWMTRKSEETITPWNFEEVVDKGASAQSFIERMTNFDKNLPNEKVLPKHSLLYEYFTVYNELTKVKYVTEGMRKPAFLSGEQKKAIVDLLFKTNRKVTVKQLKEDYFKKIECFDSVEISGVEDRFNASLGTYHDLLKIIKDKDFLDNEENEDILEDIVLTLTLFEDREMIEERLKTYAHLFDDKVMKQLKRRRYTGWGRLSRKLINGIRDKQSGKTILDFLKSDGFANRNFMQLIHDDSLTFKEDIQKAQVSGQGDSLHEHIANLAGSPAIKKGILQTVKVVDELVKVMGRHKPENIVIEMARENQTTQKGQKNSRERMKRIEEGIKELGSQILKEHPVENTQLQNEKLYLYYLQNGRDMYVDQELDINRLSDYDVDHIVPQSFLKDDSIDNKVLTRSDKARGKSDNVPSEEVVKKMKNYWRQLLNAKLITQRKFDNLTKAERGGLSELDKAGFIKRQLVETRQITKHVAQILDSRMNTKYDENDKLIREVKVITLKSKLVSDFRKDFQFYKVREINNYHHAHDAYLNAVVGTALIKKYPKLESEFVYGDYKVYDVRKMIAKSEQEIGKATAKYFFYSNIMNFFKTEITLANGEIRKRPLIETNGETGEIVWDKGRDFATVRKVLSMPQVNIVKKTEVQTGGFSKESILPKRNSDKLIARKKDWDPKKYGGFDSPTVAYSVLVVAKVEKGKSKKLKSVKELLGITIMERSSFEKNPIDFLEAKGYKEVKKDLIIKLPKYSLFELENGRKRMLASAGELQKGNELALPSKYVNFLYLASHYEKLKGSPEDNEQKQLFVEQHKHYLDEIIEQISEFSKRVILADANLDKVLSAYNKHRDKPIREQAENIIHLFTLTNLGAPAAFKYFDTTIDRKRYTSTKEVLDATLIHQSITGLYETRIDLSQLGGDGGGGGGGSGSSGGTLNIEDEHRLHETSKEPDVSLGSTWLSDFPQAWAETGGMGLAVRQAPLIIPLKATSTPVSIKQYPMSQEARLGIKPHIQRLLDQGILVPCQSPWNTPLLPVKKPGTNDYRPVQDLREVNKRVEDIHPTVPNPYNLLSGLPPSHQWYTVLDLKDAFFCLRLHPTSQPLFAFEWRDPEMGISGQLTWTRLPQGFKNSPTLFNEALHRDLADFRIQHPDLILLQYVDDLLLAATSELDCQQGTRALLQTLGNLGYRASAKKAQICQKQVKYLGYLLKEGQRWLTEARKETVMGQPTPKTPRQLREFLGTAGFCRLWIPGFAEMAAPLYPLTKPGTLFNWGPDQQKAYQEIKQALLTAPALGLPDLTKPFELFVDEKQGYAKGVLTQKLGPWRRPVAYLSKKLDPVAAGWPPCLRMVAAIAVLTKDAGKLTMGQPLVILAPHAVEALVKQPPDRWLSNARMTHYQALLLDTDRVQFGPVVALNPATLLPLPEEGLQHNCLDILAEAHGTRPDLTDQPLPDADHTWYTDGSSLLQEGQRKAGAAVTTETEVIWAKALPAGTSAQRAELIALTQALKMAEGKKLNVYTDSRYAFATAHIHGEIYRRRGWLTSEGKEIKNKDEILALLKALFLPKRLSIIHCPGHQKGHSAEARGNRMADQAARKAAITETPDTSTLLAGKRTADGSEFEKRTADGSEFESPKKKAKVE

SEQ ID NO: 6832 - protein, 2094 aa, synthetic construct; identical to SEQ ID NO: 6831

SEQ ID NO: 6833 - protein, 2086 aa, synthetic construct
MPAAKRVKLDGGDKKYSIGLDIGTNSVGWAVITDEYKVPSKKFKVLGNTDRHSIKKNLIGALLFDSGETAEATRLKRTARRRYTRRKNRICYLQEIFSNEMAKVDDSFFHRLEESFLVEEDKKHERHPIFGNIVDEVAYHEKYPTIYHLRKKLVDSTDKADLRLIYLALAHMIKFRGHFLIEGDLNPDNSDVDKLFIQLVQTYNQLFEENPINASGVDAKAILSARLSKSRRLENLIAQLPGEKKNGLFGNLIALSLGLTPNFKSNFDLAEDAKLQLSKDTYDDDLDNLLAQIGDQYADLFLAAKNLSDAILLSDILRVNTEITKAPLSASMIKRYDEHHQDLTLLKALVRQQLPEKYKEIFFDQSKNGYAGYIDGGASQEEFYKFIKPILEKMDGTEELLVKLNREDLLRKQRTFDNGSIPHQIHLGELHAILRRQEDFYPFLKDNREKIEKILTFRIPYYVGPLARGNSRFAWMTRKSEETITPWNFEEVVDKGASAQSFIERMTNFDKNLPNEKVLPKHSLLYEYFTVYNELTKVKYVTEGMRKPAFLSGEQKKAIVDLLFKTNRKVTVKQLKEDYFKKIECFDSVEISGVEDRFNASLGTYHDLLKIIKDKDFLDNEENEDILEDIVLTLTLFEDREMIEERLKTYAHLFDDKVMKQLKRRRYTGWGRLSRKLINGIRDKQSGKTILDFLKSDGFANRNFMQLIHDDSLTFKEDIQKAQVSGQGDSLHEHIANLAGSPAIKKGILQTVKVVDELVKVMGRHKPENIVIEMARENQTTQKGQKNSRERMKRIEEGIKELGSQILKEHPVENTQLQNEKLYLYYLQNGRDMYVDQELDINRLSDYDVDHIVPQSFLKDDSIDNKVLTRSDKARGKSDNVPSEEVVKKMKNYWRQLLNAKLITQRKFDNLTKAERGGLSELDKAGFIKRQLVETRQITKHVAQILDSRMNTKYDENDKLIREVKVITLKSKLVSDFRKDFQFYKVREINNYHHAHDAYLNAVVGTALIKKYPKLESEFVYGDYKVYDVRKMIAKSEQEIGKATAKYFFYSNIMNFFKTEITLANGEIRKRPLIETNGETGEIVWDKGRDFATVRKVLSMPQVNIVKKTEVQTGGFSKESILPKRNSDKLIARKKDWDPKKYGGFDSPTVAYSVLVVAKVEKGKSKKLKSVKELLGITIMERSSFEKNPIDFLEAKGYKEVKKDLIIKLPKYSLFELENGRKRMLASAGELQKGNELALPSKYVNFLYLASHYEKLKGSPEDNEQKQLFVEQHKHYLDEIIEQISEFSKRVILADANLDKVLSAYNKHRDKPIREQAENIIHLFTLTNLGAPAAFKYFDTTIDRKRYTSTKEVLDATLIHQSITGLYETRIDLSQLGGDGGGGGGGSGSSGGLDDEYRLYSPLVKPDQNIQFWLEQFPQAWAETAGMGLAKQVPPQVIQLKASATPVSVRQYPLSKEAQEGIRPHVQRLIQQGILVPVQSPWNTPLLPVRKPGTNDYRPVQDLREVNKRVQDIHPTVPNPYNLLCALPPQRSWYTVLDLKDAFFCLRLHPTSQPLFAFEWRDPGTGRTGQLTWTRLPQGFKNSPTIFNEALHRDLANFRIQHPQVTLLQYVDDLLLAGATKQDCLEGTKALLLELSDLGYRASAKKAQICRREVTYLGYSLRDGQRWLTEARKKTVVQIPAPTTAKQVREFLGKAGFCRLFIPGFATLAAPLYPLTKPKGEFSWAPEHQKAFDAIKKALLSAPALALPDVTKPFTLYVDERKGVARGVLTQTLGPWRRPVAYLSKKLDPVASGWPVCLKAIAAVAILVKDADKLTLGQNITVIAPHALENIVRQPPDRWMTNARMTHYQSLLLTERVTFAPPAALNPATLLPEETDEPVTHDCHQLLIEETGVRKDLTDIPLTGEVLTWFTDGSSYVVEGKRMAGAAVVDGTRTIWASSLPEGTSAQKAELMALTQALRLAEGKSINIYTDSRYAFATAHVHGAIYKQRGWLTSAGREIKNKEEILSLLEALHLPKRLAIIHCPGHQKAKDPISRGNQMADRVAKQAAQGVNLLPAGKRTADGSEFEKRTADGSEFESPKKKAKVE

SEQ ID NO: 6834 - protein, 2086 aa, synthetic construct; identical to SEQ ID NO: 6833

SEQ ID NO: 6835 - protein, 2088 aa, synthetic construct
MPAAKRVKLDGGDKKYSIGLDIGTNSVGWAVITDEYKVPSKKFKVLGNTDRHSIKKNLIGALLFDSGETAEATRLKRTARRRYTRRKNRICYLQEIFSNEMAKVDDSFFHRLEESFLVEEDKKHERHPIFGNIVDEVAYHEKYPTIYHLRKKLVDSTDKADLRLIYLALAHMIKFRGHFLIEGDLNPDNSDVDKLFIQLVQTYNQLFEENPINASGVDAKAILSARLSKSRRLENLIAQLPGEKKNGLFGNLIALSLGLTPNFKSNFDLAEDAKLQLSKDTYDDDLDNLLAQIGDQYADLFLAAKNLSDAILLSDILRVNTEITKAPLSASMIKRYDEHHQDLTLLKALVRQQLPEKYKEIFFDQSKNGYAGYIDGGASQEEFYKFIKPILEKMDGTEELLVKLNREDLLRKQRTFDNGSIPHQIHLGELHAILRRQEDFYPFLKDNREKIEKILTFRIPYYVGPLARGNSRFAWMTRKSEETITPWNFEEVVDKGASAQSFIERMTNFDKNLPNEKVLPKHSLLYEYFTVYNELTKVKYVTEGMRKPAFLSGEQKKAIVDLLFKTNRKVTVKQLKEDYFKKIECFDSVEISGVEDRFNASLGTYHDLLKIIKDKDFLDNEENEDILEDIVLTLTLFEDREMIEERLKTYAHLFDDKVMKQLKRRRYTGWGRLSRKLINGIRDKQSGKTILDFLKSDGFANRNFMQLIHDDSLTFKEDIQKAQVSGQGDSLHEHIANLAGSPAIKKGILQTVKVVDELVKVMGRHKPENIVIEMARENQTTQKGQKNSRERMKRIEEGIKELGSQILKEHPVENTQLQNEKLYLYYLQNGRDMYVDQELDINRLSDYDVDHIVPQSFLKDDSIDNKVLTRSDKARGKSDNVPSEEVVKKMKNYWRQLLNAKLITQRKFDNLTKAERGGLSELDKAGFIKRQLVETRQITKHVAQILDSRMNTKYDENDKLIREVKVITLKSKLVSDFRKDFQFYKVREINNYHHAHDAYLNAVVGTALIKKYPKLESEFVYGDYKVYDVRKMIAKSEQEIGKATAKYFFYSNIMNFFKTEITLANGEIRKRPLIETNGETGEIVWDKGRDFATVRKVLSMPQVNIVKKTEVQTGGFSKESILPKRNSDKLIARKKDWDPKKYGGFDSPTVAYSVLVVAKVEKGKSKKLKSVKELLGITIMERSSFEKNPIDFLEAKGYKEVKKDLIIKLPKYSLFELENGRKRMLASAGELQKGNELALPSKYVNFLYLASHYEKLKGSPEDNEQKQLFVEQHKHYLDEIIEQISEFSKRVILADANLDKVLSAYNKHRDKPIREQAENIIHLFTLTNLGAPAAFKYFDTTIDRKRYTSTKEVLDATLIHQSITGLYETRIDLSQLGGDGGGGGGGSGSSGGTLQLDDEYRLYSPLVKPDQNIQFWLEQFPQAWAETAGMGLAKQVPPQVIQLKASATPVSVRQYPLSKEAQEGIRPHVQRLIQQGILVPVQSPWNTPLLPVRKPGTNDYRPVQDLREVNKRVQDIHPTVPNPYNLLCALPPQRSWYTVLDLKDAFFCLRLHPTSQPLFAFEWRDPGTGRTGQLTWTRLPQGFKNSPTIFDEALHRDLANFRIQHPQVTLLQYVDDLLLAGATKQDCLEGTKALLLELSDLGYRASAKKAQICRREVTYLGYSLRDGQRWLTEARKKTVVQIPAPTTAKQVREFLGTAGFCRLWIPGFATLAAPLYPLTKEKGEFSWAPEHQKAFDAIKKALLSAPALALPDVTKPFTLYVDERKGVARGVLTQTLGPWRRPVAYLSKKLDPVASGWPVCLKAIAAVAILVKDADKLTLGQNITVIAPHALENIVRQPPDRWMTNARMTHYQSLLLTERVTFAPPAALNPATLLPEETDEPVTHDCHQLLIEETGVRKDLTDIPLTGEVLTWFTDGSSYVVEGKRMAGAAVVDGTRTIWASSLPEGTSAQKAELMALTQALRLAEGKSINIYTDSRYAFATAHVHGAIYKQRGLLTSAGREIKNKEEILSLLEALHLPKRLAIIHCPGHQKAKDPISRGNQMADRVAKQAAQGVNLLAGKRTADGSEFEKRTADGSEFESPKKKAKVE

SEQ ID NO: 6836 - protein, 2085 aa, synthetic construct
MPAAKRVKLDGGDKKYSIGLDIGTNSVGWAVITDEYKVPSKKFKVLGNTDRHSIKKNLIGALLFDSGETAEATRLKRTARRRYTRRKNRICYLQEIFSNEMAKVDDSFFHRLEESFLVEEDKKHERHPIFGNIVDEVAYHEKYPTIYHLRKKLVDSTDKADLRLIYLALAHMIKFRGHFLIEGDLNPDNSDVDKLFIQLVQTYNQLFEENPINASGVDAKAILSARLSKSRRLENLIAQLPGEKKNGLFGNLIALSLGLTPNFKSNFDLAEDAKLQLSKDTYDDDLDNLLAQIGDQYADLFLAAKNLSDAILLSDILRVNTEITKAPLSASMIKRYDEHHQDLTLLKALVRQQLPEKYKEIFFDQSKNGYAGYIDGGASQEEFYKFIKPILEKMDGTEELLVKLNREDLLRKQRTFDNGSIPHQIHLGELHAILRRQEDFYPFLKDNREKIEKILTFRIPYYVGPLARGNSRFAWMTRKSEETITPWNFEEVVDKGASAQSFIERMTNFDKNLPNEKVLPKHSLLYEYFTVYNELTKVKYVTEGMRKPAFLSGEQKKAIVDLLFKTNRKVTVKQLKEDYFKKIECFDSVEISGVEDRFNASLGTYHDLLKIIKDKDFLDNEENEDILEDIVLTLTLFEDREMIEERLKTYAHLFDDKVMKQLKRRRYTGWGRLSRKLINGIRDKQSGKTILDFLKSDGFANRNFMQLIHDDSLTFKEDIQKAQVSGQGDSLHEHIANLAGSPAIKKGILQTVKVVDELVKVMGRHKPENIVIEMARENQTTQKGQKNSRERMKRIEEGIKELGSQILKEHPVENTQLQNEKLYLYYLQNGRDMYVDQELDINRLSDYDVDHIVPQSFLKDDSIDNKVLTRSDKARGKSDNVPSEEVVKKMKNYWRQLLNAKLITQRKFDNLTKAERGGLSELDKAGFIKRQLVETRQITKHVAQILDSRMNTKYDENDKLIREVKVITLKSKLVSDFRKDFQFYKVREINNYHHAHDAYLNAVVGTALIKKYPKLESEFVYGDYKVYDVRKMIAKSEQEIGKATAKYFFYSNIMNFFKTEITLANGEIRKRPLIETNGETGEIVWDKGRDFATVRKVLSMPQVNIVKKTEVQTGGFSKESILPKRNSDKLIARKKDWDPKKYGGFDSPTVAYSVLVVAKVEKGKSKKLKSVKELLGITIMERSSFEKNPIDFLEAKGYKEVKKDLIIKLPKYSLFELENGRKRMLASAGELQKGNELALPSKYVNFLYLASHYEKLKGSPEDNEQKQLFVEQHKHYLDEIIEQISEFSKRVILADANLDKVLSAYNKHRDKPIREQAENIIHLFTLTNLGAPAAFKYFDTTIDRKRYTSTKEVLDATLIHQSITGLYETRIDLSQLGGDGGGGGGGSGSSGGVPWLMKKPLQLTVLVPLHEYQERLLQQTALPKEQKELLQKLFLKYDALWQHWENQVGHRRIKPHNIATGTLAPRPQKQYPINPKAKPSIQIVIDDLLKQGVLIQQNSTMNTPVYPVPKPDGKWRMVLDYREVNKTIPLIAAQNQHSAGILSSIYRGKYKTTLDLTNGFWAHPITPESYWLTAFTWQGKQYCWTRLPQGFLNSPALFTADVVDLLKEIPNVQAYVDDIYISHDDPQEHLEQLEKIFSILLNAGYVVSLKKSEIAQREVEFLGFNITKEGRGLTDTFKQKLLNITPPKDLKQLQSILGLLNFARNFIPNYSELVKPLYTIVANANGKFISWTEDNSNQLQHIISVLNQADNLEERNPETRLIIKVNSSPSAGYIRYYNEGSKRPIMYVNYIFSKAEAKFTQTEKLLTTMHKGLIKAMDLAMGQEILVYSPIVSMTKIQRTPLPERKALPVRWITWMTYLEDPRIQFHYDKSLPELQQIPNVTEDVIAKTKHPSEFAMVFYTDGSAIKHPDVNKSHSAGMGIAQVQFIPEYKIVHQWSIPLGDHTAQLAEIAAVEFACKKALKISGPVLIVTDSFYVAESANKELPYWKSNGFLNNKKKPLRHVSKWKSIAECLQLKPDIIIMHEKGHQQPMTTLHTEGNNLADKLATQGSYVVHAGKRTADGSEFEKRTADGSEFESPKKKAKVE

SEQ ID NO: 6837 - protein, 2085 aa, synthetic construct
MPAAKRVKLDGGDKKYSIGLDIGTNSVGWAVITDEYKVPSKKFKVLGNTDRHSIKKNLIGALLFDSGETAEATRLKRTARRRYTRRKNRICYLQEIFSNEMAKVDDSFFHRLEESFLVEEDKKHERHPIFGNIVDEVAYHEKYPTIYHLRKKLVDSTDKADLRLIYLALAHMIKFRGHFLIEGDLNPDNSDVDKLFIQLVQTYNQLFEENPINASGVDAKAILSARLSKSRRLENLIAQLPGEKKNGLFGNLIALSLGLTPNFKSNFDLAEDAKLQLSKDTYDDDLDNLLAQIGDQYADLFLAAKNLSDAILLSDILRVNTEITKAPLSASMIKRYDEHHQDLTLLKALVRQQLPEKYKEIFFDQSKNGYAGYIDGGASQEEFYKFIKPILEKMDGTEELLVKLNREDLLRKQRTFDNGSIPHQIHLGELHAILRRQEDFYPFLKDNREKIEKILTFRIPYYVGPLARGNSRFAWMTRKSEETITPWNFEEVVDKGASAQSFIERMTNFDKNLPNEKVLPKHSLLYEYFTVYNELTKVKYVTEGMRKPAFLSGEQKKAIVDLLFKTNRKVTVKQLKEDYFKKIECFDSVEISGVEDRFNASLGTYHDLLKIIKDKDFLDNEENEDILEDIVLTLTLFEDREMIEERLKTYAHLFDDKVMKQLKRRRYTGWGRLSRKLINGIRDKQSGKTILDFLKSDGFANRNFMQLIHDDSLTFKEDIQKAQVSGQGDSLHEHIANLAGSPAIKKGILQTVKVVDELVKVMGRHKPENIVIEMARENQTTQKGQKNSRERMKRIEEGIKELGSQILKEHPVENTQLQNEKLYLYYLQNGRDMYVDQELDINRLSDYDVDHIVPQSFLKDDSIDNKVLTRSDKARGKSDNVPSEEVVKKMKNYWRQLLNAKLITQRKFDNLTKAERGGLSELDKAGFIKRQLVETRQITKHVAQILDSRMNTKYDENDKLIREVKVITLKSKLVSDFRKDFQFYKVREINNYHHAHDAYLNAVVGTALIKKYPKLESEFVYGDYKVYDVRKMIAKSEQEIGKATAKYFFYSNIMNFFKTEITLANGEIRKRPLIETNGETGEIVWDKGRDFATVRKVLSMPQVNIVKKTEVQTGGFSKESILPKRNSDKLIARKKDWDPKKYGGFDSPTVAYSVLVVAKVEKGKSKKLKSVKELLGITIMERSSFEKNPIDFLEAKGYKEVKKDLIIKLPKYSLFELENGRKRMLASAGELQKGNELALPSKYVNFLYLASHYEKLKGSPEDNEQKQLFVEQHKHYLDEIIEQISEFSKRVILADANLDKVLSAYNKHRDKPIREQAENIIHLFTLTNLGAPAAFKYFDTTIDRKRYTSTKEVLDATLIHQSITGLYETRIDLSQLGGDGGGGGGGSGSSGGVPWLMKKPLQLTVLVPLHEYQERLLQQTALPKEQKELLQKLFLKYDALWQHWENQVGHRRIKPHNIATGTLAPRPQKQYPINPKAKPSIQIVIDDLLKQGVLIQQNSTMNTPVYPVPKPDGKWRMVLDYREVNKTIPLIAAQNQHSAGILSSIYRGKYKTTLDLTNGFWAHPITPESYWLTAFTWQGKQYCWTRLPQGFLNSPALFNADVVDLLKEIPNVQAYVDDIYISHDDPQEHLEQLEKIFSILLNAGYVVSLKKSEIAQREVEFLGFNITKEGRGLTDTFKQKLLNITPPKDLKQLQSILGLLNFARNFIPNYSELVKPLYTIVAPANGKFISWTEDNSNQLQHIISVLNQADNLEERNPETRLIIKVNSSPSAGYIRYYNEGSKRPIMYVNYIFSKAEAKFTQTEKLLTTMHKGLIKAMDLAMGQEILVYSPIVSMTKIQRTPLPERKALPVRWITWMTYLEDPRIQFHYDKSLPELQQIPNVTEDVIAKTKHPSEFAMVFYTDGSAIKHPDVNKSHSAGMGIAQVQFIPEYKIVHQWSIPLGDHTAQLAEIAAVEFACKKALKISGPVLIVTDSFYVAESANKELPYWKSNGFLNNKKKPLRHVSKWKSIAECLQLKPDIIIMHEKGHQQPMTTLHTEGNNLADKLATQGSYVVHAGKRTADGSEFEKRTADGSEFESPKKKAKVE

SEQ ID NO: 6838 - protein, 2174 aa, synthetic construct
MPAAKRVKLDGGDKKYSIGLDIGTNSVGWAVITDEYKVPSKKFKVLGNTDRHSIKKNLIGALLFDSGETAEATRLKRTARRRYTRRKNRICYLQEIFSNEMAKVDDSFFHRLEESFLVEEDKKHERHPIFGNIVDEVAYHEKYPTIYHLRKKLVDSTDKADLRLIYLALAHMIKFRGHFLIEGDLNPDNSDVDKLFIQLVQTYNQLFEENPINASGVDAKAILSARLSKSRRLENLIAQLPGEKKNGLFGNLIALSLGLTPNFKSNFDLAEDAKLQLSKDTYDDDLDNLLAQIGDQYADLFLAAKNLSDAILLSDILRVNTEITKAPLSASMIKRYDEHHQDLTLLKALVRQQLPEKYKEIFFDQSKNGYAGYIDGGASQEEFYKFIKPILEKMDGTEELLVKLNREDLLRKQRTFDNGSIPHQIHLGELHAILRRQEDFYPFLKDNREKIEKILTFRIPYYVGPLARGNSRFAWMTRKSEETITPWNFEEVVDKGASAQSFIERMTNFDKNLPNEKVLPKHSLLYEYFTVYNELTKVKYVTEGMRKPAFLSGEQKKAIVDLLFKTNRKVTVKQLKEDYFKKIECFDSVEISGVEDRFNASLGTYHDLLKIIKDKDFLDNEENEDILEDIVLTLTLFEDREMIEERLKTYAHLFDDKVMKQLKRRRYTGWGRLSRKLINGIRDKQSGKTILDFLKSDGFANRNFMQLIHDDSLTFKEDIQKAQVSGQGDSLHEHIANLAGSPAIKKGILQTVKVVDELVKVMGRHKPENIVIEMARENQTTQKGQKNSRERMKRIEEGIKELGSQILKEHPVENTQLQNEKLYLYYLQNGRDMYVDQELDINRLSDYDVDHIVPQSFLKDDSIDNKVLTRSDKARGKSDNVPSEEVVKKMKNYWRQLLNAKLITQRKFDNLTKAERGGLSELDKAGFIKRQLVETRQITKHVAQILDSRMNTKYDENDKLIREVKVITLKSKLVSDFRKDFQFYKVREINNYHHAHDAYLNAVVGTALIKKYPKLESEFVYGDYKVYDVRKMIAKSEQEIGKATAKYFFYSNIMNFFKTEITLANGEIRKRPLIETNGETGEIVWDKGRDFATVRKVLSMPQVNIVKKTEVQTGGFSKESILPKRNSDKLIARKKDWDPKKYGGFDSPTVAYSVLVVAKVEKGKSKKLKSVKELLGITIMERSSFEKNPIDFLEAKGYKEVKKDLIIKLPKYSLFELENGRKRMLASAGELQKGNELALPSKYVNFLYLASHYEKLKGSPEDNEQKQLFVEQHKHYLDEIIEQISEFSKRVILADANLDKVLSAYNKHRDKPIREQAENIIHLFTLTNLGAPAAFKYFDTTIDRKRYTSTKEVLDATLIHQSITGLYETRIDLSQLGGDGGGGGGGSGSSGGMDPLQLLQPLEAEIKGTKLKAHWNSGATITCVPQAFLEEEVPIKNIWIKTIHGEKEQPVYYLTFKIQGRKVEAEVISSPYDYILVSPSDIPWLMKKPLQLTTLVPLQEYEERLLKQTMLTGSYKEKLQSLFLKYDALWQHWENQVGHRRIKPHHIATGTVNPRPQKQYPINPKAKASIQTVINDLLKQGVLIQQNSIMNTPVYPVPKPDGKWRMVLDYREVNKTIPLIAAQNQHSAGILSSIFRGKYKTTLDLSNGFWAHSITPESYWLTAFTWLGQQYCWTRLPQGFLNSPALFNADVVDLLKEVPNVQVYVDDIYISHDDPREHLEQLEKVFSLLLNAGYVVSLKKSEIAQHEVEFLGFNITKEGRGLTETFKQKLLNITPPRDLKQLQSILGLLNFARNFIPNFSELVKPLYNIIATAPGKYITWTTDNSQQLQNIISMLNSAENLEERNPEVRLIMKVNTSPSAGYIRFYNEFAKRPIMYLNYVYTKAEVKFTNTEKLLTTIHKGLIKALDLGMGQEILVYSPIVSMTKIQKTPLPERKALPIRWITWMSYLEDPRIQFHYDKTLPELQQVPTVTDDIIAKIKHPSEFSMVFYTDGSAIKHPNVNKSHNAGMGIAQVQFKPEFTVINTWSIPLGDHTAQLAEVAAVEFACKKALKIDGPVLIVTDSFYVAESVNKELPYWQSNGFFNNKKKPLKHVSKWKSIADCIQLKPDIIIIHEKGHQPTASTFHTEGNNLADKLATQGSYVVNAGKRTADGSEFEKRTADGSEFESPKKKAKVE

SEQ ID NO: 6839 - protein, 2092 aa, synthetic construct
MPAAKRVKLDGGDKKYSIGLDIGTNSVGWAVITDEYKVPSKKFKVLGNTDRHSIKKNLIGALLFDSGETAEATRLKRTARRRYTRRKNRICYLQEIFSNEMAKVDDSFFHRLEESFLVEEDKKHERHPIFGNIVDEVAYHEKYPTIYHLRKKLVDSTDKADLRLIYLALAHMIKFRGHFLIEGDLNPDNSDVDKLFIQLVQTYNQLFEENPINASGVDAKAILSARLSKSRRLENLIAQLPGEKKNGLFGNLIALSLGLTPNFKSNFDLAEDAKLQLSKDTYDDDLDNLLAQIGDQYADLFLAAKNLSDAILLSDILRVNTEITKAPLSASMIKRYDEHHQDLTLLKALVRQQLPEKYKEIFFDQSKNGYAGYIDGGASQEEFYKFIKPILEKMDGTEELLVKLNREDLLRKQRTFDNGSIPHQIHLGELHAILRRQEDFYPFLKDNREKIEKILTFRIPYYVGPLARGNSRFAWMTRKSEETITPWNFEEVVDKGASAQSFIERMTNFDKNLPNEKVLPKHSLLYEYFTVYNELTKVKYVTEGMRKPAFLSGEQKKAIVDLLFKTNRKVTVKQLKEDYFKKIECFDSVEISGVEDRFNASLGTYHDLLKIIKDKDFLDNEENEDILEDIVLTLTLFEDREMIEERLKTYAHLFDDKVMKQLKRRRYTGWGRLSRKLINGIRDKQSGKTILDFLKSDGFANRNFMQLIHDDSLTFKEDIQKAQVSGQGDSLHEHIANLAGSPAIKKGILQTVKVVDELVKVMGRHKPENIVIEMARENQTTQKGQKNSRERMKRIEEGIKELGSQILKEHPVENTQLQNEKLYLYYLQNGRDMYVDQELDINRLSDYDVDHIVPQSFLKDDSIDNKVLTRSDKARGKSDNVPSEEVVKKMKNYWRQLLNAKLITQRKFDNLTKAERGGLSELDKAGFIKRQLVETRQITKHVAQILDSRMNTKYDENDKLIREVKVITLKSKLVSDFRKDFQFYKVREINNYHHAHDAYLNAVVGTALIKKYPKLESEFVYGDYKVYDVRKMIAKSEQEIGKATAKYFFYSNIMNFFKTEITLANGEIRKRPLIETNGETGEIVWDKGRDFATVRKVLSMPQVNIVKKTEVQTGGFSKESILPKRNSDKLIARKKDWDPKKYGGFDSPTVAYSVLVVAKVEKGKSKKLKSVKELLGITIMERSSFEKNPIDFLEAKGYKEVKKDLIIKLPKYSLFELENGRKRMLASAGELQKGNELALPSKYVNFLYLASHYEKLKGSPEDNEQKQLFVEQHKHYLDEIIEQISEFSKRVILADANLDKVLSAYNKHRDKPIREQAENIIHLFTLTNLGAPAAFKYFDTTIDRKRYTSTKEVLDATLIHQSITGLYETRIDLSQLGGDGGGGGGGSGSSGGVLNLEEEYRLHEKPVPSSIDPSWLQLFPTVWAERAGMGLANQVPPVVVELRSGASPVAVRQYPMSKEAREGIRPHIQRFLDLGVLVPCQSPWNTPLLPVKKPGTNDYRPVQDLREINKRVQDIHPTVPNPYNLLSSLPPSHTWYSVLDLKDAFFCLKLHPNSQPLFAFEWRDPEKGNTGQLTWTRLPQGFKNSPTLFNEALHRDLAPFRALNPQVVLLQYVDDLLVAAPTYRDCKEGTQKLLQELSKLGYRVSAKKAQLCQKEVTYLGYLLKEGKRWLTPARKATVMKIPPPTTPRQVREFLGTAGFCRLWIPGFASLAAPLYPLTKPSIPFIWTEEHQKAFDRIKEALLSAPALALPDLTKPFTLYVDERAGVARGVLTQTLGPWRRPVAYLSKKLDPVASGWPTCLKAVAAVALLLKDADKLTLGQNVTVIASHSLESIVRQPPDRWMTNARMTHYQSLLLNERVSFAPPAVLNPATLLPVESEATPVHRCSEILAEETGTRRDLKDQPLPGVPAWYTDGSSFIAEGKRRAGAAIVDGKRTVWASSLPEGTSAQKAELVALTQALRLAEGKDINIYTDSRYAFATAHIHGAIYKQRGWLTSAGKDIKNKEEILALLEAIHLPKRVAIIHCPGHQKGNDPVATGNRRADEAAKQAALSTRVLAETTKPAGKRTADGSEFEKRTADGSEFESPKKKAKVE

SEQ ID NO: 6840 - protein, 2096 aa, synthetic construct
MPAAKRVKLDGGDKKYSIGLDIGTNSVGWAVITDEYKVPSKKFKVLGNTDRHSIKKNLIGALLFDSGETAEATRLKRTARRRYTRRKNRICYLQEIFSNEMAKVDDSFFHRLEESFLVEEDKKHERHPIFGNIVDEVAYHEKYPTIYHLRKKLVDSTDKADLRLIYLALAHMIKFRGHFLIEGDLNPDNSDVDKLFIQLVQTYNQLFEENPINASGVDAKAILSARLSKSRRLENLIAQLPGEKKNGLFGNLIALSLGLTPNFKSNFDLAEDAKLQLSKDTYDDDLDNLLAQIGDQYADLFLAAKNLSDAILLSDILRVNTEITKAPLSASMIKRYDEHHQDLTLLKALVRQQLPEKYKEIFFDQSKNGYAGYIDGGASQEEFYKFIKPILEKMDGTEELLVKLNREDLLRKQRTFDNGSIPHQIHLGELHAILRRQEDFYPFLKDNREKIEKILTFRIPYYVGPLARGNSRFAWMTRKSEETITPWNFEEVVDKGASAQSFIERMTNFDKNLPNEKVLPKHSLLYEYFTVYNELTKVKYVTEGMRKPAFLSGEQKKAIVDLLFKTNRKVTVKQLKEDYFKKIECFDSVEISGVEDRFNASLGTYHDLLKIIKDKDFLDNEENEDILEDIVLTLTLFEDREMIEERLKTYAHLFDDKVMKQLKRRRYTGWGRLSRKLINGIRDKQSGKTILDFLKSDGFANRNFMQLIHDDSLTFKEDIQKAQVSGQGDSLHEHIANLAGSPAIKKGILQTVKVVDELVKVMGRHKPENIVIEMARENQTTQKGQKNSRERMKRIEEGIKELGSQILKEHPVENTQLQNEKLYLYYLQNGRDMYVDQELDINRLSDYDVDHIVPQSFLKDDSIDNKVLTRSDKARGKSDNVPSEEVVKKMKNYWRQLLNAKLITQRKFDNLTKAERGGLSELDKAGFIKRQLVETRQITKHVAQILDSRMNTKYDENDKLIREVKVITLKSKLVSDFRKDFQFYKVREINNYHHAHDAYLNAVVGTALIKKYPKLESEFVYGDYKVYDVRKMIAKSEQEIGKATAKYFFYSNIMNFFKTEITLANGEIRKRPLIETNGETGEIVWDKGRDFATVRKVLSMPQVNIVKKTEVQTGGFSKESILPKRNSDKLIARKKDWDPKKYGGFDSPTVAYSVLVVAKVEKGKSKKLKSVKELLGITIMERSSFEKNPIDFLEAKGYKEVKKDLIIKLPKYSLFELENGRKRMLASAGELQKGNELALPSKYVNFLYLASHYEKLKGSPEDNEQKQLFVEQHKHYLDEIIEQISEFSKRVILADANLDKVLSAYNKHRDKPIREQAENIIHLFTLTNLGAPAAFKYFDTTIDRKRYTSTKEVLDATLIHQSITGLYETRIDLSQLGGDGGGGGGSSGGSGGTAPLEEEYRLFLEAPIQNVTLLEQWKREIPKVWAEINPPGLASTQAPIHVQLLSTALPVRVRQYPITLEAKRSLRETIRKFRAAGILRPVHSPWNTPLLPVRKSGTSEYRMVQDLREVNKRVETIHPTVPNPYTLLSLLPPDRIWYSVLDLKDAFFCIPLAPESQLIFAFEWADAEEGESGQLTWTRLPQGFKNSPTLFDEALNRDLQGFRLDHPSVSLLQYVDDLLIAADTQAACLSATRDLLMTLAELGYRVSGKKAQLCQEEVTYLGFKIHKGSRSLSNSRTQAILQIPVPKTKRQVREFLGTIGYCRLWIPGFAELAQPLYAATRGGNDPLVWGEKEEEAFQSLKLALTQPPALALPSLDKPFQLFVEETSGAAKGVLTQALGPWKRPVAYLSKRLDPVAAGWPRCLRAIAAAALLTREASKLTFGQDIEITSSHNLESLLRSPPDKWLTNARITQYQVLLLDPPRVRFKQTAALNPATLLPETDDTLPIHHCLDTLDSLTSTRPDLTDQPLAQAEATLFTDGSSYIRDGKRYAGAAVVTLDSVIWAEPLPIGTSAQKAELIALTKALEWSKDKSVNIYTDSRYAFATLHVHGMIYRERGLLTAGGKAIKNAPEILALLTAVWLPKRVAVMHCKGHQKDDAPTSTGNRRADEVAREVAIRPLSTQATISAGKRTADGSEFEKRTADGSEFESPKKKAKVE

SEQ ID NO: 6841 - protein, 2096 aa, synthetic construct
MPAAKRVKLDGGDKKYSIGLDIGTNSVGWAVITDEYKVPSKKFKVLGNTDRHSIKKNLIGALLFDSGETAEATRLKRTARRRYTRRKNRICYLQEIFSNEMAKVDDSFFHRLEESFLVEEDKKHERHPIFGNIVDEVAYHEKYPTIYHLRKKLVDSTDKADLRLIYLALAHMIKFRGHFLIEGDLNPDNSDVDKLFIQLVQTYNQLFEENPINASGVDAKAILSARLSKSRRLENLIAQLPGEKKNGLFGNLIALSLGLTPNFKSNFDLAEDAKLQLSKDTYDDDLDNLLAQIGDQYADLFLAAKNLSDAILLSDILRVNTEITKAPLSASMIKRYDEHHQDLTLLKALVRQQLPEKYKEIFFDQSKNGYAGYIDGGASQEEFYKFIKPILEKMDGTEELLVKLNREDLLRKQRTFDNGSIPHQIHLGELHAILRRQEDFYPFLKDNREKIEKILTFRIPYYVGPLARGNSRFAWMTRKSEETITPWNFEEVVDKGASAQSFIERMTNFDKNLPNEKVLPKHSLLYEYFTVYNELTKVKYVTEGMRKPAFLSGEQKKAIVDLLFKTNRKVTVKQLKEDYFKKIECFDSVEISGVEDRFNASLGTYHDLLKIIKDKDFLDNEENEDILEDIVLTLTLFEDREMIEERLKTYAHLFDDKVMKQLKRRRYTGWGRLSRKLINGIRDKQSGKTILDFLKSDGFANRNFMQLIHDDSLTFKEDIQKAQVSGQGDSLHEHIANLAGSPAIKKGILQTVKVVDELVKVMGRHKPENIVIEMARENQTTQKGQKNSRERMKRIEEGIKELGSQILKEHPVENTQLQNEKLYLYYLQNGRDMYVDQELDINRLSDYDVDHIVPQSFLKDDSIDNKVLTRSDKARGKSDNVPSEEVVKKMKNYWRQLLNAKLITQRKFDNLTKAERGGLSELDKAGFIKRQLVETRQITKHVAQILDSRMNTKYDENDKLIREVKVITLKSKLVSDFRKDFQFYKVREINNYHHAHDAYLNAVVGTALIKKYPKLESEFVYGDYKVYDVRKMIAKSEQEIGKATAKYFFYSNIMNFFKTEITLANGEIRKRPLIETNGETGEIVWDKGRDFATVRKVLSMPQVNIVKKTEVQTGGFSKESILPKRNSDKLIARKKDWDPKKYGGFDSPTVAYSVLVVAKVEKGKSKKLKSVKELLGITIMERSSFEKNPIDFLEAKGYKEVKKDLIIKLPKYSLFELENGRKRMLASAGELQKGNELALPSKYVNFLYLASHYEKLKGSPEDNEQKQLFVEQHKHYLDEIIEQISEFSKRVILADANLDKVLSAYNKHRDKPIREQAENIIHLFTLTNLGAPAAFKYFDTTIDRKRYTSTKEVLDATLIHQSITGLYETRIDLSQLGGDGGGGGGSSGGSGGTAPLEEEYRLFLEAPIQNVTLLEQWKREIPKVWAEINPPGLASTQAPIHVQLLSTALPVRVRQYPITLEAKRSLRETIRKFRAAGILRPVHSPWNTPLLPVRKSGTSEYRMVQDLREVNKRVETIHPTVPNPYTLLSLLPPDRIWYSVLDLKDAFFCIPLAPESQLIFAFEWADAEEGESGQLTWTRLPQGFKNSPTLFNEALNRDLQGFRLDHPSVSLLQYVDDLLIAADTQAACLSATRDLLMTLAELGYRVSGKKAQLCQEEVTYLGFKIHKGSRSLSNSRTQAILQIPVPKTKRQVREFLGTIGYCRLWIPGFAELAQPLYAATRPGNDPLVWGEKEEEAFQSLKLALTQPPALALPSLDKPFQLFVEETSGAAKGVLTQALGPWKRPVAYLSKRLDPVAAGWPRCLRAIAAAALLTREASKLTFGQDIEITSSHNLESLLRSPPDKWLTNARITQYQVLLLDPPRVRFKQTAALNPATLLPETDDTLPIHHCLDTLDSLTSTRPDLTDQPLAQAEATLFTDGSSYIRDGKRYAGAAVVTLDSVIWAEPLPIGTSAQKAELIALTKALEWSKDKSVNIYTDSRYAFATLHVHGMIYRERGWLTAGGKAIKNAPEILALLTAVWLPKRVAVMHCKGHQKDDAPTSTGNRRADEVAREVAIRPLSTQATISAGKRTADGSEFEKRTADGSEFESPKKKAKVE

SEQ ID NO: 6842 - protein, 2100 aa, synthetic construct
MPAAKRVKLDGGDKKYSIGLDIGTNSVGWAVITDEYKVPSKKFKVLGNTDRHSIKKNLIGALLFDSGETAEATRLKRTARRRYTRRKNRICYLQEIFSNEMAKVDDSFFHRLEESFLVEEDKKHERHPIFGNIVDEVAYHEKYPTIYHLRKKLVDSTDKADLRLIYLALAHMIKFRGHFLIEGDLNPDNSDVDKLFIQLVQTYNQLFEENPINASGVDAKAILSARLSKSRRLENLIAQLPGEKKNGLFGNLIALSLGLTPNFKSNFDLAEDAKLQLSKDTYDDDLDNLLAQIGDQYADLFLAAKNLSDAILLSDILRVNTEITKAPLSASMIKRYDEHHQDLTLLKALVRQQLPEKYKEIFFDQSKNGYAGYIDGGASQEEFYKFIKPILEKMDGTEELLVKLNREDLLRKQRTFDNGSIPHQIHLGELHAILRRQEDFYPFLKDNREKIEKILTFRIPYYVGPLARGNSRFAWMTRKSEETITPWNFEEVVDKGASAQSFIERMTNFDKNLPNEKVLPKHSLLYEYFTVYNELTKVKYVTEGMRKPAFLSGEQKKAIVDLLFKTNRKVTVKQLKEDYFKKIECFDSVEISGVEDRFNASLGTYHDLLKIIKDKDFLDNEENEDILEDIVLTLTLFEDREMIEERLKTYAHLFDDKVMKQLKRRRYTGWGRLSRKLINGIRDKQSGKTILDFLKSDGFANRNFMQLIHDDSLTFKEDIQKAQVSGQGDSLHEHIANLAGSPAIKKGILQTVKVVDELVKVMGRHKPENIVIEMARENQTTQKGQKNSRERMKRIEEGIKELGSQILKEHPVENTQLQNEKLYLYYLQNGRDMYVDQELDINRLSDYDVDHIVPQSFLKDDSIDNKVLTRSDKARGKSDNVPSEEVVKKMKNYWRQLLNAKLITQRKFDNLTKAERGGLSELDKAGFIKRQLVETRQITKHVAQILDSRMNTKYDENDKLIREVKVITLKSKLVSDFRKDFQFYKVREINNYHHAHDAYLNAVVGTALIKKYPKLESEFVYGDYKVYDVRKMIAKSEQEIGKATAKYFFYSNIMNFFKTEITLANGEIRKRPLIETNGETGEIVWDKGRDFATVRKVLSMPQVNIVKKTEVQTGGFSKESILPKRNSDKLIARKKDWDPKKYGGFDSPTVAYSVLVVAKVEKGKSKKLKSVKELLGITIMERSSFEKNPIDFLEAKGYKEVKKDLIIKLPKYSLFELENGRKRMLASAGELQKGNELALPSKYVNFLYLASHYEKLKGSPEDNEQKQLFVEQHKHYLDEIIEQISEFSKRVILADANLDKVLSAYNKHRDKPIREQAENIIHLFTLTNLGAPAAFKYFDTTIDRKRYTSTKEVLDATLIHQSITGLYETRIDLSQLGGDGGGGGGSSGGSGGTVSLQDEHRLFDIPVTTSLPDVWLQDFPQAWAETGGLGRAKCQAPIIIDLKPTAVPVSIKQYPMSLEAHMGIRQHIIKFLELGVLRPCRSPWNTPLLPVKKPGTQDYRPVQDLREINKRTVDIHPTVPNPYNLLSTLKPDYSWYTVLDLKDAFFCLPLAPQSQELFAFEWKDPERGISGQLTWTRLPQGFKNSPTLFNEALHRDLTDFRTQHPEVTLLQYVDDLLLAAPTKKACTQGTRHLLQELGEKGYRASAKKAQICQTKVTYLGYILSEGKRWLTPGRIETVARIPPPRNPREVREFLGTAGFCRLWIPGFAELAAPLYALTKPSTPFTWQTEHQLAFEALKKALLSAPALGLPDTSKPFTLFLDERQGIAKGVLTQKLGPWKRPVAYLSKKLDPVAAGWPPCLRIMAATAMLVKDSAKLTLGQPLTVITPHTLEAIVRQPPDRWITNARLTHYQALLLDTDRVQFGPPVTLNPATLLPVPENQPSPHDCRQVLAETHGTREDLKDQELPDADHTWYTDGSSYLDSGTRRAGAAVVDGHNTIWAQSLPPGTSAQKAELIALTKALELSKGKKANIYTDSRYAFATAHTHGSIYERRGWLTSEGKEIKNKAEIIALLKALFLPQEVAIIHCPGHQKGQDPVAVGNRQADRVARQAAMAEVLTLATEPDNTSHITAGKRTADGSEFEKRTADGSEFESPKKKAKVE

SEQ ID NO: 6843 - protein, 2085 aa, synthetic construct
MPAAKRVKLDGGDKKYSIGLDIGTNSVGWAVITDEYKVPSKKFKVLGNTDRHSIKKNLIGALLFDSGETAEATRLKRTARRRYTRRKNRICYLQEIFSNEMAKVDDSFFHRLEESFLVEEDKKHERHPIFGNIVDEVAYHEKYPTIYHLRKKLVDSTDKADLRLIYLALAHMIKFRGHFLIEGDLNPDNSDVDKLFIQLVQTYNQLFEENPINASGVDAKAILSARLSKSRRLENLIAQLPGEKKNGLFGNLIALSLGLTPNFKSNFDLAEDAKLQLSKDTYDDDLDNLLAQIGDQYADLFLAAKNLSDAILLSDILRVNTEITKAPLSASMIKRYDEHHQDLTLLKALVRQQLPEKYKEIFFDQSKNGYAGYIDGGASQEEFYKFIKPILEKMDGTEELLVKLNREDLLRKQRTFDNGSIPHQIHLGELHAILRRQEDFYPFLKDNREKIEKILTFRIPYYVGPLARGNSRFAWMTRKSEETITPWNFEEVVDKGASAQSFIERMTNFDKNLPNEKVLPKHSLLYEYFTVYNELTKVKYVTEGMRKPAFLSGEQKKAIVDLLFKTNRKVTVKQLKEDYFKKIECFDSVEISGVEDRFNASLGTYHDLLKIIKDKDFLDNEENEDILEDIVLTLTLFEDREMIEERLKTYAHLFDDKVMKQLKRRRYTGWGRLSRKLINGIRDKQSGKTILDFLKSDGFANRNFMQLIHDDSLTFKEDIQKAQVSGQGDSLHEHIANLAGSPAIKKGILQTVKVVDELVKVMGRHKPENIVIEMARENQTTQKGQKNSRERMKRIEEGIKELGSQILKEHPVENTQLQNEKLYLYYLQNGRDMYVDQELDINRLSDYDVDHIVPQSFLKDDSIDNKVLTRSDKARGKSDNVPSEEVVKKMKNYWRQLLNAKLITQRKFDNLTKAERGGLSELDKAGFIKRQLVETRQITKHVAQILDSRMNTKYDENDKLIREVKVITLKSKLVSDFRKDFQFYKVREINNYHHAHDAYLNAVVGTALIKKYPKLESEFVYGDYKVYDVRKMIAKSEQEIGKATAKYFFYSNIMNFFKTEITLANGEIRKRPLIETNGETGEIVWDKGRDFATVRKVLSMPQVNIVKKTEVQTGGFSKESILPKRNSDKLIARKKDWDPKKYGGFDSPTVAYSVLVVAKVEKGKSKKLKSVKELLGITIMERSSFEKNPIDFLEAKGYKEVKKDLIIKLPKYSLFELENGRKRMLASAGELQKGNELALPSKYVNFLYLASHYEKLKGSPEDNEQKQLFVEQHKHYLDEIIEQISEFSKRVILADANLDKVLSAYNKHRDKPIREQAENIIHLFTLTNLGAPAAFKYFDTTIDRKRYTSTKEVLDATLIHQSITGLYETRIDLSQLGGDGGGGGGSSGGSGGVPWILKKPLELTIKLDLEEQQGTLLNNSILSKKGKEELKQLFEKYSALWQSWENQVGHRRIRPHKIATGTVKPTPQKQYHINPKAKPDIQIVINDLLKQGVLIQKESTMNTPVYPVPKPNGRWRMVLDYRAVNKVTPLIAVQNQHSYGILGSLFKGRYKTTIDLSNGFWAHPIVPEDYWITAFTWQGKQYCWTVLPQGFLNSPGLFTGDVVDLLQGIPNVEVYVDDVYISHDSEKEHLEYLDILFNRLKEAGYIISLKKSNIANSIVDFLGFQITNEGRGLTDTFKEKLENITAPTTLKQLQSILGLLNFARNFIPDFTELIAPLYALIPKSTKNYVPWQIEHSTTLETLITKLNGAEYLQGRKGDKTLIMKVNASYTTGYIRYYNEGEKKPISYVSIVFSKTELKFTELEKLLTTVHKGLLKALDLSMGQNIHVYSPIVSMQNIQKTPQTAKKALASRWLSWLSYLEDPRIRFFYDPQMPALKDLPAVDTGKDNKKHPSNFQHIFYTDGSAITSPTKEGHLNAGMGIVYFINKDGNLQKQQEWSISLGNHTAQFAEIAAFEFALKKCLPLGGNILVVTDSNYVAKAYNEELDVWASNGFVNNRKKPLKHISKWKSVADLKRLRPDVVVTHEPGHQKLDSSPHAYGNNLADQLATQASFKVHAGKRTADGSEFEKRTADGSEFESPKKKAKVE

SEQ ID NO: 6844 - protein, 2093 aa, synthetic construct
MPAAKRVKLDGGDKKYSIGLDIGTNSVGWAVITDEYKVPSKKFKVLGNTDRHSIKKNLIGALLFDSGETAEATRLKRTARRRYTRRKNRICYLQEIFSNEMAKVDDSFFHRLEESFLVEEDKKHERHPIFGNIVDEVAYHEKYPTIYHLRKKLVDSTDKADLRLIYLALAHMIKFRGHFLIEGDLNPDNSDVDKLFIQLVQTYNQLFEENPINASGVDAKAILSARLSKSRRLENLIAQLPGEKKNGLFGNLIALSLGLTPNFKSNFDLAEDAKLQLSKDTYDDDLDNLLAQIGDQYADLFLAAKNLSDAILLSDILRVNTEITKAPLSASMIKRYDEHHQDLTLLKALVRQQLPEKYKEIFFDQSKNGYAGYIDGGASQEEFYKFIKPILEKMDGTEELLVKLNREDLLRKQRTFDNGSIPHQIHLGELHAILRRQEDFYPFLKDNREKIEKILTFRIPYYVGPLARGNSRFAWMTRKSEETITPWNFEEVVDKGASAQSFIERMTNFDKNLPNEKVLPKHSLLYEYFTVYNELTKVKYVTEGMRKPAFLSGEQKKAIVDLLFKTNRKVTVKQLKEDYFKKIECFDSVEISGVEDRFNASLGTYHDLLKIIKDKDFLDNEENEDILEDIVLTLTLFEDREMIEERLKTYAHLFDDKVMKQLKRRRYTGWGRLSRKLINGIRDKQSGKTILDFLKSDGFANRNFMQLIHDDSLTFKEDIQKAQVSGQGDSLHEHIANLAGSPAIKKGILQTVKVVDELVKVMGRHKPENIVIEMARENQTTQKGQKNSRERMKRIEEGIKELGSQILKEHPVENTQLQNEKLYLYYLQNGRDMYVDQELDINRLSDYDVDHIVPQSFLKDDSIDNKVLTRSDKARGKSDNVPSEEVVKKMKNYWRQLLNAKLITQRKFDNLTKAERGGLSELDKAGFIKRQLVETRQITKHVAQILDSRMNTKYDENDKLIREVKVITLKSKLVSDFRKDFQFYKVREINNYHHAHDAYLNAVVGTALIKKYPKLESEFVYGDYKVYDVRKMIAKSEQEIGKATAKYFFYSNIMNFFKTEITLANGEIRKRPLIETNGETGEIVWDKGRDFATVRKVLSMPQVNIVKKTEVQTGGFSKESILPKRNSDKLIARKKDWDPKKYGGFDSPTVAYSVLVVAKVEKGKSKKLKSVKELLGITIMERSSFEKNPIDFLEAKGYKEVKKDLIIKLPKYSLFELENGRKRMLASAGELQKGNELALPSKYVNFLYLASHYEKLKGSPEDNEQKQLFVEQHKHYLDEIIEQISEFSKRVILADANLDKVLSAYNKHRDKPIREQAENIIHLFTLTNLGAPAAFKYFDTTIDRKRYTSTKEVLDATLIHQSITGLYETRIDLSQLGGDGGGGGGSSGGSGGTLQLEEEYRLFEPESTQKQEMDIWLKNFPQAWAETGGMGTAHCQAPVLIQLKATATPISIRQYPMPHEAYQGIKPHIRRMLDQGILKPCQSPWNTPLLPVKKPGTEDYRPVQDLREVNKRVEDIHPTVPNPYNLLSTLPPSHPWYTVLDLKDAFFCLRLHSESQLLFAFEWRDPEIGLSGQLTWTRLPQGFKNSPTLFNEALHSDLADFRVRYPALVLLQYVDDLLLAAATRTECLEGTKALLETLGNKGYRASAKKAQICLQEVTYLGYSLKDGQRWLTKARKEAILSIPVPKNSRQVREFLGTAGYCRLWIPGFAELAAPLYPLTRPGTLFQWGTEQQLAFEDIKKALLSSPALGLPDITKPFELFIDENSGFAKGVLVQKLGPWKRPVAYLSKKLDTVASGWPPCLRMVAAIAILVKDAGKLTLGQPLTILTSHPVEALVRQPPNKWLSNARMTHYQAMLLDAERVHFGPTVSLNPATLLPLPSGGNHHDCLQILAETHGTRPDLTDQPLPDADLTWYTDGSSFIRNGEREAGAAVTTESEVIWAAPLPPGTSAQRAELIALTQALKMAEGKKLTVYTDSRYAFATTHVHGEIYRRRGWLTSEGKEIKNKNEILALLEALFLPKRLSIIHCPGHQKGDSPQAKGNRLADDTAKKAATETHSSLTVLPAGKRTADGSEFEKRTADGSEFESPKKKAKVE

SEQ ID NO: 6845 - protein, 2125 aa, synthetic construct
MPAAKRVKLDGGDKKYSIGLDIGTNSVGWAVITDEYKVPSKKFKVLGNTDRHSIKKNLIGALLFDSGETAEATRLKRTARRRYTRRKNRICYLQEIFSNEMAKVDDSFFHRLEESFLVEEDKKHERHPIFGNIVDEVAYHEKYPTIYHLRKKLVDSTDKADLRLIYLALAHMIKFRGHFLIEGDLNPDNSDVDKLFIQLVQTYNQLFEENPINASGVDAKAILSARLSKSRRLENLIAQLPGEKKNGLFGNLIALSLGLTPNFKSNFDLAEDAKLQLSKDTYDDDLDNLLAQIGDQYADLFLAAKNLSDAILLSDILRVNTEITKAPLSASMIKRYDEHHQDLTLLKALVRQQLPEKYKEIFFDQSKNGYAGYIDGGASQEEFYKFIKPILEKMDGTEELLVKLNREDLLRKQRTFDNGSIPHQIHLGELHAILRRQEDFYPFLKDNREKIEKILTFRIPYYVGPLARGNSRFAWMTRKSEETITPWNFEEVVDKGASAQSFIERMTNFDKNLPNEKVLPKHSLLYEYFTVYNELTKVKYVTEGMRKPAFLSGEQKKAIVDLLFKTNRKVTVKQLKEDYFKKIECFDSVEISGVEDRFNASLGTYHDLLKIIKDKDFLDNEENEDILEDIVLTLTLFEDREMIEERLKTYAHLFDDKVMKQLKRRRYTGWGRLSRKLINGIRDKQSGKTILDFLKSDGFANRNFMQLIHDDSLTFKEDIQKAQVSGQGDSLHEHIANLAGSPAIKKGILQTVKVVDELVKVMGRHKPENIVIEMARENQTTQKGQKNSRERMKRIEEGIKELGSQILKEHPVENTQLQNEKLYLYYLQNGRDMYVDQELDINRLSDYDVDHIVPQSFLKDDSIDNKVLTRSDKARGKSDNVPSEEVVKKMKNYWRQLLNAKLITQRKFDNLTKAERGGLSELDKAGFIKRQLVETRQITKHVAQILDSRMNTKYDENDKLIREVKVITLKSKLVSDFRKDFQFYKVREINNYHHAHDAYLNAVVGTALIKKYPKLESEFVYGDYKVYDVRKMIAKSEQEIGKATAKYFFYSNIMNFFKTEITLANGEIRKRPLIETNGETGEIVWDKGRDFATVRKVLSMPQVNIVKKTEVQTGGFSKESILPKRNSDKLIARKKDWDPKKYGGFDSPTVAYSVLVVAKVEKGKSKKLKSVKELLGITIMERSSFEKNPIDFLEAKGYKEVKKDLIIKLPKYSLFELENGRKRMLASAGELQKGNELALPSKYVNFLYLASHYEKLKGSPEDNEQKQLFVEQHKHYLDEIIEQISEFSKRVILADANLDKVLSAYNKHRDKPIREQAENIIHLFTLTNLGAPAAFKYFDTTIDRKRYTSTKEVLDATLIHQSITGLYETRIDLSQLGGDGGGGGGSSGGSGGLLGRDLLTKLKAQIQFSTEGPQVTWEDRPAMCLVLNLEEEYRLHEKPVPPSIDPSWLQLFPMVWAEKAGMGLANQVPPVVVELKSDASPVAVRQYPMSKEAREGIRPHIQRFLDLGILVPCQSPWNTPLLPVKKPGTNDYRPVQDLREVNKRVQDIHPTVPNPYNLLSSLPPSHTWYSVLDLKDAFFCLKLHPNSQPLFAFEWRDPEKGNTGQLTWTRLPQGFKNSPTLFNEALHRDLASFRALNPQVVMLQYVDDLLVAAPTYRDCKEGTRRLLQELSKLGYRVSAKKAQLCREEVTYLGYLLKGGKRWLTPARKATVMKIPTPTTPRQVREFLGTAGFCRLWIPGFASLAAPLYPLTRPKVPFTWTEAHQEAFGRIKEALLSAPALALPDLTKPFALYVDEKEGVARGVLTQTLGPWRRPVAYLSKKLDPVASGWPTCLKAIAAVALLLKDADKLTLGQNVLVIAPHNLESIVRQPPDRWMTNARMTHYQSLLLNERVSFAPPAILNPATLLPVESDDTPIHICSEILAEETGTRPDLRDQPLPGVPAWYTDGSSFIMDGRRQAGAAIVDNKRTVWASNLPEGTSAQKAELIALTQALRLAEGKSINIYTDSRYAFATAHVHGAIYKQRGWLTSAGKDIKNKEEILALLEAIHLPKRVAIIHCPGHQRGTDPVATGNRKADEAAKQAAQSTRILTETTKNAGKRTADGSEFEKRTADGSEFESPKKKAKVE

SEQ ID NO: 6846 - protein, 2125 aa, synthetic construct
MPAAKRVKLDGGDKKYSIGLDIGTNSVGWAVITDEYKVPSKKFKVLGNTDRHSIKKNLIGALLFDSGETAEATRLKRTARRRYTRRKNRICYLQEIFSNEMAKVDDSFFHRLEESFLVEEDKKHERHPIFGNIVDEVAYHEKYPTIYHLRKKLVDSTDKADLRLIYLALAHMIKFRGHFLIEGDLNPDNSDVDKLFIQLVQTYNQLFEENPINASGVDAKAILSARLSKSRRLENLIAQLPGEKKNGLFGNLIALSLGLTPNFKSNFDLAEDAKLQLSKDTYDDDLDNLLAQIGDQYADLFLAAKNLSDAILLSDILRVNTEITKAPLSASMIKRYDEHHQDLTLLKALVRQQLPEKYKEIFFDQSKNGYAGYIDGGASQEEFYKFIKPILEKMDGTEELLVKLNREDLLRKQRTFDNGSIPHQIHLGELHAILRRQEDFYPFLKDNREKIEKILTFRIPYYVGPLARGNSRFAWMTRKSEETITPWNFEEVVDKGASAQSFIERMTNFDKNLPNEKVLPKHSLLYEYFTVYNELTKVKYVTEGMRKPAFLSGEQKKAIVDLLFKTNRKVTVKQLKEDYFKKIECFDSVEISGVEDRFNASLGTYHDLLKIIKDKDFLDNEENEDILEDIVLTLTLFEDREMIEERLKTYAHLFDDKVMKQLKRRRYTGWGRLSRKLINGIRDKQSGKTILDFLKSDGFANRNFMQLIHDDSLTFKEDIQKAQVSGQGDSLHEHIANLAGSPAIKKGILQTVKVVDELVKVMGRHKPENIVIEMARENQTTQKGQKNSRERMKRIEEGIKELGSQILKEHPVENTQLQNEKLYLYYLQNGRDMYVDQELDINRLSDYDVDHIVPQSFLKDDSIDNKVLTRSDKARGKSDNVPSEEVVKKMKNYWRQLLNAKLITQRKFDNLTKAERGGLSELDKAGFIKRQLVETRQITKHVAQILDSRMNTKYDENDKLIREVKVITLKSKLVSDFRKDFQFYKVREINNYHHAHDAYLNAVVGTALIKKYPKLESEFVYGDYKVYDVRKMIAKSEQEIGKATAKYFFYSNIMNFFKTEITLANGEIRKRPLIETNGETGEIVWDKGRDFATVRKVLSMPQVNIVKKTEVQTGGFSKESILPKRNSDKLIARKKDWDPKKYGGFDSPTVAYSVLVVAKVEKGKSKKLKSVKELLGITIMERSSFEKNPIDFLEAKGYKEVKKDLIIKLPKYSLFELENGRKRMLASAGELQKGNELALPSKYVNFLYLASHYEKLKGSPEDNEQKQLFVEQHKHYLDEIIEQISEFSKRVILADANLDKVLSAYNKHRDKPIREQAENIIHLFTLTNLGAPAAFKYFDTTIDRKRYTSTKEVLDATLIHQSITGLYETRIDLSQLGGDGGGGGGSSGGSGGLLGRDLLTKLKAQIQFSTEGPQVTWEDRPAMCLVLNLEEEYRLHEKPVPPSIDPSWLQLFPMVWAEKAGMGLANQVPPVVVELKSDASPVAVRQYPMSKEAREGIRPHIQRFLDLGILVPCQSPWNTPLLPVKKPGTNDYRPVQDLREVNKRVQDIHPTVPNPYNLLSSLPPSHTWYSVLDLKDAFFCLKLHPNSQPLFAFEWRDPEKGNTGQLTWTRLPQGFKNSPTLFNEALHRDLASFRALNPQVVMLQYVDDLLVAAPTYRDCKEGTRRLLQELSKLGYRVSAKKAQLCREEVTYLGYLLKGGKRWLTPARKATVMKIPTPTTPRQVREFLGKAGFCRLFIPGFASLAAPLYPLTRPKVPFTWTEAHQEAFGRIKEALLSAPALALPDLTKPFALYVDEKEGVARGVLTQTLGPWRRPVAYLSKKLDPVASGWPTCLKAIAAVALLLKDADKLTLGQNVLVIAPHNLESIVRQPPDRWMTNARMTHYQSLLLNERVSFAPPAILNPATLLPVESDDTPIHICSEILAEETGTRPDLRDQPLPGVPAWYTDGSSFIMDGRRQAGAAIVDNKRTVWASNLPEGTSAQKAELIALTQALRLAEGKSINIYTDSRYAFATAHVHGAIYKQRGWLTSAGKDIKNKEEILALLEAIHLPKRVAIIHCPGHQRGTDPVATGNRKADEAAKQAAQSTRILTETTKNAGKRTADGSEFEKRTADGSEFESPKKKAKVE

SEQ ID NO: 6847 - protein, 2216 aa, synthetic construct
MPAAKRVKLDGGDKKYSIGLDIGTNSVGWAVITDEYKVPSKKFKVLGNTDRHSIKKNLIGALLFDSGETAEATRLKRTARRRYTRRKNRICYLQEIFSNEMAKVDDSFFHRLEESFLVEEDKKHERHPIFGNIVDEVAYHEKYPTIYHLRKKLVDSTDKADLRLIYLALAHMIKFRGHFLIEGDLNPDNSDVDKLFIQLVQTYNQLFEENPINASGVDAKAILSARLSKSRRLENLIAQLPGEKKNGLFGNLIALSLGLTPNFKSNFDLAEDAKLQLSKDTYDDDLDNLLAQIGDQYADLFLAAKNLSDAILLSDILRVNTEITKAPLSASMIKRYDEHHQDLTLLKALVRQQLPEKYKEIFFDQSKNGYAGYIDGGASQEEFYKFIKPILEKMDGTEELLVKLNREDLLRKQRTFDNGSIPHQIHLGELHAILRRQEDFYPFLKDNREKIEKILTFRIPYYVGPLARGNSRFAWMTRKSEETITPWNFEEVVDKGASAQSFIERMTNFDKNLPNEKVLPKHSLLYEYFTVYNELTKVKYVTEGMRKPAFLSGEQKKAIVDLLFKTNRKVTVKQLKEDYFKKIECFDSVEISGVEDRFNASLGTYHDLLKIIKDKDFLDNEENEDILEDIVLTLTLFEDREMIEERLKTYAHLFDDKVMKQLKRRRYTGWGRLSRKLINGIRDKQSGKTILDFLKSDGFANRNFMQLIHDDSLTFKEDIQKAQVSGQGDSLHEHIANLAGSPAIKKGILQTVKVVDELVKVMGRHKPENIVIEMARENQTTQKGQKNSRERMKRIEEGIKELGSQILKEHPVENTQLQNEKLYLYYLQNGRDMYVDQELDINRLSDYDVDHIVPQSFLKDDSIDNKVLTRSDKARGKSDNVPSEEVVKKMKNYWRQLLNAKLITQRKFDNLTKAERGGLSELDKAGFIKRQLVETRQITKHVAQILDSRMNTKYDENDKLIREVKVITLKSKLVSDFRKDFQFYKVREINNYHHAHDAYLNAVVGTALIKKYPKLESEFVYGDYKVYDVRKMIAKSEQEIGKATAKYFFYSNIMNFFKTEITLANGEIRKRPLIETNGETGEIVWDKGRDFATVRKVLSMPQVNIVKKTEVQTGGFSKESILPKRNSDKLIARKKDWDPKKYGGFDSPTVAYSVLVVAKVEKGKSKKLKSVKELLGITIMERSSFEKNPIDFLEAKGYKEVKKDLIIKLPKYSLFELENGRKRMLASAGELQKGNELALPSKYVNFLYLASHYEKLKGSPEDNEQKQLFVEQHKHYLDEIIEQISEFSKRVILADANLDKVLSAYNKHRDKPIREQAENIIHLFTLTNLGAPAAFKYFDTTIDRKRYTSTKEVLDATLIHQSITGLYETRIDLSQLGGDGGGGGGSSGGSGGTLGDQGSRGSDPLPEPRVTLTVEGIPTEFLVNTGAEHSVLTKPMGKMGSKRTVVAGATGSKVYPWTTKRLLKIGQKQVTHSFLVIPECPAPLLGRDLLTKLKAQIQFSTEGPQVTWEDRPAMCLVLNLEEEYRLHEKPVPPSIDPSWLQLFPMVWAEKAGMGLANQVPPVVVELKSDASPVAVRQYPMSKEAREGIRPHIQRFLDLGILVPCQSPWNTPLLPVKKPGTNDYRPVQDLREVNKRVQDIHPTVPNPYNLLSSLPPSHTWYSVLDLKDAFFCLKLHPNSQPLFAFEWRDPEKGNTGQLTWTRLPQGFKNSPTLFNEALHRDLASFRALNPQVVMLQYVDDLLVAAPTYRDCKEGTRRLLQELSKLGYRVSAKKAQLCREEVTYLGYLLKGGKRWLTPARKATVMKIPTPTTPRQVREFLGKAGFCRLFIPGFASLAAPLYPLTRPKVPFTWTEAHQEAFGRIKEALLSAPALALPDLTKPFALYVDEKEGVARGVLTQTLGPWRRPVAYLSKKLDPVASGWPTCLKAIAAVALLLKDADKLTLGQNVLVIAPHNLESIVRQPPDRWMTNARMTHYQSLLLNERVSFAPPAILNPATLLPVESDDTPIHICSEILAEETGTRPDLRDQPLPGVPAWYTDGSSFIMDGRRQAGAAIVDNKRTVWASNLPEGTSAQKAELIALTQALRLAEGKSINIYTDSRYAFATAHVHGAIYKQRGWLTSAGKDIKNKEEILALLEAIHLPKRVAIIHCPGHQRGTDPVATGNRKADEAAKQAAQSTRILTETTKNAGKRTADGSEFEKRTADGSEFESPKKKAKVE

SEQ ID NO: 6848 - protein, 2094 aa, synthetic construct
MPAAKRVKLDGGDKKYSIGLDIGTNSVGWAVITDEYKVPSKKFKVLGNTDRHSIKKNLIGALLFDSGETAEATRLKRTARRRYTRRKNRICYLQEIFSNEMAKVDDSFFHRLEESFLVEEDKKHERHPIFGNIVDEVAYHEKYPTIYHLRKKLVDSTDKADLRLIYLALAHMIKFRGHFLIEGDLNPDNSDVDKLFIQLVQTYNQLFEENPINASGVDAKAILSARLSKSRRLENLIAQLPGEKKNGLFGNLIALSLGLTPNFKSNFDLAEDAKLQLSKDTYDDDLDNLLAQIGDQYADLFLAAKNLSDAILLSDILRVNTEITKAPLSASMIKRYDEHHQDLTLLKALVRQQLPEKYKEIFFDQSKNGYAGYIDGGASQEEFYKFIKPILEKMDGTEELLVKLNREDLLRKQRTFDNGSIPHQIHLGELHAILRRQEDFYPFLKDNREKIEKILTFRIPYYVGPLARGNSRFAWMTRKSEETITPWNFEEVVDKGASAQSFIERMTNFDKNLPNEKVLPKHSLLYEYFTVYNELTKVKYVTEGMRKPAFLSGEQKKAIVDLLFKTNRKVTVKQLKEDYFKKIECFDSVEISGVEDRFNASLGTYHDLLKIIKDKDFLDNEENEDILEDIVLTLTLFEDREMIEERLKTYAHLFDDKVMKQLKRRRYTGWGRLSRKLINGIRDKQSGKTILDFLKSDGFANRNFMQLIHDDSLTFKEDIQKAQVSGQGDSLHEHIANLAGSPAIKKGILQTVKVVDELVKVMGRHKPENIVIEMARENQTTQKGQKNSRERMKRIEEGIKELGSQILKEHPVENTQLQNEKLYLYYLQNGRDMYVDQELDINRLSDYDVDHIVPQSFLKDDSIDNKVLTRSDKARGKSDNVPSEEVVKKMKNYWRQLLNAKLITQRKFDNLTKAERGGLSELDKAGFIKRQLVETRQITKHVAQILDSRMNTKYDENDKLIREVKVITLKSKLVSDFRKDFQFYKVREINNYHHAHDAYLNAVVGTALIKKYPKLESEFVYGDYKVYDVRKMIAKSEQEIGKATAKYFFYSNIMNFFKTEITLANGEIRKRPLIETNGETGEIVWDKGRDFATVRKVLSMPQVNIVKKTEVQTGGFSKESILPKRNSDKLIARKKDWDPKKYGGFDSPTVAYSVLVVAKVEKGKSKKLKSVKELLGITIMERSSFEKNPIDFLEAKGYKEVKKDLIIKLPKYSLFELENGRKRMLASAGELQKGNELALPSKYVNFLYLASHYEKLKGSPEDNEQKQLFVEQHKHYLDEIIEQISEFSKRVILADANLDKVLSAYNKHRDKPIREQAENIIHLFTLTNLGAPAAFKYFDTTIDRKRYTSTKEVLDATLIHQSITGLYETRIDLSQLGGDGGGGGGSSGGSGGTLGIEDEYRLHETSTEPDVSLGSTWLSDFPQAWAETGGMGLAVRQAPLIIPLKATSTPVSIQQYPMSHEARLGIKPHIQRLLDQGILVPCQSPWNTPLLPVKKPGTNDYRPVQDLREVNKRVEDIHPTVPNPYNLLSGLPPSHQWYTVLDLKDAFFCLRLHPTSQPLFAFEWRDPGMGISGQLTWTRLPQGFKNSPTLFNEALHRDLADFRIQHPDLILLQYVDDILLAATSELDCQQGTRALLQTLGDLGYRASAKKAQICQKQVKYLGYLLREGQRWLTEARKETVMGQPVPKTPRQLREFLGTAGFCRLWIPGFAEMAAPLYPLTKPGTLFSWGPDQQKAYQEIKQALLTAPALGLPDLTKPFELFVDEKQGYAKGVLTQKLGPWRRPVAYLSKKLDPVAAGWPPCLRMVAAIAVLTKDAGKLTMGQPLVILAPHAVEALVKQPPDRWLSNARMTHYQAMLLDTDRVQFGPVVALNPATLLPLPEEGAPHDCLEILAETHGTRPDLTDQPIPDADHTWYTDGSSFLQEGQRKAGAAVTTETEVIWAGALPAGTSAQRAELIALTQALKMAEGKRLNVYTDSRYAFATAHIHGEIYRRRGWLTSEGREIKNKSEILALLKALFLPKRLSIIHCLGHQKGDSAEARGNRLADQAAREAAIKTPPDTSTLLAGKRTADGSEFEKRTADGSEFESPKKKAKVE

SEQ ID NO: 6849 - protein, 2094 aa, synthetic construct
MPAAKRVKLDGGDKKYSIGLDIGTNSVGWAVITDEYKVPSKKFKVLGNTDRHSIKKNLIGALLFDSGETAEATRLKRTARRRYTRRKNRICYLQEIFSNEMAKVDDSFFHRLEESFLVEEDKKHERHPIFGNIVDEVAYHEKYPTIYHLRKKLVDSTDKADLRLIYLALAHMIKFRGHFLIEGDLNPDNSDVDKLFIQLVQTYNQLFEENPINASGVDAKAILSARLSKSRRLENLIAQLPGEKKNGLFGNLIALSLGLTPNFKSNFDLAEDAKLQLSKDTYDDDLDNLLAQIGDQYADLFLAAKNLSDAILLSDILRVNTEITKAPLSASMIKRYDEHHQDLTLLKALVRQQLPEKYKEIFFDQSKNGYAGYIDGGASQEEFYKFIKPILEKMDGTEELLVKLNREDLLRKQRTFDNGSIPHQIHLGELHAILRRQEDFYPFLKDNREKIEKILTFRIPYYVGPLARGNSRFAWMTRKSEETITPWNFEEVVDKGASAQSFIERMTNFDKNLPNEKVLPKHSLLYEYFTVYNELTKVKYVTEGMRKPAFLSGEQKKAIVDLLFKTNRKVTVKQLKEDYFKKIECFDSVEISGVEDRFNASLGTYHDLLKIIKDKDFLDNEENEDILEDIVLTLTLFEDREMIEERLKTYAHLFDDKVMKQLKRRRYTGWGRLSRKLINGIRDKQSGKTILDFLKSDGFANRNFMQLIHDDSLTFKEDIQKAQVSGQGDSLHEHIANLAGSPAIKKGILQTVKVVDELVKVMGRHKPENIVIEMARENQTTQKGQKNSRERMKRIEEGIKELGSQILKEHPVENTQLQNEKLYLYYLQNGRDMYVDQELDINRLSDYDVDHIVPQSFLKDDSIDNKVLTRSDKARGKSDNVPSEEVVKKMKNYWRQLLNAKLITQRKFDNLTKAERGGLSELDKAGFIKRQLVETRQITKHVAQILDSRMNTKYDENDKLIREVKVITLKSKLVSDFRKDFQFYKVREINNYHHAHDAYLNAVVGTALIKKYPKLESEFVYGDYKVYDVRKMIAKSEQEIGKATAKYFFYSNIMNFFKTEITLANGEIRKRPLIETNGETGEIVWDKGRDFATVRKVLSMPQVNIVKKTEVQTGGFSKESILPKRNSDKLIARKKDWDPKKYGGFDSPTVAYSVLVVAKVEKGKSKKLKSVKELLGITIMERSSFEKNPIDFLEAKGYKEVKKDLIIKLPKYSLFELENGRKRMLASAGELQKGNELALPSKYVNFLYLASHYEKLKGSPEDNEQKQLFVEQHKHYLDEIIEQISEFSKRVILADANLDKVLSAYNKHRDKPIREQAENIIHLFTLTNLGAPAAFKYFDTTIDRKRYTSTKEVLDATLIHQSITGLYETRIDLSQLGGDGGGGGGSSGGSGGTLNIEDEYRLHETSKEPDVSLGSTWLSDFPQAWAETGGMGLAVRQAPLIIPLKATSTPVSIKQYPMSQEARLGIKPHIQRLLDQGILVPCQSPWNTPLLPVKKPGTNDYRPVQDLREVNKRVEDIHPTVPNPYNLLSGLPPSHQWYTVLDLKDAFFCLRLHPTSQPLFAFEWRDPEMGISGQLTWTRLPQGFKNSPTLFNEALHRDLAGFRIQHPDLILLQYVDDLLLAATSELDCQQGTRALLQTLGDLGYRASAKKAQICQKQVKYLGYLLKEGQRWLTEARKETVMGQPIPKTPRQLREFLGTAGFCRLWIPGFAEMAAPLYPLTKPGTLFNWGPDQQKAFQEIKQALLTAPALGLPDLTKPFELFVDEKQGYAKGVLTQKLGPWRRPVAYLSKKLDPVAAGWPPCLRMVAAIAVLTKDAGKLTMGQPLVILAPHAVEALVKQPPDRWLSNARMTHYQALLLDTDRVQFGPVVALNPATLLPLPEEGLQHDCLDILAEAHGTRSDLMDQPLPDADHTWYTDGSSFLQEGQRKAGAAVTTETEVIWARALPAGTSAQRAELIALTQALKMAEGKKLNVYTDSRYAFATAHIHGEIYRRRGWLTSEGKEIKNKDEILALLKALFLPKRLSIIHCPGHQKGNSAEARGNRMADQAAREVATRETPETSTLLAGKRTADGSEFEKRTADGSEFESPKKKAKVE

SEQ ID NO: 6850 - protein, 2094 aa, synthetic construct
MPAAKRVKLDGGDKKYSIGLDIGTNSVGWAVITDEYKVPSKKFKVLGNTDRHSIKKNLIGALLFDSGETAEATRLKRTARRRYTRRKNRICYLQEIFSNEMAKVDDSFFHRLEESFLVEEDKKHERHPIFGNIVDEVAYHEKYPTIYHLRKKLVDSTDKADLRLIYLALAHMIKFRGHFLIEGDLNPDNSDVDKLFIQLVQTYNQLFEENPINASGVDAKAILSARLSKSRRLENLIAQLPGEKKNGLFGNLIALSLGLTPNFKSNFDLAEDAKLQLSKDTYDDDLDNLLAQIGDQYADLFLAAKNLSDAILLSDILRVNTEITKAPLSASMIKRYDEHHQDLTLLKALVRQQLPEKYKEIFFDQSKNGYAGYIDGGASQEEFYKFIKPILEKMDGTEELLVKLNREDLLRKQRTFDNGSIPHQIHLGELHAILRRQEDFYPFLKDNREKIEKILTFRIPYYVGPLARGNSRFAWMTRKSEETITPWNFEEVVDKGASAQSFIERMTNFDKNLPNEKVLPKHSLLYEYFTVYNELTKVKYVTEGMRKPAFLSGEQKKAIVDLLFKTNRKVTVKQLKEDYFKKIECFDSVEISGVEDRFNASLGTYHDLLKIIKDKDFLDNEENEDILEDIVLTLTLFEDREMIEERLKTYAHLFDDKVMKQLKRRRYTGWGRLSRKLINGIRDKQSGKTILDFLKSDGFANRNFMQLIHDDSLTFKEDIQKAQVSGQGDSLHEHIANLAGSPAIKKGILQTVKVVDELVKVMGRHKPENIVIEMARENQTTQKGQKNSRERMKRIEEGIKELGSQILKEHPVENTQLQNEKLYLYYLQNGRDMYVDQELDINRLSDYDVDHIVPQSFLKDDSIDNKVLTRSDKARGKSDNVPSEEVVKKMKNYWRQLLNAKLITQRKFDNLTKAERGGLSELDKAGFIKRQLVETRQITKHVAQILDSRMNTKYDENDKLIREVKVITLKSKLVSDFRKDFQFYKVREINNYHHAHDAYLNAVVGTALIKKYPKLESEFVYGDYKVYDVRKMIAKSEQEIGKATAKYFFYSNIMNFFKTEITLANGEIRKRPLIETNGETGEIVWDKGRDFATVRKVLSMPQVNIVKKTEVQTGGFSKESILPKRNSDKLIARKKDWDPKKYGGFDSPTVAYSVLVVAKVEKGKSKKLKSVKELLGITIMERSSFEKNPIDFLEAKGYKEVKKDLIIKLPKYSLFELENGRKRMLASAGELQKGNELALPSKYVNFLYLASHYEKLKGSPEDNEQKQLFVEQHKHYLDEIIEQISEFSKRVILADANLDKVLSAYNKHRDKPIREQAENIIHLFTLTNLGAPAAFKYFDTTIDRKRYTSTKEVLDATLIHQSITGLYETRIDLSQLGGDGGGGGGSSGGSGGTLNIEDEYRLHETSKGPDVPLGSTWLSDFPQAWAETGGMGLAVRQAPLIIPLKATSTPVSIKQYPMSQEARLGIKPHIQRLLDQGILVPCQSPWNTPLLPVKKPGTNDYRPVQDLREVNKRVEDIHPTVPNPYNLLSGLPPSHQWYTVLDLKDAFFCLRLHPTSQSLFAFEWRDPEMGISGQLTWTRLPQGFKNSPTLFNEALHRDLADFRIQHPDLILLQYVDDLLLAATSELDCQQGTRALLQTLGDLGYRASAKKAQICQKQVKYLGYLLKEGQRWLTEARKETVMGQPTPKTPRQLREFLGTAGFCRLWIPGFAEMAAPLYPLTKPGTLFEWGPDQQKAYQEIKQALLTAPALGLPDLTKPFELFVDEKQGYAKGVLTQKLGPWRRPVAYLSKKLDPVAAGWPPCLRMVAAIAVLTKDAGKLTMGQPLVILAPHAVEALVKQPPDRWLSNARMTHYQALLLDTDRVQFGPIVALNPATLLPLPEEGLQHDCLDILAEAHGTRPDLTDQPLPDADHTWYTDGSSFLQEGQRKAGAAVTTETEVVWAKALPAGTSAQRAELIALTQALKMAEGKKLNVYTDSRYAFATAHIHGEIYRRRGWLTSEGKEIKNKDEILALLKALFLPKRLSIIHCPGHQKGNRAEARGNRMADQAAREVATRETPETSTLLAGKRTADGSEFEKRTADGSEFESPKKKAKVE

SEQ ID NO: 6851 - protein, 2114 aa, synthetic construct
MPAAKRVKLDGGDKKYSIGLDIGTNSVGWAVITDEYKVPSKKFKVLGNTDRHSIKKNLIGALLFDSGETAEATRLKRTARRRYTRRKNRICYLQEIFSNEMAKVDDSFFHRLEESFLVEEDKKHERHPIFGNIVDEVAYHEKYPTIYHLRKKLVDSTDKADLRLIYLALAHMIKFRGHFLIEGDLNPDNSDVDKLFIQLVQTYNQLFEENPINASGVDAKAILSARLSKSRRLENLIAQLPGEKKNGLFGNLIALSLGLTPNFKSNFDLAEDAKLQLSKDTYDDDLDNLLAQIGDQYADLFLAAKNLSDAILLSDILRVNTEITKAPLSASMIKRYDEHHQDLTLLKALVRQQLPEKYKEIFFDQSKNGYAGYIDGGASQEEFYKFIKPILEKMDGTEELLVKLNREDLLRKQRTFDNGSIPHQIHLGELHAILRRQEDFYPFLKDNREKIEKILTFRIPYYVGPLARGNSRFAWMTRKSEETITPWNFEEVVDKGASAQSFIERMTNFDKNLPNEKVLPKHSLLYEYFTVYNELTKVKYVTEGMRKPAFLSGEQKKAIVDLLFKTNRKVTVKQLKEDYFKKIECFDSVEISGVEDRFNASLGTYHDLLKIIKDKDFLDNEENEDILEDIVLTLTLFEDREMIEERLKTYAHLFDDKVMKQLKRRRYTGWGRLSRKLINGIRDKQSGKTILDFLKSDGFANRNFMQLIHDDSLTFKEDIQKAQVSGQGDSLHEHIANLAGSPAIKKGILQTVKVVDELVKVMGRHKPENIVIEMARENQTTQKGQKNSRERMKRIEEGIKELGSQILKEHPVENTQLQNEKLYLYYLQNGRDMYVDQELDINRLSDYDVDHIVPQSFLKDDSIDNKVLTRSDKARGKSDNVPSEEVVKKMKNYWRQLLNAKLITQRKFDNLTKAERGGLSELDKAGFIKRQLVETRQITKHVAQILDSRMNTKYDENDKLIREVKVITLKSKLVSDFRKDFQFYKVREINNYHHAHDAYLNAVVGTALIKKYPKLESEFVYGDYKVYDVRKMIAKSEQEIGKATAKYFFYSNIMNFFKTEITLANGEIRKRPLIETNGETGEIVWDKGRDFATVRKVLSMPQVNIVKKTEVQTGGFSKESILPKRNSDKLIARKKDWDPKKYGGFDSPTVAYSVLVVAKVEKGKSKKLKSVKELLGITIMERSSFEKNPIDFLEAKGYKEVKKDLIIKLPKYSLFELENGRKRMLASAGELQKGNELALPSKYVNFLYLASHYEKLKGSPEDNEQKQLFVEQHKHYLDEIIEQISEFSKRVILADANLDKVLSAYNKHRDKPIREQAENIIHLFTLTNLGAPAAFKYFDTTIDRKRYTSTKEVLDATLIHQSITGLYETRIDLSQLGGDGGGGGGSSGGSGGVQEISDSRPMLHIYLNGRRFLGLLDTGADKTCIAGRDWPANWPIHQTESSLQGLGMACGVARSSQPLRWQHEDKSGIIHPFVIPTLPFTLWGRDIMKDIKVRLMTDSPDDSQDLMIGAIESNLFADQISWKSDQPVWLNQWPLKQEKLQALQQLVTEQLQLGHLEESNSPWNTPVFVIKKKSGKWRLLQDLRAVNATMHDMGALQPGLPSPPAVPKGWEIIIIDLQDCFFNIKLHPEDCKRFAFSVPSPNFKRPYQRFQWKVLPQGMKNSPTLCQKFVDKAILTVRDKYQDSYIVHYMDDILLAHPSRSIVDEILTSMIQALNKHGLVVSTEKIQKYDNLKYLGTHIQGDSVSYQKLQIRTDKLRTLNDFQKLLGNINWIRPFLKLTTGELKPLFEILNPDSNPISTRKLTPEACKALQLMNERLSTARVKRLDLSQPWSLCILKTEYTPTACLWQDGVVEWIHLPHISPKVITPYDIFCTQLIIKGRHRSKELFSKDPDYIVVPYTKVQFDLLLQEKEDWPISLLGFLGEVHFHLPKDPLLTFTLQTAIIFPHMTSTTPLEKGIVIFTDGSANGRSVTYIQGREPIIKENTQNTAQQAEIVAVITAFEEVSQPFNLYTDSKYVTGLFPEIETATLSPRTKIYTELKHLQRLIHKRQEKFYIGHIRGHTGLPGPLAQGNAYADSLTRILTAAGKRTADGSEFEKRTADGSEFESPKKKAKVE

SEQ ID NO: 6852 - protein, 2088 aa, synthetic construct
MPAAKRVKLDGGDKKYSIGLDIGTNSVGWAVITDEYKVPSKKFKVLGNTDRHSIKKNLIGALLFDSGETAEATRLKRTARRRYTRRKNRICYLQEIFSNEMAKVDDSFFHRLEESFLVEEDKKHERHPIFGNIVDEVAYHEKYPTIYHLRKKLVDSTDKADLRLIYLALAHMIKFRGHFLIEGDLNPDNSDVDKLFIQLVQTYNQLFEENPINASGVDAKAILSARLSKSRRLENLIAQLPGEKKNGLFGNLIALSLGLTPNFKSNFDLAEDAKLQLSKDTYDDDLDNLLAQIGDQYADLFLAAKNLSDAILLSDILRVNTEITKAPLSASMIKRYDEHHQDLTLLKALVRQQLPEKYKEIFFDQSKNGYAGYIDGGASQEEFYKFIKPILEKMDGTEELLVKLNREDLLRKQRTFDNGSIPHQIHLGELHAILRRQEDFYPFLKDNREKIEKILTFRIPYYVGPLARGNSRFAWMTRKSEETITPWNFEEVVDKGASAQSFIERMTNFDKNLPNEKVLPKHSLLYEYFTVYNELTKVKYVTEGMRKPAFLSGEQKKAIVDLLFKTNRKVTVKQLKEDYFKKIECFDSVEISGVEDRFNASLGTYHDLLKIIKDKDFLDNEENEDILEDIVLTLTLFEDREMIEERLKTYAHLFDDKVMKQLKRRRYTGWGRLSRKLINGIRDKQSGKTILDFLKSDGFANRNFMQLIHDDSLTFKEDIQKAQVSGQGDSLHEHIANLAGSPAIKKGILQTVKVVDELVKVMGRHKPENIVIEMARENQTTQKGQKNSRERMKRIEEGIKELGSQILKEHPVENTQLQNEKLYLYYLQNGRDMYVDQELDINRLSDYDVDHIVPQSFLKDDSIDNKVLTRSDKARGKSDNVPSEEVVKKMKNYWRQLLNAKLITQRKFDNLTKAERGGLSELDKAGFIKRQLVETRQITKHVAQILDSRMNTKYDENDKLIREVKVITLKSKLVSDFRKDFQFYKVREINNYHHAHDAYLNAVVGTALIKKYPKLESEFVYGDYKVYDVRKMIAKSEQEIGKATAKYFFYSNIMNFFKTEITLANGEIRKRPLIETNGETGEIVWDKGRDFATVRKVLSMPQVNIVKKTEVQTGGFSKESILPKRNSDKLIARKKDWDPKKYGGFDSPTVAYSVLVVAKVEKGKSKKLKSVKELLGITIMERSSFEKNPIDFLEAKGYKEVKKDLIIKLPKYSLFELENGRKRMLASAGELQKGNELALPSKYVNFLYLASHYEKLKGSPEDNEQKQLFVEQHKHYLDEIIEQISEFSKRVILADANLDKVLSAYNKHRDKPIREQAENIIHLFTLTNLGAPAAFKYFDTTIDRKRYTSTKEVLDATLIHQSITGLYETRIDLSQLGGDGGGGGGSSGGSGGTLQLDDEYRLYSPLVKPDQNIQFWLEQFPQAWAETAGMGLAKQVPPQVIQLKASATPVSVRQYPLSKEAQEGIRPHVQRLIQQGILVPVQSPWNTPLLPVRKPGTNDYRPVQDLREVNKRVQDIHPTVPNPYNLLCALPPQRSWYTVLDLKDAFFCLRLHPTSQPLFAFEWRDPGTGRTGQLTWTRLPQGFKNSPTIFDEALHRDLANFRIQHPQVTLLQYVDDLLLAGATKQDCLEGTKALLLELSDLGYRASAKKAQICRREVTYLGYSLRDGQRWLTEARKKTVVQIPAPTTAKQVREFLGTAGFCRLWIPGFATLAAPLYPLTKEKGEFSWAPEHQKAFDAIKKALLSAPALALPDVTKPFTLYVDERKGVARGVLTQTLGPWRRPVAYLSKKLDPVASGWPVCLKAIAAVAILVKDADKLTLGQNITVIAPHALENIVRQPPDRWMTNARMTHYQSLLLTERVTFAPPAALNPATLLPEETDEPVTHDCHQLLIEETGVRKDLTDIPLTGEVLTWFTDGSSYVVEGKRMAGAAVVDGTRTIWASSLPEGTSAQKAELMALTQALRLAEGKSINIYTDSRYAFATAHVHGAIYKQRGLLTSAGREIKNKEEILSLLEALHLPKRLAIIHCPGHQKAKDPISRGNQMADRVAKQAAQGVNLLAGKRTADGSEFEKRTADGSEFESPKKKAKVE

SEQ ID NO: 6853 - protein, 2085 aa, synthetic construct
MPAAKRVKLDGGDKKYSIGLDIGTNSVGWAVITDEYKVPSKKFKVLGNTDRHSIKKNLIGALLFDSGETAEATRLKRTARRRYTRRKNRICYLQEIFSNEMAKVDDSFFHRLEESFLVEEDKKHERHPIFGNIVDEVAYHEKYPTIYHLRKKLVDSTDKADLRLIYLALAHMIKFRGHFLIEGDLNPDNSDVDKLFIQLVQTYNQLFEENPINASGVDAKAILSARLSKSRRLENLIAQLPGEKKNGLFGNLIALSLGLTPNFKSNFDLAEDAKLQLSKDTYDDDLDNLLAQIGDQYADLFLAAKNLSDAILLSDILRVNTEITKAPLSASMIKRYDEHHQDLTLLKALVRQQLPEKYKEIFFDQSKNGYAGYIDGGASQEEFYKFIKPILEKMDGTEELLVKLNREDLLRKQRTFDNGSIPHQIHLGELHAILRRQEDFYPFLKDNREKIEKILTFRIPYYVGPLARGNSRFAWMTRKSEETITPWNFEEVVDKGASAQSFIERMTNFDKNLPNEKVLPKHSLLYEYFTVYNELTKVKYVTEGMRKPAFLSGEQKKAIVDLLFKTNRKVTVKQLKEDYFKKIECFDSVEISGVEDRFNASLGTYHDLLKIIKDKDFLDNEENEDILEDIVLTLTLFEDREMIEERLKTYAHLFDDKVMKQLKRRRYTGWGRLSRKLINGIRDKQSGKTILDFLKSDGFANRNFMQLIHDDSLTFKEDIQKAQVSGQGDSLHEHIANLAGSPAIKKGILQTVKVVDELVKVMGRHKPENIVIEMARENQTTQKGQKNSRERMKRIEEGIKELGSQILKEHPVENTQLQNEKLYLYYLQNGRDMYVDQELDINRLSDYDVDHIVPQSFLKDDSIDNKVLTRSDKARGKSDNVPSEEVVKKMKNYWRQLLNAKLITQRKFDNLTKAERGGLSELDKAGFIKRQLVETRQITKHVAQILDSRMNTKYDENDKLIREVKVITLKSKLVSDFRKDFQFYKVREINNYHHAHDAYLNAVVGTALIKKYPKLESEFVYGDYKVYDVRKMIAKSEQEIGKATAKYFFYSNIMNFFKTEITLANGEIRKRPLIETNGETGEIVWDKGRDFATVRKVLSMPQVNIVKKTEVQTGGFSKESILPKRNSDKLIARKKDWDPKKYGGFDSPTVAYSVLVVAKVEKGKSKKLKSVKELLGITIMERSSFEKNPIDFLEAKGYKEVKKDLIIKLPKYSLFELENGRKRMLASAGELQKGNELALPSKYVNFLYLASHYEKLKGSPEDNEQKQLFVEQHKHYLDEIIEQISEFSKRVILADANLDKVLSAYNKHRDKPIREQAENIIHLFTLTNLGAPAAFKYFDTTIDRKRYTSTKEVLDATLIHQSITGLYETRIDLSQLGGDGGGGGGSSGGSGGIPWLMKKPLQLTTLVPLQEYEERLLKQTMLTGSYKEKLQSLFLKYDALWQHWENQVGHRRIKPHHIATGTVNPRPQKQYPINPKAKASIQTVINDLLKQGVLIQQNSIMNTPVYPVPKPDGKWRMVLDYREVNKTIPLIAAQNQHSAGILSSIFRGKYKTTLDLSNGFWAHSITPESYWLTAFTWLGQQYCWTRLPQGFLNSPALFNADVVDLLKEVPNVQVYVDDIYISHDDPREHLEQLEKVFSLLLNAGYVVSLKKSEIAQHEVEFLGFNITKEGRGLTETFKQKLLNITPPRDLKQLQSILGKLNFARNFIPNFSELVKPLYNIIATAPGKYITWTTDNSQQLQNIISMLNSAENLEERNPEVRLIMKVNTSPSAGYIRFYNEFAKRPIMYLNYVYTKAEVKFTNTEKLLTTIHKGLIKALDLGMGQEILVYSPIVSMTKIQKTPLPERKALPIRWITWMSYLEDPRIQFHYDKTLPELQQVPTVTDDIIAKIKHPSEFSMVFYTDGSAIKHPNVNKSHNAGMGIAQVQFKPEFTVINTWSIPLGDHTAQLAEVAAVEFACKKALKIDGPVLIVTDSFYVAESVNKELPYWQSNGFFNNKKKPLKHVSKWKSIADCIQLKPDIIIIHEKGHQPTASTFHTEGNNLADKLATQGSYVVNAGKRTADGSEFEKRTADGSEFESPKKKAKVE

SEQ ID NO: 6854 - protein, 2174 aa, synthetic construct
MPAAKRVKLDGGDKKYSIGLDIGTNSVGWAVITDEYKVPSKKFKVLGNTDRHSIKKNLIGALLFDSGETAEATRLKRTARRRYTRRKNRICYLQEIFSNEMAKVDDSFFHRLEESFLVEEDKKHERHPIFGNIVDEVAYHEKYPTIYHLRKKLVDSTDKADLRLIYLALAHMIKFRGHFLIEGDLNPDNSDVDKLFIQLVQTYNQLFEENPINASGVDAKAILSARLSKSRRLENLIAQLPGEKKNGLFGNLIALSLGLTPNFKSNFDLAEDAKLQLSKDTYDDDLDNLLAQIGDQYADLFLAAKNLSDAILLSDILRVNTEITKAPLSASMIKRYDEHHQDLTLLKALVRQQLPEKYKEIFFDQSKNGYAGYIDGGASQEEFYKFIKPILEKMDGTEELLVKLNREDLLRKQRTFDNGSIPHQIHLGELHAILRRQEDFYPFLKDNREKIEKILTFRIPYYVGPLARGNSRFAWMTRKSEETITPWNFEEVVDKGASAQSFIERMTNFDKNLPNEKVLPKHSLLYEYFTVYNELTKVKYVTEGMRKPAFLSGEQKKAIVDLLFKTNRKVTVKQLKEDYFKKIECFDSVEISGVEDRFNASLGTYHDLLKIIKDKDFLDNEENEDILEDIVLTLTLFEDREMIEERLKTYAHLFDDKVMKQLKRRRYTGWGRLSRKLINGIRDKQSGKTILDFLKSDGFANRNFMQLIHDDSLTFKEDIQKAQVSGQGDSLHEHIANLAGSPAIKKGILQTVKVVDELVKVMGRHKPENIVIEMARENQTTQKGQKNSRERMKRIEEGIKELGSQILKEHPVENTQLQNEKLYLYYLQNGRDMYVDQELDINRLSDYDVDHIVPQSFLKDDSIDNKVLTRSDKARGKSDNVPSEEVVKKMKNYWRQLLNAKLITQRKFDNLTKAERGGLSELDKAGFIKRQLVETRQITKHVAQILDSRMNTKYDENDKLIREVKVITLKSKLVSDFRKDFQFYKVREINNYHHAHDAYLNAVVGTALIKKYPKLESEFVYGDYKVYDVRKMIAKSEQEIGKATAKYFFYSNIMNFFKTEITLANGEIRKRPLIETNGETGEIVWDKGRDFATVRKVLSMPQVNIVKKTEVQTGGFSKESILPKRNSDKLIARKKDWDPKKYGGFDSPTVAYSVLVVAKVEKGKSKKLKSVKELLGITIMERSSFEKNPIDFLEAKGYKEVKKDLIIKLPKYSLFELENGRKRMLASAGELQKGNELALPSKYVNFLYLASHYEKLKGSPEDNEQKQLFVEQHKHYLDEIIEQISEFSKRVILADANLDKVLSAYNKHRDKPIREQAENIIHLFTLTNLGAPAAFKYFDTTIDRKRYTSTKEVLDATLIHQSITGLYETRIDLSQLGGDGGGGGGSSGGSGGMDPLQLLQPLEAEIKGTKLKAHWNSGATITCVPQAFLEEEVPIKNIWIKTIHGEKEQPVYYLTFKIQGRKVEAEVISSPYDYILVSPSDIPWLMKKPLQLTTLVPLQEYEERLLKQTMLTGSYKEKLQSLFLKYDALWQHWENQVGHRRIKPHHIATGTVNPRPQKQYPINPKAKASIQTVINDLLKQGVLIQQNSIMNTPVYPVPKPDGKWRMVLDYREVNKTIPLIAAQNQHSAGILSSIFRGKYKTTLDLSNGFWAHSITPESYWLTAFTWLGQQYCWTRLPQGFLNSPALFNADVVDLLKEVPNVQVYVDDIYISHDDPREHLEQLEKVFSLLLNAGYVVSLKKSEIAQHEVEFLGFNITKEGRGLTETFKQKLLNITPPRDLKQLQSILGLLNFARNFIPNFSELVKPLYNIIATAPGKYITWTTDNSQQLQNIISMLNSAENLEERNPEVRLIMKVNTSPSAGYIRFYNEFAKRPIMYLNYVYTKAEVKFTNTEKLLTTIHKGLIKALDLGMGQEILVYSPIVSMTKIQKTPLPERKALPIRWITWMSYLEDPRIQFHYDKTLPELQQVPTVTDDIIAKIKHPSEFSMVFYTDGSAIKHPNVNKSHNAGMGIAQVQFKPEFTVINTWSIPLGDHTAQLAEVAAVEFACKKALKIDGPVLIVTDSFYVAESVNKELPYWQSNGFFNNKKKPLKHVSKWKSIADCIQLKPDIIIIHEKGHQPTASTFHTEGNNLADKLATQGSYVVNAGKRTADGSEFEKRTADGSEFESPKKKAKVE

SEQ ID NO: 6855 - protein, 2094 aa, synthetic construct
MPAAKRVKLDGGDKKYSIGLDIGTNSVGWAVITDEYKVPSKKFKVLGNTDRHSIKKNLIGALLFDSGETAEATRLKRTARRRYTRRKNRICYLQEIFSNEMAKVDDSFFHRLEESFLVEEDKKHERHPIFGNIVDEVAYHEKYPTIYHLRKKLVDSTDKADLRLIYLALAHMIKFRGHFLIEGDLNPDNSDVDKLFIQLVQTYNQLFEENPINASGVDAKAILSARLSKSRRLENLIAQLPGEKKNGLFGNLIALSLGLTPNFKSNFDLAEDAKLQLSKDTYDDDLDNLLAQIGDQYADLFLAAKNLSDAILLSDILRVNTEITKAPLSASMIKRYDEHHQDLTLLKALVRQQLPEKYKEIFFDQSKNGYAGYIDGGASQEEFYKFIKPILEKMDGTEELLVKLNREDLLRKQRTFDNGSIPHQIHLGELHAILRRQEDFYPFLKDNREKIEKILTFRIPYYVGPLARGNSRFAWMTRKSEETITPWNFEEVVDKGASAQSFIERMTNFDKNLPNEKVLPKHSLLYEYFTVYNELTKVKYVTEGMRKPAFLSGEQKKAIVDLLFKTNRKVTVKQLKEDYFKKIECFDSVEISGVEDRFNASLGTYHDLLKIIKDKDFLDNEENEDILEDIVLTLTLFEDREMIEERLKTYAHLFDDKVMKQLKRRRYTGWGRLSRKLINGIRDKQSGKTILDFLKSDGFANRNFMQLIHDDSLTFKEDIQKAQVSGQGDSLHEHIANLAGSPAIKKGILQTVKVVDELVKVMGRHKPENIVIEMARENQTTQKGQKNSRERMKRIEEGIKELGSQILKEHPVENTQLQNEKLYLYYLQNGRDMYVDQELDINRLSDYDVDHIVPQSFLKDDSIDNKVLTRSDKARGKSDNVPSEEVVKKMKNYWRQLLNAKLITQRKFDNLTKAERGGLSELDKAGFIKRQLVETRQITKHVAQILDSRMNTKYDENDKLIREVKVITLKSKLVSDFRKDFQFYKVREINNYHHAHDAYLNAVVGTALIKKYPKLESEFVYGDYKVYDVRKMIAKSEQEIGKATAKYFFYSNIMNFFKTEITLANGEIRKRPLIETNGETGEIVWDKGRDFATVRKVLSMPQVNIVKKTEVQTGGFSKESILPKRNSDKLIARKKDWDPKKYGGFDSPTVAYSVLVVAKVEKGKSKKLKSVKELLGITIMERSSFEKNPIDFLEAKGYKEVKKDLIIKLPKYSLFELENGRKRMLASAGELQKGNELALPSKYVNFLYLASHYEKLKGSPEDNEQKQLFVEQHKHYLDEIIEQISEFSKRVILADANLDKVLSAYNKHRDKPIREQAENIIHLFTLTNLGAPAAFKYFDTTIDRKRYTSTKEVLDATLIHQSITGLYETRIDLSQLGGDGGGGGGSSGGSGGTLNIEDEYRLHETSKEPDVPLGSTWLSDFPQAWAETGGMGLAVRQAPLIIPLKATSTPVSIKQYPMSQEARLGIKPHIQRLLDQGILVPCQSPWNTPLLPVKKPGTNDYRPVQDLREVNKRVEDIHPTVPNPYNLLSGLPPSHQWYTVLDLKDAFFCLRLHPTSQPLFAFEWRDPEMGISGQLTWTRLPQGFKNSPTLFNEALHRDLADFRIQHPDLILLQYVDDLLLAATSEQDCQRGTRALLQTLGNLGYRASAKKAQICQKQVKYLGYLLKEGQRWLTEARKETVMGQPTPKTPRQLREFLGTAGFCRLWIPGFAEMAAPLYPLTKPGTLFNWGPDQQKAYQEIKQALLTAPALGLPDLTKPFELFVDEKQGYAKGVLTQKLGPWRRPVAYLSKKLDPVAAGWPPCLRMVAAIAVLTKDAGKLTMGQPLVILAPHAVEALVKQPPDRWLSNARMTHYQAMLLDTDRVQFGPVVALNPATLLPLPEKEAPHDCLEILAETHGTRPDLTDQPIPDADYTWYTDGSSFLQEGQRRAGAAVTTETEVIWARALPAGTSAQRAELIALTQALKMAEGKKLNVYTDSRYAFATAHVHGEIYRRRGWLTSEGREIKNKNEILALLKALFLPKRLSIIHCPGHQKGNSAEARGNRMADQAAREAAMKAVLETSTLLAGKRTADGSEFEKRTADGSEFESPKKKAKVE

SEQ ID NO: 6856 - protein, 2171 aa, synthetic construct
MPAAKRVKLDGGDKKYSIGLDIGTNSVGWAVITDEYKVPSKKFKVLGNTDRHSIKKNLIGALLFDSGETAEATRLKRTARRRYTRRKNRICYLQEIFSNEMAKVDDSFFHRLEESFLVEEDKKHERHPIFGNIVDEVAYHEKYPTIYHLRKKLVDSTDKADLRLIYLALAHMIKFRGHFLIEGDLNPDNSDVDKLFIQLVQTYNQLFEENPINASGVDAKAILSARLSKSRRLENLIAQLPGEKKNGLFGNLIALSLGLTPNFKSNFDLAEDAKLQLSKDTYDDDLDNLLAQIGDQYADLFLAAKNLSDAILLSDILRVNTEITKAPLSASMIKRYDEHHQDLTLLKALVRQQLPEKYKEIFFDQSKNGYAGYIDGGASQEEFYKFIKPILEKMDGTEELLVKLNREDLLRKQRTFDNGSIPHQIHLGELHAILRRQEDFYPFLKDNREKIEKILTFRIPYYVGPLARGNSRFAWMTRKSEETITPWNFEEVVDKGASAQSFIERMTNFDKNLPNEKVLPKHSLLYEYFTVYNELTKVKYVTEGMRKPAFLSGEQKKAIVDLLFKTNRKVTVKQLKEDYFKKIECFDSVEISGVEDRFNASLGTYHDLLKIIKDKDFLDNEENEDILEDIVLTLTLFEDREMIEERLKTYAHLFDDKVMKQLKRRRYTGWGRLSRKLINGIRDKQSGKTILDFLKSDGFANRNFMQLIHDDSLTFKEDIQKAQVSGQGDSLHEHIANLAGSPAIKKGILQTVKVVDELVKVMGRHKPENIVIEMARENQTTQKGQKNSRERMKRIEEGIKELGSQILKEHPVENTQLQNEKLYLYYLQNGRDMYVDQELDINRLSDYDVDHIVPQSFLKDDSIDNKVLTRSDKARGKSDNVPSEEVVKKMKNYWRQLLNAKLITQRKFDNLTKAERGGLSELDKAGFIKRQLVETRQITKHVAQILDSRMNTKYDENDKLIREVKVITLKSKLVSDFRKDFQFYKVREINNYHHAHDAYLNAVVGTALIKKYPKLESEFVYGDYKVYDVRKMIAKSEQEIGKATAKYFFYSNIMNFFKTEITLANGEIRKRPLIETNGETGEIVWDKGRDFATVRKVLSMPQVNIVKKTEVQTGGFSKESILPKRNSDKLIARKKDWDPKKYGGFDSPTVAYSVLVVAKVEKGKSKKLKSVKELLGITIMERSSFEKNPIDFLEAKGYKEVKKDLIIKLPKYSLFELENGRKRMLASAGELQKGNELALPSKYVNFLYLASHYEKLKGSPEDNEQKQLFVEQHKHYLDEIIEQISEFSKRVILADANLDKVLSAYNKHRDKPIREQAENIIHLFTLTNLGAPAAFKYFDTTIDRKRYTSTKEVLDATLIHQSITGLYETRIDLSQLGGDGGGSSGGSGGGGGMDLLKPLTVERKGVKIKGYWNSQADITCVPKDLLQGEEPVRQQNVTTIHGTQEGDVYYVNLKIDGRRINTEVIGTTLDYAIITPGDVPWILKKPLELTIKLDLEEQQGTLLNNSILSKKGKEELKQLFEKYSALWQSWENQVGHRRIRPHKIATGTVKPTPQKQYHINPKAKPDIQIVINDLLKQGVLIQKESTMNTPVYPVPKPNGRWRMVLDYRAVNKVTPLIAVQNQHSYGILGSLFKGRYKTTIDLSNGFWAHPIVPEDYWITAFTWQGKQYCWTVLPQGFLNSPGLFTGDVVDLLQGIPNVEVYVDDVYISHDSEKEHLEYLDILFNRLKEAGYIISLKKSNIANSIVDFLGFQITNEGRGLTDTFKEKLENITAPTTLKQLQSILGLLNFARNFIPDFTELIAPLYALIPKSTKNYVPWQIEHSTTLETLITKLNGAEYLQGRKGDKTLIMKVNASYTTGYIRYYNEGEKKPISYVSIVFSKTELKFTELEKLLTTVHKGLLKALDLSMGQNIHVYSPIVSMQNIQKTPQTAKKALASRWLSWLSYLEDPRIRFFYDPQMPALKDLPAVDTGKDNKKHPSNFQHIFYTDGSAITSPTKEGHLNAGMGIVYFINKDGNLQKQQEWSISLGNHTAQFAEIAAFEFALKKCLPLGGNILVVTDSNYVAKAYNEELDVWASNGFVNNRKKPLKHISKWKSVADLKRLRPDVVVTHEPGHQKLDSSPHAYGNNLADQLATQASFKVHAGKRTADGSEFEKRTADGSEFESPKKKAKVE

SEQ ID NO: 6857 - protein, 2093 aa, synthetic construct
MPAAKRVKLDGGDKKYSIGLDIGTNSVGWAVITDEYKVPSKKFKVLGNTDRHSIKKNLIGALLFDSGETAEATRLKRTARRRYTRRKNRICYLQEIFSNEMAKVDDSFFHRLEESFLVEEDKKHERHPIFGNIVDEVAYHEKYPTIYHLRKKLVDSTDKADLRLIYLALAHMIKFRGHFLIEGDLNPDNSDVDKLFIQLVQTYNQLFEENPINASGVDAKAILSARLSKSRRLENLIAQLPGEKKNGLFGNLIALSLGLTPNFKSNFDLAEDAKLQLSKDTYDDDLDNLLAQIGDQYADLFLAAKNLSDAILLSDILRVNTEITKAPLSASMIKRYDEHHQDLTLLKALVRQQLPEKYKEIFFDQSKNGYAGYIDGGASQEEFYKFIKPILEKMDGTEELLVKLNREDLLRKQRTFDNGSIPHQIHLGELHAILRRQEDFYPFLKDNREKIEKILTFRIPYYVGPLARGNSRFAWMTRKSEETITPWNFEEVVDKGASAQSFIERMTNFDKNLPNEKVLPKHSLLYEYFTVYNELTKVKYVTEGMRKPAFLSGEQKKAIVDLLFKTNRKVTVKQLKEDYFKKIECFDSVEISGVEDRFNASLGTYHDLLKIIKDKDFLDNEENEDILEDIVLTLTLFEDREMIEERLKTYAHLFDDKVMKQLKRRRYTGWGRLSRKLINGIRDKQSGKTILDFLKSDGFANRNFMQLIHDDSLTFKEDIQKAQVSGQGDSLHEHIANLAGSPAIKKGILQTVKVVDELVKVMGRHKPENIVIEMARENQTTQKGQKNSRERMKRIEEGIKELGSQILKEHPVENTQLQNEKLYLYYLQNGRDMYVDQELDINRLSDYDVDHIVPQSFLKDDSIDNKVLTRSDKARGKSDNVPSEEVVKKMKNYWRQLLNAKLITQRKFDNLTKAERGGLSELDKAGFIKRQLVETRQITKHVAQILDSRMNTKYDENDKLIREVKVITLKSKLVSDFRKDFQFYKVREINNYHHAHDAYLNAVVGTALIKKYPKLESEFVYGDYKVYDVRKMIAKSEQEIGKATAKYFFYSNIMNFFKTEITLANGEIRKRPLIETNGETGEIVWDKGRDFATVRKVLSMPQVNIVKKTEVQTGGFSKESILPKRNSDKLIARKKDWDPKKYGGFDSPTVAYSVLVVAKVEKGKSKKLKSVKELLGITIMERSSFEKNPIDFLEAKGYKEVKKDLIIKLPKYSLFELENGRKRMLASAGELQKGNELALPSKYVNFLYLASHYEKLKGSPEDNEQKQLFVEQHKHYLDEIIEQISEFSKRVILADANLDKVLSAYNKHRDKPIREQAENIIHLFTLTNLGAPAAFKYFDTTIDRKRYTSTKEVLDATLIHQSITGLYETRIDLSQLGGDGGGSSGGSGGGGGTLQLEEEYRLFEPESTQKQEMDIWLKNFPQAWAETGGMGTAHCQAPVLIQLKATATPISIRQYPMPHEAYQGIKPHIRRMLDQGILKPCQSPWNTPLLPVKKPGTEDYRPVQDLREVNKRVEDIHPTVPNPYNLLSTLPPSHPWYTVLDLKDAFFCLRLHSESQLLFAFEWRDPEIGLSGQLTWTRLPQGFKNSPTLFNEALHSDLADFRVRYPALVLLQYVDDLLLAAATRTECLEGTKALLETLGNKGYRASAKKAQICLQEVTYLGYSLKDGQRWLTKARKEAILSIPVPKNSRQVREFLGKAGYCRLFIPGFAELAAPLYPLTRPGTLFQWGTEQQLAFEDIKKALLSSPALGLPDITKPFELFIDENSGFAKGVLVQKLGPWKRPVAYLSKKLDTVASGWPPCLRMVAAIAILVKDAGKLTLGQPLTILTSHPVEALVRQPPNKWLSNARMTHYQAMLLDAERVHFGPTVSLNPATLLPLPSGGNHHDCLQILAETHGTRPDLTDQPLPDADLTWYTDGSSFIRNGEREAGAAVTTESEVIWAAPLPPGTSAQRAELIALTQALKMAEGKKLTVYTDSRYAFATTHVHGEIYRRRGWLTSEGKEIKNKNEILALLEALFLPKRLSIIHCPGHQKGDSPQAKGNRLADDTAKKAATETHSSLTVLPAGKRTADGSEFEKRTADGSEFESPKKKAKVE

SEQ ID NO: 6858 - protein, 2216 aa, synthetic construct
MPAAKRVKLDGGDKKYSIGLDIGTNSVGWAVITDEYKVPSKKFKVLGNTDRHSIKKNLIGALLFDSGETAEATRLKRTARRRYTRRKNRICYLQEIFSNEMAKVDDSFFHRLEESFLVEEDKKHERHPIFGNIVDEVAYHEKYPTIYHLRKKLVDSTDKADLRLIYLALAHMIKFRGHFLIEGDLNPDNSDVDKLFIQLVQTYNQLFEENPINASGVDAKAILSARLSKSRRLENLIAQLPGEKKNGLFGNLIALSLGLTPNFKSNFDLAEDAKLQLSKDTYDDDLDNLLAQIGDQYADLFLAAKNLSDAILLSDILRVNTEITKAPLSASMIKRYDEHHQDLTLLKALVRQQLPEKYKEIFFDQSKNGYAGYIDGGASQEEFYKFIKPILEKMDGTEELLVKLNREDLLRKQRTFDNGSIPHQIHLGELHAILRRQEDFYPFLKDNREKIEKILTFRIPYYVGPLARGNSRFAWMTRKSEETITPWNFEEVVDKGASAQSFIERMTNFDKNLPNEKVLPKHSLLYEYFTVYNELTKVKYVTEGMRKPAFLSGEQKKAIVDLLFKTNRKVTVKQLKEDYFKKIECFDSVEISGVEDRFNASLGTYHDLLKIIKDKDFLDNEENEDILEDIVLTLTLFEDREMIEERLKTYAHLFDDKVMKQLKRRRYTGWGRLSRKLINGIRDKQSGKTILDFLKSDGFANRNFMQLIHDDSLTFKEDIQKAQVSGQGDSLHEHIANLAGSPAIKKGILQTVKVVDELVKVMGRHKPENIVIEMARENQTTQKGQKNSRERMKRIEEGIKELGSQILKEHPVENTQLQNEKLYLYYLQNGRDMYVDQELDINRLSDYDVDHIVPQSFLKDDSIDNKVLTRSDKARGKSDNVPSEEVVKKMKNYWRQLLNAKLITQRKFDNLTKAERGGLSELDKAGFIKRQLVETRQITKHVAQILDSRMNTKYDENDKLIREVKVITLKSKLVSDFRKDFQFYKVREINNYHHAHDAYLNAVVGTALIKKYPKLESEFVYGDYKVYDVRKMIAKSEQEIGKATAKYFFYSNIMNFFKTEITLANGEIRKRPLIETNGETGEIVWDKGRDFATVRKVLSMPQVNIVKKTEVQTGGFSKESILPKRNSDKLIARKKDWDPKKYGGFDSPTVAYSVLVVAKVEKGKSKKLKSVKELLGITIMERSSFEKNPIDFLEAKGYKEVKKDLIIKLPKYSLFELENGRKRMLASAGELQKGNELALPSKYVNFLYLASHYEKLKGSPEDNEQKQLFVEQHKHYLDEIIEQISEFSKRVILADANLDKVLSAYNKHRDKPIREQAENIIHLFTLTNLGAPAAFKYFDTTIDRKRYTSTKEVLDATLIHQSITGLYETRIDLSQLGGDGGGSSGGSGGGGGTLGDQGSRGSDPLPEPRVTLTVEGIPTEFLVNTGAEHSVLTKPMGKMGSKRTVVAGATGSKVYPWTTKRLLKIGQKQVTHSFLVIPECPAPLLGRDLLTKLKAQIQFSTEGPQVTWEDRPAMCLVLNLEEEYRLHEKPVPPSIDPSWLQLFPMVWAEKAGMGLANQVPPVVVELKSDASPVAVRQYPMSKEAREGIRPHIQRFLDLGILVPCQSPWNTPLLPVKKPGTNDYRPVQDLREVNKRVQDIHPTVPNPYNLLSSLPPSHTWYSVLDLKDAFFCLKLHPNSQPLFAFEWRDPEKGNTGQLTWTRLPQGFKNSPTLFDEALHRDLASFRALNPQVVMLQYVDDLLVAAPTYRDCKEGTRRLLQELSKLGYRVSAKKAQLCREEVTYLGYLLKGGKRWLTPARKATVMKIPTPTTPRQVREFLGTAGFCRLWIPGFASLAAPLYPLTREKVPFTWTEAHQEAFGRIKEALLSAPALALPDLTKPFALYVDEKEGVARGVLTQTLGPWRRPVAYLSKKLDPVASGWPTCLKAIAAVALLLKDADKLTLGQNVLVIAPHNLESIVRQPPDRWMTNARMTHYQSLLLNERVSFAPPAILNPATLLPVESDDTPIHICSEILAEETGTRPDLRDQPLPGVPAWYTDGSSFIMDGRRQAGAAIVDNKRTVWASNLPEGTSAQKAELIALTQALRLAEGKSINIYTDSRYAFATAHVHGAIYKQRGLLTSAGKDIKNKEEILALLEAIHLPKRVAIIHCPGHQRGTDPVATGNRKADEAAKQAAQSTRILTETTKNAGKRTADGSEFEKRTADGSEFESPKKKAKVE

SEQ ID NO: 6859 - protein, 2125 aa, synthetic construct
MPAAKRVKLDGGDKKYSIGLDIGTNSVGWAVITDEYKVPSKKFKVLGNTDRHSIKKNLIGALLFDSGETAEATRLKRTARRRYTRRKNRICYLQEIFSNEMAKVDDSFFHRLEESFLVEEDKKHERHPIFGNIVDEVAYHEKYPTIYHLRKKLVDSTDKADLRLIYLALAHMIKFRGHFLIEGDLNPDNSDVDKLFIQLVQTYNQLFEENPINASGVDAKAILSARLSKSRRLENLIAQLPGEKKNGLFGNLIALSLGLTPNFKSNFDLAEDAKLQLSKDTYDDDLDNLLAQIGDQYADLFLAAKNLSDAILLSDILRVNTEITKAPLSASMIKRYDEHHQDLTLLKALVRQQLPEKYKEIFFDQSKNGYAGYIDGGASQEEFYKFIKPILEKMDGTEELLVKLNREDLLRKQRTFDNGSIPHQIHLGELHAILRRQEDFYPFLKDNREKIEKILTFRIPYYVGPLARGNSRFAWMTRKSEETITPWNFEEVVDKGASAQSFIERMTNFDKNLPNEKVLPKHSLLYEYFTVYNELTKVKYVTEGMRKPAFLSGEQKKAIVDLLFKTNRKVTVKQLKEDYFKKIECFDSVEISGVEDRFNASLGTYHDLLKIIKDKDFLDNEENEDILEDIVLTLTLFEDREMIEERLKTYAHLFDDKVMKQLKRRRYTGWGRLSRKLINGIRDKQSGKTILDFLKSDGFANRNFMQLIHDDSLTFKEDIQKAQVSGQGDSLHEHIANLAGSPAIKKGILQTVKVVDELVKVMGRHKPENIVIEMARENQTTQKGQKNSRERMKRIEEGIKELGSQILKEHPVENTQLQNEKLYLYYLQNGRDMYVDQELDINRLSDYDVDHIVPQSFLKDDSIDNKVLTRSDKARGKSDNVPSEEVVKKMKNYWRQLLNAKLITQRKFDNLTKAERGGLSELDKAGFIKRQLVETRQITKHVAQILDSRMNTKYDENDKLIREVKVITLKSKLVSDFRKDFQFYKVREINNYHHAHDAYLNAVVGTALIKKYPKLESEFVYGDYKVYDVRKMIAKSEQEIGKATAKYFFYSNIMNFFKTEITLANGEIRKRPLIETNGETGEIVWDKGRDFATVRKVLSMPQVNIVKKTEVQTGGFSKESILPKRNSDKLIARKKDWDPKKYGGFDSPTVAYSVLVVAKVEKGKSKKLKSVKELLGITIMERSSFEKNPIDFLEAKGYKEVKKDLIIKLPKYSLFELENGRKRMLASAGELQKGNELALPSKYVNFLYLASHYEKLKGSPEDNEQKQLFVEQHKHYLDEIIEQISEFSKRVILADANLDKVLSAYNKHRDKPIREQAENIIHLFTLTNLGAPAAFKYFDTTIDRKRYTSTKEVLDATLIHQSITGLYETRIDLSQLGGDGGGSSGGSGGGGGLLGRDLLTKLKAQIQFSTEGPQVTWEDRPAMCLVLNLEEEYRLHEKPVPPSIDPSWLQLFPMVWAEKAGMGLANQVPPVVVELKSDASPVAVRQYPMSKEAREGIRPHIQRFLDLGILVPCQSPWNTPLLPVKKPGTNDYRPVQDLREVNKRVQDIHPTVPNPYNLLSSLPPSHTWYSVLDLKDAFFCLKLHPNSQPLFAFEWRDPEKGNTGQLTWTRLPQGFKNSPTLFNEALHRDLASFRALNPQVVMLQYVDDLLVAAPTYRDCKEGTRRLLQELSKLGYRVSAKKAQLCREEVTYLGYLLKGGKRWLTPARKATVMKIPTPTTPRQVREFLGTAGFCRLWIPGFASLAAPLYPLTRPKVPFTWTEAHQEAFGRIKEALLSAPALALPDLTKPFALYVDEKEGVARGVLTQTLGPWRRPVAYLSKKLDPVASGWPTCLKAIAAVALLLKDADKLTLGQNVLVIAPHNLESIVRQPPDRWMTNARMTHYQSLLLNERVSFAPPAILNPATLLPVESDDTPIHICSEILAEETGTRPDLRDQPLPGVPAWYTDGSSFIMDGRRQAGAAIVDNKRTVWASNLPEGTSAQKAELIALTQALRLAEGKSINIYTDSRYAFATAHVHGAIYKQRGWLTSAGKDIKNKEEILALLEAIHLPKRVAIIHCPGHQRGTDPVATGNRKADEAAKQAAQSTRILTETTKNAGKRTADGSEFEKRTADGSEFESPKKKAKVE

SEQ ID NO: 6860 - protein, 2125 aa, synthetic construct
MPAAKRVKLDGGDKKYSIGLDIGTNSVGWAVITDEYKVPSKKFKVLGNTDRHSIKKNLIGALLFDSGETAEATRLKRTARRRYTRRKNRICYLQEIFSNEMAKVDDSFFHRLEESFLVEEDKKHERHPIFGNIVDEVAYHEKYPTIYHLRKKLVDSTDKADLRLIYLALAHMIKFRGHFLIEGDLNPDNSDVDKLFIQLVQTYNQLFEENPINASGVDAKAILSARLSKSRRLENLIAQLPGEKKNGLFGNLIALSLGLTPNFKSNFDLAEDAKLQLSKDTYDDDLDNLLAQIGDQYADLFLAAKNLSDAILLSDILRVNTEITKAPLSASMIKRYDEHHQDLTLLKALVRQQLPEKYKEIFFDQSKNGYAGYIDGGASQEEFYKFIKPILEKMDGTEELLVKLNREDLLRKQRTFDNGSIPHQIHLGELHAILRRQEDFYPFLKDNREKIEKILTFRIPYYVGPLARGNSRFAWMTRKSEETITPWNFEEVVDKGASAQSFIERMTNFDKNLPNEKVLPKHSLLYEYFTVYNELTKVKYVTEGMRKPAFLSGEQKKAIVDLLFKTNRKVTVKQLKEDYFKKIECFDSVEISGVEDRFNASLGTYHDLLKIIKDKDFLDNEENEDILEDIVLTLTLFEDREMIEERLKTYAHLFDDKVMKQLKRRRYTGWGRLSRKLINGIRDKQSGKTILDFLKSDGFANRNFMQLIHDDSLTFKEDIQKAQVSGQGDSLHEHIANLAGSPAIKKGILQTVKVVDELVKVMGRHKPENIVIEMARENQTTQKGQKNSRERMKRIEEGIKELGSQILKEHPVENTQLQNEKLYLYYLQNGRDMYVDQELDINRLSDYDVDHIVPQSFLKDDSIDNKVLTRSDKARGKSDNVPSEEVVKKMKNYWRQLLNAKLITQRKFDNLTKAERGGLSELDKAGFIKRQLVETRQITKHVAQILDSRMNTKYDENDKLIREVKVITLKSKLVSDFRKDFQFYKVREINNYHHAHDAYLNAVVGTALIKKYPKLESEFVYGDYKVYDVRKMIAKSEQEIGKATAKYFFYSNIMNFFKTEITLANGEIRKRPLIETNGETGEIVWDKGRDFATVRKVLSMPQVNIVKKTEVQTGGFSKESILPKRNSDKLIARKKDWDPKKYGGFDSPTVAYSVLVVAKVEKGKSKKLKSVKELLGITIMERSSFEKNPIDFLEAKGYKEVKKDLIIKLPKYSLFELENGRKRMLASAGELQKGNELALPSKYVNFLYLASHYEKLKGSPEDNEQKQLFVEQHKHYLDEIIEQISEFSKRVILADANLDKVLSAYNKHRDKPIREQAENIIHLFTLTNLGAPAAFKYFDTTIDRKRYTSTKEVLDATLIHQSITGLYETRIDLSQLGGDGGGSSGGSGGGGGLLGRDLLTKLKAQIQFSTEGPQVTWEDRPAMCLVLNLEEEYRLHEKPVPPSIDPSWLQLFPMVWAEKAGMGLANQVPPVVVELKSDASPVAVRQYPMSKEAREGIRPHIQRFLDLGILVPCQSPWNTPLLPVKKPGTNDYRPVQDLREVNKRVQDIHPTVPNPYNLLSSLPPSHTWYSVLDLKDAFFCLKLHPNSQPLFAFEWRDPEKGNTGQLTWTRLPQGFKNSPTLFNEALHRDLASFRALNPQVVMLQYVDDLLVAAPTYRDCKEGTRRLLQELSKLGYRVSAKKAQLCREEVTYLGYLLKGGKRWLTPARKATVMKIPTPTTPRQVREFLGKAGFCRLFIPGFASLAAPLYPLTRPKVPFTWTEAHQEAFGRIKEALLSAPALALPDLTKPFALYVDEKEGVARGVLTQTLGPWRRPVAYLSKKLDPVASGWPTCLKAIAAVALLLKDADKLTLGQNVLVIAPHNLESIVRQPPDRWMTNARMTHYQSLLLNERVSFAPPAILNPATLLPVESDDTPIHICSEILAEETGTRPDLRDQPLPGVPAWYTDGSSFIMDGRRQAGAAIVDNKRTVWASNLPEGTSAQKAELIALTQALRLAEGKSINIYTDSRYAFATAHVHGAIYKQRGWLTSAGKDIKNKEEILALLEAIHLPKRVAIIHCPGHQRGTDPVATGNRKADEAAKQAAQSTRILTETTKNAGKRTADGSEFEKRTADGSEFESPKKKAKVE

SEQ ID NO: 6861 - protein, 2216 aa, synthetic construct
MPAAKRVKLDGGDKKYSIGLDIGTNSVGWAVITDEYKVPSKKFKVLGNTDRHSIKKNLIGALLFDSGETAEATRLKRTARRRYTRRKNRICYLQEIFSNEMAKVDDSFFHRLEESFLVEEDKKHERHPIFGNIVDEVAYHEKYPTIYHLRKKLVDSTDKADLRLIYLALAHMIKFRGHFLIEGDLNPDNSDVDKLFIQLVQTYNQLFEENPINASGVDAKAILSARLSKSRRLENLIAQLPGEKKNGLFGNLIALSLGLTPNFKSNFDLAEDAKLQLSKDTYDDDLDNLLAQIGDQYADLFLAAKNLSDAILLSDILRVNTEITKAPLSASMIKRYDEHHQDLTLLKALVRQQLPEKYKEIFFDQSKNGYAGYIDGGASQEEFYKFIKPILEKMDGTEELLVKLNREDLLRKQRTFDNGSIPHQIHLGELHAILRRQEDFYPFLKDNREKIEKILTFRIPYYVGPLARGNSRFAWMTRKSEETITPWNFEEVVDKGASAQSFIERMTNFDKNLPNEKVLPKHSLLYEYFTVYNELTKVKYVTEGMRKPAFLSGEQKKAIVDLLFKTNRKVTVKQLKEDYFKKIECFDSVEISGVEDRFNASLGTYHDLLKIIKDKDFLDNEENEDILEDIVLTLTLFEDREMIEERLKTYAHLFDDKVMKQLKRRRYTGWGRLSRKLINGIRDKQSGKTILDFLKSDGFANRNFMQLIHDDSLTFKEDIQKAQVSGQGDSLHEHIANLAGSPAIKKGILQTVKVVDELVKVMGRHKPENIVIEMARENQTTQKGQKNSRERMKRIEEGIKELGSQILKEHPVENTQLQNEKLYLYYLQNGRDMYVDQELDINRLSDYDVDHIVPQSFLKDDSIDNKVLTRSDKARGKSDNVPSEEVVKKMKNYWRQLLNAKLITQRKFDNLTKAERGGLSELDKAGFIKRQLVETRQITKHVAQILDSRMNTKYDENDKLIREVKVITLKSKLVSDFRKDFQFYKVREINNYHHAHDAYLNAVVGTALIKKYPKLESEFVYGDYKVYDVRKMIAKSEQEIGKATAKYFFYSNIMNFFKTEITLANGEIRKRPLIETNGETGEIVWDKGRDFATVRKVLSMPQVNIVKKTEVQTGGFSKESILPKRNSDKLIARKKDWDPKKYGGFDSPTVAYSVLVVAKVEKGKSKKLKSVKELLGITIMERSSFEKNPIDFLEAKGYKEVKKDLIIKLPKYSLFELENGRKRMLASAGELQKGNELALPSKYVNFLYLASHYEKLKGSPEDNEQKQLFVEQHKHYLDEIIEQISEFSKRVILADANLDKVLSAYNKHRDKPIREQAENIIHLFTLTNLGAPAAFKYFDTTIDRKRYTSTKEVLDATLIHQSITGLYETRIDLSQLGGDGGGSSGGSGGGGGTLGDQGSRGSDPLPEPRVTLTVEGIPTEFLVNTGAEHSVLTKPMGKMGSKRTVVAGATGSKVYPWTTKRLLKIGQKQVTHSFLVIPECPAPLLGRDLLTKLKAQIQFSTEGPQVTWEDRPAMCLVLNLEEEYRLHEKPVPPSIDPSWLQLFPMVWAEKAGMGLANQVPPVVVELKSDASPVAVRQYPMSKEAREGIRPHIQRFLDLGILVPCQSPWNTPLLPVKKPGTNDYRPVQDLREVNKRVQDIHPTVPNPYNLLSSLPPSHTWYSVLDLKDAFFCLKLHPNSQPLFAFEWRDPEKGNTGQLTWTRLPQGFKNSPTLFNEALHRDLASFRALNPQVVMLQYVDDLLVAAPTYRDCKEGTRRLLQELSKLGYRVSAKKAQLCREEVTYLGYLLKGGKRWLTPARKATVMKIPTPTTPRQVREFLGTAGFCRLWIPGFASLAAPLYPLTRPKVPFTWTEAHQEAFGRIKEALLSAPALALPDLTKPFALYVDEKEGVARGVLTQTLGPWRRPVAYLSKKLDPVASGWPTCLKAIAAVALLLKDADKLTLGQNVLVIAPHNLESIVRQPPDRWMTNARMTHYQSLLLNERVSFAPPAILNPATLLPVESDDTPIHICSEILAEETGTRPDLRDQPLPGVPAWYTDGSSFIMDGRRQAGAAIVDNKRTVWASNLPEGTSAQKAELIALTQALRLAEGKSINIYTDSRYAFATAHVHGAIYKQRGWLTSAGKDIKNKEEILALLEAIHLPKRVAIIHCPGHQRGTDPVATGNRKADEAAKQAAQSTRILTETTKNAGKRTADGSEFEKRTADGSEFESPKKKAKVE

SEQ ID NO: 6862 - protein, 2216 aa, synthetic construct
MPAAKRVKLDGGDKKYSIGLDIGTNSVGWAVITDEYKVPSKKFKVLGNTDRHSIKKNLIGALLFDSGETAEATRLKRTARRRYTRRKNRICYLQEIFSNEMAKVDDSFFHRLEESFLVEEDKKHERHPIFGNIVDEVAYHEKYPTIYHLRKKLVDSTDKADLRLIYLALAHMIKFRGHFLIEGDLNPDNSDVDKLFIQLVQTYNQLFEENPINASGVDAKAILSARLSKSRRLENLIAQLPGEKKNGLFGNLIALSLGLTPNFKSNFDLAEDAKLQLSKDTYDDDLDNLLAQIGDQYADLFLAAKNLSDAILLSDILRVNTEITKAPLSASMIKRYDEHHQDLTLLKALVRQQLPEKYKEIFFDQSKNGYAGYIDGGASQEEFYKFIKPILEKMDGTEELLVKLNREDLLRKQRTFDNGSIPHQIHLGELHAILRRQEDFYPFLKDNREKIEKILTFRIPYYVGPLARGNSRFAWMTRKSEETITPWNFEEVVDKGASAQSFIERMTNFDKNLPNEKVLPKHSLLYEYFTVYNELTKVKYVTEGMRKPAFLSGEQKKAIVDLLFKTNRKVTVKQLKEDYFKKIECFDSVEISGVEDRFNASLGTYHDLLKIIKDKDFLDNEENEDILEDIVLTLTLFEDREMIEERLKTYAHLFDDKVMKQLKRRRYTGWGRLSRKLINGIRDKQSGKTILDFLKSDGFANRNFMQLIHDDSLTFKEDIQKAQVSGQGDSLHEHIANLAGSPAIKKGILQTVKVVDELVKVMGRHKPENIVIEMARENQTTQKGQKNSRERMKRIEEGIKELGSQILKEHPVENTQLQNEKLYLYYLQNGRDMYVDQELDINRLSDYDVDHIVPQSFLKDDSIDNKVLTRSDKARGKSDNVPSEEVVKKMKNYWRQLLNAKLITQRKFDNLTKAERGGLSELDKAGFIKRQLVETRQITKHVAQILDSRMNTKYDENDKLIREVKVITLKSKLVSDFRKDFQFYKVREINNYHHAHDAYLNAVVGTALIKKYPKLESEFVYGDYKVYDVRKMIAKSEQEIGKATAKYFFYSNIMNFFKTEITLANGEIRKRPLIETNGETGEIVWDKGRDFATVRKVLSMPQVNIVKKTEVQTGGFSKESILPKRNSDKLIARKKDWDPKKYGGFDSPTVAYSVLVVAKVEKGKSKKLKSVKELLGITIMERSSFEKNPIDFLEAKGYKEVKKDLIIKLPKYSLFELENGRKRMLASAGELQKGNELALPSKYVNFLYLASHYEKLKGSPEDNEQKQLFVEQHKHYLDEIIEQISEFSKRVILADANLDKVLSAYNKHRDKPIREQAENIIHLFTLTNLGAPAAFKYFDTTIDRKRYTSTKEVLDATLIHQSITGLYETRIDLSQLGGDGGGSSGGSGGGGGTLGDQGSRGSDPLPEPRVTLTVEGIPTEFLVNTGAEHSVLTKPMGKMGSKRTVVAGATGSKVYPWTTKRLLKIGQKQVTHSFLVIPECPAPLLGRDLLTKLKAQIQFSTEGPQVTWEDRPAMCLVLNLEEEYRLHEKPVPPSIDPSWLQLFPMVWAEKAGMGLANQVPPVVVELKSDASPVAVRQYPMSKEAREGIRPHIQRFLDLGILVPCQSPWNTPLLPVKKPGTNDYRPVQDLREVNKRVQDIHPTVPNPYNLLSSLPPSHTWYSVLDLKDAFFCLKLHPNSQPLFAFEWRDPEKGNTGQLTWTRLPQGFKNSPTLFNEALHRDLASFRALNPQVVMLQYVDDLLVAAPTYRDCKEGTRRLLQELSKLGYRVSAKKAQLCREEVTYLGYLLKGGKRWLTPARKATVMKIPTPTTPRQVREFLGKAGFCRLFIPGFASLAAPLYPLTRPKVPFTWTEAHQEAFGRIKEALLSAPALALPDLTKPFALYVDEKEGVARGVLTQTLGPWRRPVAYLSKKLDPVASGWPTCLKAIAAVALLLKDADKLTLGQNVLVIAPHNLESIVRQPPDRWMTNARMTHYQSLLLNERVSFAPPAILNPATLLPVESDDTPIHICSEILAEETGTRPDLRDQPLPGVPAWYTDGSSFIMDGRRQAGAAIVDNKRTVWASNLPEGTSAQKAELIALTQALRLAEGKSINIYTDSRYAFATAHVHGAIYKQRGWLTSAGKDIKNKEEILALLEAIHLPKRVAIIHCPGHQRGTDPVATGNRKADEAAKQAAQSTRILTETTKNAGKRTADGSEFEKRTADGSEFESPKKKAKVE

SEQ ID NO: 6863 - protein, 2094 aa, synthetic construct
MPAAKRVKLDGGDKKYSIGLDIGTNSVGWAVITDEYKVPSKKFKVLGNTDRHSIKKNLIGALLFDSGETAEATRLKRTARRRYTRRKNRICYLQEIFSNEMAKVDDSFFHRLEESFLVEEDKKHERHPIFGNIVDEVAYHEKYPTIYHLRKKLVDSTDKADLRLIYLALAHMIKFRGHFLIEGDLNPDNSDVDKLFIQLVQTYNQLFEENPINASGVDAKAILSARLSKSRRLENLIAQLPGEKKNGLFGNLIALSLGLTPNFKSNFDLAEDAKLQLSKDTYDDDLDNLLAQIGDQYADLFLAAKNLSDAILLSDILRVNTEITKAPLSASMIKRYDEHHQDLTLLKALVRQQLPEKYKEIFFDQSKNGYAGYIDGGASQEEFYKFIKPILEKMDGTEELLVKLNREDLLRKQRTFDNGSIPHQIHLGELHAILRRQEDFYPFLKDNREKIEKILTFRIPYYVGPLARGNSRFAWMTRKSEETITPWNFEEVVDKGASAQSFIERMTNFDKNLPNEKVLPKHSLLYEYFTVYNELTKVKYVTEGMRKPAFLSGEQKKAIVDLLFKTNRKVTVKQLKEDYFKKIECFDSVEISGVEDRFNASLGTYHDLLKIIKDKDFLDNEENEDILEDIVLTLTLFEDREMIEERLKTYAHLFDDKVMKQLKRRRYTGWGRLSRKLINGIRDKQSGKTILDFLKSDGFANRNFMQLIHDDSLTFKEDIQKAQVSGQGDSLHEHIANLAGSPAIKKGILQTVKVVDELVKVMGRHKPENIVIEMARENQTTQKGQKNSRERMKRIEEGIKELGSQILKEHPVENTQLQNEKLYLYYLQNGRDMYVDQELDINRLSDYDVDHIVPQSFLKDDSIDNKVLTRSDKARGKSDNVPSEEVVKKMKNYWRQLLNAKLITQRKFDNLTKAERGGLSELDKAGFIKRQLVETRQITKHVAQILDSRMNTKYDENDKLIREVKVITLKSKLVSDFRKDFQFYKVREINNYHHAHDAYLNAVVGTALIKKYPKLESEFVYGDYKVYDVRKMIAKSEQEIGKATAKYFFYSNIMNFFKTEITLANGEIRKRPLIETNGETGEIVWDKGRDFATVRKVLSMPQVNIVKKTEVQTGGFSKESILPKRNSDKLIARKKDWDPKKYGGFDSPTVAYSVLVVAKVEKGKSKKLKSVKELLGITIMERSSFEKNPIDFLEAKGYKEVKKDLIIKLPKYSLFELENGRKRMLASAGELQKGNELALPSKYVNFLYLASHYEKLKGSPEDNEQKQLFVEQHKHYLDEIIEQISEFSKRVILADANLDKVLSAYNKHRDKPIREQAENIIHLFTLTNLGAPAAFKYFDTTIDRKRYTSTKEVLDATLIHQSITGLYETRIDLSQLGGDGGGSSGGSGGGGGTLNLEDEYRLYETSAEPEVSPGSTWLSDFPQAWAETGGMGLAVRQAPLIIPLKATSTPVSIKQYPMSQEAKLGIKPHIQRLLDQGILVPCQSPWNTPLLPVKKPGTNDYRPVQDLREVNKRVEDIHPTVPNPYNLLSGLPPSHRWYTVLDLKDAFFCLRLHPTSQPLFAFEWRDPGMGISGQLTWTRLPQGFKNSPTLFNEALHRDLADFRIQHPDLILLQYVDDILLAATSELDCQQGTRALLLTLGNLGYRASAKKAQLCQKQVKYLGYLLKEGQRWLTEARKETVMGQPTPKTPRQLREFLGTAGFCRLWIPGFAEMAAPLYPLTKPGTLFNWGPDQQKAYQEIKQALLTAPALGLPDLTKPFELFVDEKQGYAKGVLTQKLGPWRRPVAYLSKKLDPVAAGWPPCLRMVAAIAVLRKDAGKLTMGQPLVILAPHAVEALVKQPPDRWLSNARMTHYQAMLLDTDRVQFGPVVALNPATLLPLPEEGAPHDCLEILAETHGTRPDLTDQPIPDADHTWYTDGSSFLQEGQRKAGAAVTTETEVIWARALPAGTSAQRAELIALTQALKMAEGKRLNVYTDSRYAFATAHIHGEIYRRRGWLTSEGREIKNKSEILALLKALFLPKRLSIIHCLGHQKGDSAEARGNRLADQAAREAAIKTPPDTSTLLAGKRTADGSEFEKRTADGSEFESPKKKAKVE

SEQ ID NO: 6864 - protein, 2094 aa, synthetic construct
MPAAKRVKLDGGDKKYSIGLDIGTNSVGWAVITDEYKVPSKKFKVLGNTDRHSIKKNLIGALLFDSGETAEATRLKRTARRRYTRRKNRICYLQEIFSNEMAKVDDSFFHRLEESFLVEEDKKHERHPIFGNIVDEVAYHEKYPTIYHLRKKLVDSTDKADLRLIYLALAHMIKFRGHFLIEGDLNPDNSDVDKLFIQLVQTYNQLFEENPINASGVDAKAILSARLSKSRRLENLIAQLPGEKKNGLFGNLIALSLGLTPNFKSNFDLAEDAKLQLSKDTYDDDLDNLLAQIGDQYADLFLAAKNLSDAILLSDILRVNTEITKAPLSASMIKRYDEHHQDLTLLKALVRQQLPEKYKEIFFDQSKNGYAGYIDGGASQEEFYKFIKPILEKMDGTEELLVKLNREDLLRKQRTFDNGSIPHQIHLGELHAILRRQEDFYPFLKDNREKIEKILTFRIPYYVGPLARGNSRFAWMTRKSEETITPWNFEEVVDKGASAQSFIERMTNFDKNLPNEKVLPKHSLLYEYFTVYNELTKVKYVTEGMRKPAFLSGEQKKAIVDLLFKTNRKVTVKQLKEDYFKKIECFDSVEISGVEDRFNASLGTYHDLLKIIKDKDFLDNEENEDILEDIVLTLTLFEDREMIEERLKTYAHLFDDKVMKQLKRRRYTGWGRLSRKLINGIRDKQSGKTILDFLKSDGFANRNFMQLIHDDSLTFKEDIQKAQVSGQGDSLHEHIANLAGSPAIKKGILQTVKVVDELVKVMGRHKPENIVIEMARENQTTQKGQKNSRERMKRIEEGIKELGSQILKEHPVENTQLQNEKLYLYYLQNGRDMYVDQELDINRLSDYDVDHIVPQSFLKDDSIDNKVLTRSDKARGKSDNVPSEEVVKKMKNYWRQLLNAKLITQRKFDNLTKAERGGLSELDKAGFIKRQLVETRQITKHVAQILDSRMNTKYDENDKLIREVKVITLKSKLVSDFRKDFQFYKVREINNYHHAHDAYLNAVVGTALIKKYPKLESEFVYGDYKVYDVRKMIAKSEQEIGKATAKYFFYSNIMNFFKTEITLANGEIRKRPLIETNGETGEIVWDKGRDFATVRKVLSMPQVNIVKKTEVQTGGFSKESILPKRNSDKLIARKKDWDPKKYGGFDSPTVAYSVLVVAKVEKGKSKKLKSVKELLGITIMERSSFEKNPIDFLEAKGYKEVKKDLIIKLPKYSLFELENGRKRMLASAGELQKGNELALPSKYVNFLYLASHYEKLKGSPEDNEQKQLFVEQHKHYLDEIIEQISEFSKRVILADANLDKVLSAYNKHRDKPIREQAENIIHLFTLTNLGAPAAFKYFDTTIDRKRYTSTKEVLDATLIHQSITGLYETRIDLSQLGGDGGGSSGGSGGGGGTLNIEDEHRLHETSKEPDVSLGSTWLSDFPQAWAETGGMGLAVRQAPLIIPLKATSTPVSIKQYPMSQEARLGIKPHIQRLLDQGILVPCQSPWNTPLLPVKKPGTNDYRPVQDLREVNKRVEDIHPTVPNPYNLLSGLPPSHQWYTVLDLKDAFFCLRLHPTSQPLFAFEWRDPEMGISGQLTWTRLPQGFKNSPTLFNEALHRDLADFRIQHPDLILLQYVDDLLLAATSELDCQQGTRALLQTLGNLGYRASAKKAQICQKQVKYLGYLLKEGQRWLTEARKETVMGQPTPKTPRQLREFLGTAGFCRLWIPGFAEMAAPLYPLTKPGTLFNWGPDQQKAYQEIKQALLTAPALGLPDLTKPFELFVDEKQGYAKGVLTQKLGPWRRPVAYLSKKLDPVAAGWPPCLRMVAAIAVLTKDAGKLTMGQPLVILAPHAVEALVKQPPDRWLSNARMTHYQALLLDTDRVQFGPVVALNPATLLPLPEEGLQHNCLDILAEAHGTRPDLTDQPLPDADHTWYTDGSSLLQEGQRKAGAAVTTETEVIWAKALPAGTSAQRAELIALTQALKMAEGKKLNVYTDSRYAFATAHIHGEIYRRRGWLTSEGKEIKNKDEILALLKALFLPKRLSIIHCPGHQKGHSAEARGNRMADQAARKAAITETPDTSTLLAGKRTADGSEFEKRTADGSEFESPKKKAKVE

SEQ ID NO: 6865 - protein, 2094 aa, synthetic construct
MPAAKRVKLDGGDKKYSIGLDIGTNSVGWAVITDEYKVPSKKFKVLGNTDRHSIKKNLIGALLFDSGETAEATRLKRTARRRYTRRKNRICYLQEIFSNEMAKVDDSFFHRLEESFLVEEDKKHERHPIFGNIVDEVAYHEKYPTIYHLRKKLVDSTDKADLRLIYLALAHMIKFRGHFLIEGDLNPDNSDVDKLFIQLVQTYNQLFEENPINASGVDAKAILSARLSKSRRLENLIAQLPGEKKNGLFGNLIALSLGLTPNFKSNFDLAEDAKLQLSKDTYDDDLDNLLAQIGDQYADLFLAAKNLSDAILLSDILRVNTEITKAPLSASMIKRYDEHHQDLTLLKALVRQQLPEKYKEIFFDQSKNGYAGYIDGGASQEEFYKFIKPILEKMDGTEELLVKLNREDLLRKQRTFDNGSIPHQIHLGELHAILRRQEDFYPFLKDNREKIEKILTFRIPYYVGPLARGNSRFAWMTRKSEETITPWNFEEVVDKGASAQSFIERMTNFDKNLPNEKVLPKHSLLYEYFTVYNELTKVKYVTEGMRKPAFLSGEQKKAIVDLLFKTNRKVTVKQLKEDYFKKIECFDSVEISGVEDRFNASLGTYHDLLKIIKDKDFLDNEENEDILEDIVLTLTLFEDREMIEERLKTYAHLFDDKVMKQLKRRRYTGWGRLSRKLINGIRDKQSGKTILDFLKSDGFANRNFMQLIHDDSLTFKEDIQKAQVSGQGDSLHEHIANLAGSPAIKKGILQTVKVVDELVKVMGRHKPENIVIEMARENQTTQKGQKNSRERMKRIEEGIKELGSQILKEHPVENTQLQNEKLYLYYLQNGRDMYVDQELDINRLSDYDVDHIVPQSFLKDDSIDNKVLTRSDKARGKSDNVPSEEVVKKMKNYWRQLLNAKLITQRKFDNLTKAERGGLSELDKAGFIKRQLVETRQITKHVAQILDSRMNTKYDENDKLIREVKVITLKSKLVSDFRKDFQFYKVREINNYHHAHDAYLNAVVGTALIKKYPKLESEFVYGDYKVYDVRKMIAKSEQEIGKATAKYFFYSNIMNFFKTEITLANGEIRKRPLIETNGETGEIVWDKGRDFATVRKVLSMPQVNIVKKTEVQTGGFSKESILPKRNSDKLIARKKDWDPKKYGGFDSPTVAYSVLVVAKVEKGKSKKLKSVKELLGITIMERSSFEKNPIDFLEAKGYKEVKKDLIIKLPKYSLFELENGRKRMLASAGELQKGNELALPSKYVNFLYLASHYEKLKGSPEDNEQKQLFVEQHKHYLDEIIEQISEFSKRVILADANLDKVLSAYNKHRDKPIREQAENIIHLFTLTNLGAPAAFKYFDTTIDRKRYTSTKEVLDATLIHQSITGLYETRIDLSQLGGDGGGSSGGSGGGGGTLNIEDEHRLHETSKEPDVSLGSTWLSDFPQAWAETGGMGLAVRQAPLIIPLKATSTPVSIKQYPMSQEARLGIKPHIQRLLDQGILVPCQSPWNTPLLPVKKPGTNDYRPVQDLREVNKRVEDIHPTVPNPYNLLSGLPPSHQWYTVLDLKDAFFCLRLHPTSQPLFAFEWRDPEMGISGQLTWTRLPQGFKNSPTLFDEALHRDLADFRIQHPDLILLQYVDDLLLAATSELDCQQGTRALLQTLGNLGYRASAKKAQICQKQVKYLGYLLKEGQRWLTEARKETVMGQPTPKTPRQLREFLGTAGFCRLWIPGFAEMAAPLYPLTKTGTLFNWGPDQQKAYQEIKQALLTAPALGLPDLTKPFELFVDEKQGYAKGVLTQKLGPWRRPVAYLSKKLDPVAAGWPPCLRMVAAIAVLTKDAGKLTMGQPLVILAPHAVEALVKQPPDRWLSNARMTHYQALLLDTDRVQFGPVVALNPATLLPLPEEGLQHNCLDILAEAHGTRPDLTDQPLPDADHTWYTDGSSLLQEGQRKAGAAVTTETEVIWAKALPAGTSAQRAELIALTQALKMAEGKKLNVYTDSRYAFATAHIHGEIYRRRGLLTSEGKEIKNKDEILALLKALFLPKRLSIIHCPGHQKGHSAEARGNRMADQAARKAAITETPDTSTLLAGKRTADGSEFEKRTADGSEFESPKKKAKVE

SEQ ID NO: 6866 - protein, 2094 aa, synthetic construct; identical to SEQ ID NO: 6864

SEQ ID NO: 6867 - protein, 2088 aa, synthetic construct
MPAAKRVKLDGGDKKYSIGLDIGTNSVGWAVITDEYKVPSKKFKVLGNTDRHSIKKNLIGALLFDSGETAEATRLKRTARRRYTRRKNRICYLQEIFSNEMAKVDDSFFHRLEESFLVEEDKKHERHPIFGNIVDEVAYHEKYPTIYHLRKKLVDSTDKADLRLIYLALAHMIKFRGHFLIEGDLNPDNSDVDKLFIQLVQTYNQLFEENPINASGVDAKAILSARLSKSRRLENLIAQLPGEKKNGLFGNLIALSLGLTPNFKSNFDLAEDAKLQLSKDTYDDDLDNLLAQIGDQYADLFLAAKNLSDAILLSDILRVNTEITKAPLSASMIKRYDEHHQDLTLLKALVRQQLPEKYKEIFFDQSKNGYAGYIDGGASQEEFYKFIKPILEKMDGTEELLVKLNREDLLRKQRTFDNGSIPHQIHLGELHAILRRQEDFYPFLKDNREKIEKILTFRIPYYVGPLARGNSRFAWMTRKSEETITPWNFEEVVDKGASAQSFIERMTNFDKNLPNEKVLPKHSLLYEYFTVYNELTKVKYVTEGMRKPAFLSGEQKKAIVDLLFKTNRKVTVKQLKEDYFKKIECFDSVEISGVEDRFNASLGTYHDLLKIIKDKDFLDNEENEDILEDIVLTLTLFEDREMIEERLKTYAHLFDDKVMKQLKRRRYTGWGRLSRKLINGIRDKQSGKTILDFLKSDGFANRNFMQLIHDDSLTFKEDIQKAQVSGQGDSLHEHIANLAGSPAIKKGILQTVKVVDELVKVMGRHKPENIVIEMARENQTTQKGQKNSRERMKRIEEGIKELGSQILKEHPVENTQLQNEKLYLYYLQNGRDMYVDQELDINRLSDYDVDHIVPQSFLKDDSIDNKVLTRSDKARGKSDNVPSEEVVKKMKNYWRQLLNAKLITQRKFDNLTKAERGGLSELDKAGFIKRQLVETRQITKHVAQILDSRMNTKYDENDKLIREVKVITLKSKLVSDFRKDFQFYKVREINNYHHAHDAYLNAVVGTALIKKYPKLESEFVYGDYKVYDVRKMIAKSEQEIGKATAKYFFYSNIMNFFKTEITLANGEIRKRPLIETNGETGEIVWDKGRDFATVRKVLSMPQVNIVKKTEVQTGGFSKESILPKRNSDKLIARKKDWDPKKYGGFDSPTVAYSVLVVAKVEKGKSKKLKSVKELLGITIMERSSFEKNPIDFLEAKGYKEVKKDLIIKLPKYSLFELENGRKRMLASAGELQKGNELALPSKYVNFLYLASHYEKLKGSPEDNEQKQLFVEQHKHYLDEIIEQISEFSKRVILADANLDKVLSAYNKHRDKPIREQAENIIHLFTLTNLGAPAAFKYFDTTIDRKRYTSTKEVLDATLIHQSITGLYETRIDLSQLGGDGGGSSGGSGGGGGTLQLDDEYRLYSPLVKPDQNIQFWLEQFPQAWAETAGMGLAKQVPPQVIQLKASATPVSVRQYPLSKEAQEGIRPHVQRLIQQGILVPVQSPWNTPLLPVRKPGTNDYRPVQDLREVNKRVQDIHPTVPNPYNLLCALPPQRSWYTVLDLKDAFFCLRLHPTSQPLFAFEWRDPGTGRTGQLTWTRLPQGFKNSPTIFDEALHRDLANFRIQHPQVTLLQYVDDLLLAGATKQDCLEGTKALLLELSDLGYRASAKKAQICRREVTYLGYSLRDGQRWLTEARKKTVVQIPAPTTAKQVREFLGTAGFCRLWIPGFATLAAPLYPLTKEKGEFSWAPEHQKAFDAIKKALLSAPALALPDVTKPFTLYVDERKGVARGVLTQTLGPWRRPVAYLSKKLDPVASGWPVCLKAIAAVAILVKDADKLTLGQNITVIAPHALENIVRQPPDRWMTNARMTHYQSLLLTERVTFAPPAALNPATLLPEETDEPVTHDCHQLLIEETGVRKDLTDIPLTGEVLTWFTDGSSYVVEGKRMAGAAVVDGTRTIWASSLPEGTSAQKAELMALTQALRLAEGKSINIYTDSRYAFATAHVHGAIYKQRGLLTSAGREIKNKEEILSLLEALHLPKRLAIIHCPGHQKAKDPISRGNQMADRVAKQAAQGVNLLAGKRTADGSEFEKRTADGSEFESPKKKAKVE

SEQ ID NO: 6868 - protein, 2088 aa, synthetic construct; identical to SEQ ID NO: 6867

SEQ ID NO: 6869 - protein, 2092 aa, synthetic construct
MPAAKRVKLDGGDKKYSIGLDIGTNSVGWAVITDEYKVPSKKFKVLGNTDRHSIKKNLIGALLFDSGETAEATRLKRTARRRYTRRKNRICYLQEIFSNEMAKVDDSFFHRLEESFLVEEDKKHERHPIFGNIVDEVAYHEKYPTIYHLRKKLVDSTDKADLRLIYLALAHMIKFRGHFLIEGDLNPDNSDVDKLFIQLVQTYNQLFEENPINASGVDAKAILSARLSKSRRLENLIAQLPGEKKNGLFGNLIALSLGLTPNFKSNFDLAEDAKLQLSKDTYDDDLDNLLAQIGDQYADLFLAAKNLSDAILLSDILRVNTEITKAPLSASMIKRYDEHHQDLTLLKALVRQQLPEKYKEIFFDQSKNGYAGYIDGGASQEEFYKFIKPILEKMDGTEELLVKLNREDLLRKQRTFDNGSIPHQIHLGELHAILRRQEDFYPFLKDNREKIEKILTFRIPYYVGPLARGNSRFAWMTRKSEETITPWNFEEVVDKGASAQSFIERMTNFDKNLPNEKVLPKHSLLYEYFTVYNELTKVKYVTEGMRKPAFLSGEQKKAIVDLLFKTNRKVTVKQLKEDYFKKIECFDSVEISGVEDRFNASLGTYHDLLKIIKDKDFLDNEENEDILEDIVLTLTLFEDREMIEERLKTYAHLFDDKVMKQLKRRRYTGWGRLSRKLINGIRDKQSGKTILDFLKSDGFANRNFMQLIHDDSLTFKEDIQKAQVSGQGDSLHEHIANLAGSPAIKKGILQTVKVVDELVKVMGRHKPENIVIEMARENQTTQKGQKNSRERMKRIEEGIKELGSQILKEHPVENTQLQNEKLYLYYLQNGRDMYVDQELDINRLSDYDVDHIVPQSFLKDDSIDNKVLTRSDKARGKSDNVPSEEVVKKMKNYWRQLLNAKLITQRKFDNLTKAERGGLSELDKAGFIKRQLVETRQITKHVAQILDSRMNTKYDENDKLIREVKVITLKSKLVSDFRKDFQFYKVREINNYHHAHDAYLNAVVGTALIKKYPKLESEFVYGDYKVYDVRKMIAKSEQEIGKATAKYFFYSNIMNFFKTEITLANGEIRKRPLIETNGETGEIVWDKGRDFATVRKVLSMPQVNIVKKTEVQTGGFSKESILPKRNSDKLIARKKDWDPKKYGGFDSPTVAYSVLVVAKVEKGKSKKLKSVKELLGITIMERSSFEKNPIDFLEAKGYKEVKKDLIIKLPKYSLFELENGRKRMLASAGELQKGNELALPSKYVNFLYLASHYEKLKGSPEDNEQKQLFVEQHKHYLDEIIEQISEFSKRVILADANLDKVLSAYNKHRDKPIREQAENIIHLFTLTNLGAPAAFKYFDTTIDRKRYTSTKEVLDATLIHQSITGLYETRIDLSQLGGDGGGSSGGSGGGGGVLNLEEEYRLHEKPVPSSIDPSWLQLFPTVWAERAGMGLANQVPPVVVELRSGASPVAVRQYPMSKEAREGIRPHIQRFLDLGVLVPCQSPWNTPLLPVKKPGTNDYRPVQDLREINKRVQDIHPTVPNPYNLLSSLPPSHTWYSVLDLKDAFFCLKLHPNSQPLFAFEWRDPEKGNTGQLTWTRLPQGFKNSPTLFNEALHRDLAPFRALNPQVVLLQYVDDLLVAAPTYRDCKEGTQKLLQELSKLGYRVSAKKAQLCQKEVTYLGYLLKEGKRWLTPARKATVMKIPPPTTPRQVREFLGTAGFCRLWIPGFASLAAPLYPLTKPSIPFIWTEEHQKAFDRIKEALLSAPALALPDLTKPFTLYVDERAGVARGVLTQTLGPWRRPVAYLSKKLDPVASGWPTCLKAVAAVALLLKDADKLTLGQNVTVIASHSLESIVRQPPDRWMTNARMTHYQSLLLNERVSFAPPAVLNPATLLPVESEATPVHRCSEILAEETGTRRDLKDQPLPGVPAWYTDGSSFIAEGKRRAGAAIVDGKRTVWASSLPEGTSAQKAELVALTQALRLAEGKDINIYTDSRYAFATAHIHGAIYKQRGWLTSAGKDIKNKEEILALLEAIHLPKRVAIIHCPGHQKGNDPVATGNRRADEAAKQAALSTRVLAETTKPAGKRTADGSEFEKRTADGSEFESPKKKAKVE

SEQ ID NO: 6870 - protein, 2092 aa, synthetic construct
MPAAKRVKLDGGDKKYSIGLDIGTNSVGWAVITDEYKVPSKKFKVLGNTDRHSIKKNLIGALLFDSGETAEATRLKRTARRRYTRRKNRICYLQEIFSNEMAKVDDSFFHRLEESFLVEEDKKHERHPIFGNIVDEVAYHEKYPTIYHLRKKLVDSTDKADLRLIYLALAHMIKFRGHFLIEGDLNPDNSDVDKLFIQLVQTYNQLFEENPINASGVDAKAILSARLSKSRRLENLIAQLPGEKKNGLFGNLIALSLGLTPNFKSNFDLAEDAKLQLSKDTYDDDLDNLLAQIGDQYADLFLAAKNLSDAILLSDILRVNTEITKAPLSASMIKRYDEHHQDLTLLKALVRQQLPEKYKEIFFDQSKNGYAGYIDGGASQEEFYKFIKPILEKMDGTEELLVKLNREDLLRKQRTFDNGSIPHQIHLGELHAILRRQEDFYPFLKDNREKIEKILTFRIPYYVGPLARGNSRFAWMTRKSEETITPWNFEEVVDKGASAQSFIERMTNFDKNLPNEKVLPKHSLLYEYFTVYNELTKVKYVTEGMRKPAFLSGEQKKAIVDLLFKTNRKVTVKQLKEDYFKKIECFDSVEISGVEDRFNASLGTYHDLLKIIKDKDFLDNEENEDILEDIVLTLTLFEDREMIEERLKTYAHLFDDKVMKQLKRRRYTGWGRLSRKLINGIRDKQSGKTILDFLKSDGFANRNFMQLIHDDSLTFKEDIQKAQVSGQGDSLHEHIANLAGSPAIKKGILQTVKVVDELVKVMGRHKPENIVIEMARENQTTQKGQKNSRERMKRIEEGIKELGSQILKEHPVENTQLQNEKLYLYYLQNGRDMYVDQELDINRLSDYDVDHIVPQSFLKDDSIDNKVLTRSDKARGKSDNVPSEEVVKKMKNYWRQLLNAKLITQRKFDNLTKAERGGLSELDKAGFIKRQLVETRQITKHVAQILDSRMNTKYDENDKLIREVKVITLKSKLVSDFRKDFQFYKVREINNYHHAHDAYLNAVVGTALIKKYPKLESEFVYGDYKVYDVRKMIAKSEQEIGKATAKYFFYSNIMNFFKTEITLANGEIRKRPLIETNGETGEIVWDKGRDFATVRKVLSMPQVNIVKKTEVQTGGFSKESILPKRNSDKLIARKKDWDPKKYGGFDSPTVAYSVLVVAKVEKGKSKKLKSVKELLGITIMERSSFEKNPIDFLEAKGYKEVKKDLIIKLPKYSLFELENGRKRMLASAGELQKGNELALPSKYVNFLYLASHYEKLKGSPEDNEQKQLFVEQHKHYLDEIIEQISEFSKRVILADANLDKVLSAYNKHRDKPIREQAENIIHLFTLTNLGAPAAFKYFDTTIDRKRYTSTKEVLDATLIHQSITGLYETRIDLSQLGGDGGGSSGGSGGGGGVLNLEEEYRLHEKPVPSSIDPSWLQLFPTVWAERAGMGLANQVPPVVVELRSGASPVAVRQYPMSKEAREGIRPHIQRFLDLGVLVPCQSPWNTPLLPVKKPGTNDYRPVQDLREINKRVQDIHPTVPNPYNLLSSLPPSHTWYSVLDLKDAFFCLKLHPNSQPLFAFEWRDPEKGNTGQLTWTRLPQGFKNSPTLFNEALHRDLAPFRALNPQVVLLQYVDDLLVAAPTYRDCKEGTQKLLQELSKLGYRVSAKKAQLCQKEVTYLGYLLKEGKRWLTPARKATVMKIPPPTTPRQVREFLGKAGFCRLFIPGFASLAAPLYPLTKPSIPFIWTEEHQKAFDRIKEALLSAPALALPDLTKPFTLYVDERAGVARGVLTQTLGPWRRPVAYLSKKLDPVASGWPTCLKAVAAVALLLKDADKLTLGQNVTVIASHSLESIVRQPPDRWMTNARMTHYQSLLLNERVSFAPPAVLNPATLLPVESEATPVHRCSEILAEETGTRRDLKDQPLPGVPAWYTDGSSFIAEGKRRAGAAIVDGKRTVWASSLPEGTSAQKAELVALTQALRLAEGKDINIYTDSRYAFATAHIHGAIYKQRGWLTSAGKDIKNKEEILALLEAIHLPKRVAIIHCPGHQKGNDPVATGNRRADEAAKQAALSTRVLAETTKPAGKRTADGSEFEKRTADGSEFESPKKKAKVE

SEQ ID NO: 6871 - protein, 2096 aa, synthetic construct
MPAAKRVKLDGGDKKYSIGLDIGTNSVGWAVITDEYKVPSKKFKVLGNTDRHSIKKNLIGALLFDSGETAEATRLKRTARRRYTRRKNRICYLQEIFSNEMAKVDDSFFHRLEESFLVEEDKKHERHPIFGNIVDEVAYHEKYPTIYHLRKKLVDSTDKADLRLIYLALAHMIKFRGHFLIEGDLNPDNSDVDKLFIQLVQTYNQLFEENPINASGVDAKAILSARLSKSRRLENLIAQLPGEKKNGLFGNLIALSLGLTPNFKSNFDLAEDAKLQLSKDTYDDDLDNLLAQIGDQYADLFLAAKNLSDAILLSDILRVNTEITKAPLSASMIKRYDEHHQDLTLLKALVRQQLPEKYKEIFFDQSKNGYAGYIDGGASQEEFYKFIKPILEKMDGTEELLVKLNREDLLRKQRTFDNGSIPHQIHLGELHAILRRQEDFYPFLKDNREKIEKILTFRIPYYVGPLARGNSRFAWMTRKSEETITPWNFEEVVDKGASAQSFIERMTNFDKNLPNEKVLPKHSLLYEYFTVYNELTKVKYVTEGMRKPAFLSGEQKKAIVDLLFKTNRKVTVKQLKEDYFKKIECFDSVEISGVEDRFNASLGTYHDLLKIIKDKDFLDNEENEDILEDIVLTLTLFEDREMIEERLKTYAHLFDDKVMKQLKRRRYTGWGRLSRKLINGIRDKQSGKTILDFLKSDGFANRNFMQLIHDDSLTFKEDIQKAQVSGQGDSLHEHIANLAGSPAIKKGILQTVKVVDELVKVMGRHKPENIVIEMARENQTTQKGQKNSRERMKRIEEGIKELGSQILKEHPVENTQLQNEKLYLYYLQNGRDMYVDQELDINRLSDYDVDHIVPQSFLKDDSIDNKVLTRSDKARGKSDNVPSEEVVKKMKNYWRQLLNAKLITQRKFDNLTKAERGGLSELDKAGFIKRQLVETRQITKHVAQILDSRMNTKYDENDKLIREVKVITLKSKLVSDFRKDFQFYKVREINNYHHAHDAYLNAVVGTALIKKYPKLESEFVYGDYKVYDVRKMIAKSEQEIGKATAKYFFYSNIMNFFKTEITLANGEIRKRPLIETNGETGEIVWDKGRDFATVRKVLSMPQVNIVKKTEVQTGGFSKESILPKRNSDKLIARKKDWDPKKYGGFDSPTVAYSVLVVAKVEKGKSKKLKSVKELLGITIMERSSFEKNPIDFLEAKGYKEVKKDLIIKLPKYSLFELENGRKRMLASAGELQKGNELALPSKYVNFLYLASHYEKLKGSPEDNEQKQLFVEQHKHYLDEIIEQISEFSKRVILADANLDKVLSAYNKHRDKPIREQAENIIHLFTLTNLGAPAAFKYFDTTIDRKRYTSTKEVLDATLIHQSITGLYETRIDLSQLGGDGGGSSGGGGGSGGTAPLEEEYRLFLEAPIQNVTLLEQWKREIPKVWAEINPPGLASTQAPIHVQLLSTALPVRVRQYPITLEAKRSLRETIRKFRAAGILRPVHSPWNTPLLPVRKSGTSEYRMVQDLREVNKRVETIHPTVPNPYTLLSLLPPDRIWYSVLDLKDAFFCIPLAPESQLIFAFEWADAEEGESGQLTWTRLPQGFKNSPTLFNEALNRDLQGFRLDHPSVSLLQYVDDLLIAADTQAACLSATRDLLMTLAELGYRVSGKKAQLCQEEVTYLGFKIHKGSRSLSNSRTQAILQIPVPKTKRQVREFLGTIGYCRLWIPGFAELAQPLYAATRPGNDPLVWGEKEEEAFQSLKLALTQPPALALPSLDKPFQLFVEETSGAAKGVLTQALGPWKRPVAYLSKRLDPVAAGWPRCLRAIAAAALLTREASKLTFGQDIEITSSHNLESLLRSPPDKWLTNARITQYQVLLLDPPRVRFKQTAALNPATLLPETDDTLPIHHCLDTLDSLTSTRPDLTDQPLAQAEATLFTDGSSYIRDGKRYAGAAVVTLDSVIWAEPLPIGTSAQKAELIALTKALEWSKDKSVNIYTDSRYAFATLHVHGMIYRERGWLTAGGKAIKNAPEILALLTAVWLPKRVAVMHCKGHQKDDAPTSTGNRRADEVAREVAIRPLSTQATISAGKRTADGSEFEKRTADGSEFESPKKKAKVE

SEQ ID NO: 6872 - protein, 2100 aa, synthetic construct
MPAAKRVKLDGGDKKYSIGLDIGTNSVGWAVITDEYKVPSKKFKVLGNTDRHSIKKNLIGALLFDSGETAEATRLKRTARRRYTRRKNRICYLQEIFSNEMAKVDDSFFHRLEESFLVEEDKKHERHPIFGNIVDEVAYHEKYPTIYHLRKKLVDSTDKADLRLIYLALAHMIKFRGHFLIEGDLNPDNSDVDKLFIQLVQTYNQLFEENPINASGVDAKAILSARLSKSRRLENLIAQLPGEKKNGLFGNLIALSLGLTPNFKSNFDLAEDAKLQLSKDTYDDDLDNLLAQIGDQYADLFLAAKNLSDAILLSDILRVNTEITKAPLSASMIKRYDEHHQDLTLLKALVRQQLPEKYKEIFFDQSKNGYAGYIDGGASQEEFYKFIKPILEKMDGTEELLVKLNREDLLRKQRTFDNGSIPHQIHLGELHAILRRQEDFYPFLKDNREKIEKILTFRIPYYVGPLARGNSRFAWMTRKSEETITPWNFEEVVDKGASAQSFIERMTNFDKNLPNEKVLPKHSLLYEYFTVYNELTKVKYVTEGMRKPAFLSGEQKKAIVDLLFKTNRKVTVKQLKEDYFKKIECFDSVEISGVEDRFNASLGTYHDLLKIIKDKDFLDNEENEDILEDIVLTLTLFEDREMIEERLKTYAHLFDDKVMKQLKRRRYTGWGRLSRKLINGIRDKQSGKTILDFLKSDGFANRNFMQLIHDDSLTFKEDIQKAQVSGQGDSLHEHIANLAGSPAIKKGILQTVKVVDELVKVMGRHKPENIVIEMARENQTTQKGQKNSRERMKRIEEGIKELGSQILKEHPVENTQLQNEKLYLYYLQNGRDMYVDQELDINRLSDYDVDHIVPQSFLKDDSIDNKVLTRSDKARGKSDNVPSEEVVKKMKNYWRQLLNAKLITQRKFDNLTKAERGGLSELDKAGFIKRQLVETRQITKHVAQILDSRMNTKYDENDKLIREVKVITLKSKLVSDFRKDFQFYKVREINNYHHAHDAYLNAVVGTALIKKYPKLESEFVYGDYKVYDVRKMIAKSEQEIGKATAKYFFYSNIMNFFKTEITLANGEIRKRPLIETNGETGEIVWDKGRDFATVRKVLSMPQVNIVKKTEVQTGGFSKESILPKRNSDKLIARKKDWDPKKYGGFDSPTVAYSVLVVAKVEKGKSKKLKSVKELLGITIMERSSFEKNPIDFLEAKGYKEVKKDLIIKLPKYSLFELENGRKRMLASAGELQKGNELALPSKYVNFLYLASHYEKLKGSPEDNEQKQLFVEQHKHYLDEIIEQISEFSKRVILADANLDKVLSAYNKHRDKPIREQAENIIHLFTLTNLGAPAAFKYFDTTIDRKRYTSTKEVLDATLIHQSITGLYETRIDLSQLGGDGGGSSGGGGGSGGTVSLQDEHRLFDIPVTTSLPDVWLQDFPQAWAETGGLGRAKCQAPIIIDLKPTAVPVSIKQYPMSLEAHMGIRQHIIKFLELGVLRPCRSPWNTPLLPVKKPGTQDYRPVQDLREINKRTVDIHPTVPNPYNLLSTLKPDYSWYTVLDLKDAFFCLPLAPQSQELFAFEWKDPERGISGQLTWTRLPQGFKNSPTLFNEALHRDLTDFRTQHPEVTLLQYVDDLLLAAPTKKACTQGTRHLLQELGEKGYRASAKKAQICQTKVTYLGYILSEGKRWLTPGRIETVARIPPPRNPREVREFLGTAGFCRLWIPGFAELAAPLYALTKPSTPFTWQTEHQLAFEALKKALLSAPALGLPDTSKPFTLFLDERQGIAKGVLTQKLGPWKRPVAYLSKKLDPVAAGWPPCLRIMAATAMLVKDSAKLTLGQPLTVITPHTLEAIVRQPPDRWITNARLTHYQALLLDTDRVQFGPPVTLNPATLLPVPENQPSPHDCRQVLAETHGTREDLKDQELPDADHTWYTDGSSYLDSGTRRAGAAVVDGHNTIWAQSLPPGTSAQKAELIALTKALELSKGKKANIYTDSRYAFATAHTHGSIYERRGWLTSEGKEIKNKAEIIALLKALFLPQEVAIIHCPGHQKGQDPVAVGNRQADRVARQAAMAEVLTLATEPDNTSHITAGKRTADGSEFEKRTADGSEFESPKKKAKVE

SEQ ID NO: 6873 - protein, 2216 aa, synthetic construct
MPAAKRVKLDGGDKKYSIGLDIGTNSVGWAVITDEYKVPSKKFKVLGNTDRHSIKKNLIGALLFDSGETAEATRLKRTARRRYTRRKNRICYLQEIFSNEMAKVDDSFFHRLEESFLVEEDKKHERHPIFGNIVDEVAYHEKYPTIYHLRKKLVDSTDKADLRLIYLALAHMIKFRGHFLIEGDLNPDNSDVDKLFIQLVQTYNQLFEENPINASGVDAKAILSARLSKSRRLENLIAQLPGEKKNGLFGNLIALSLGLTPNFKSNFDLAEDAKLQLSKDTYDDDLDNLLAQIGDQYADLFLAAKNLSDAILLSDILRVNTEITKAPLSASMIKRYDEHHQDLTLLKALVRQQLPEKYKEIFFDQSKNGYAGYIDGGASQEEFYKFIKPILEKMDGTEELLVKLNREDLLRKQRTFDNGSIPHQIHLGELHAILRRQEDFYPFLKDNREKIEKILTFRIPYYVGPLARGNSRFAWMTRKSEETITPWNFEEVVDKGASAQSFIERMTNFDKNLPNEKVLPKHSLLYEYFTVYNELTKVKYVTEGMRKPAFLSGEQKKAIVDLLFKTNRKVTVKQLKEDYFKKIECFDSVEISGVEDRFNASLGTYHDLLKIIKDKDFLDNEENEDILEDIVLTLTLFEDREMIEERLKTYAHLFDDKVMKQLKRRRYTGWGRLSRKLINGIRDKQSGKTILDFLKSDGFANRNFMQLIHDDSLTFKEDIQKAQVSGQGDSLHEHIANLAGSPAIKKGILQTVKVVDELVKVMGRHKPENIVIEMARENQTTQKGQKNSRERMKRIEEGIKELGSQILKEHPVENTQLQNEKLYLYYLQNGRDMYVDQELDINRLSDYDVDHIVPQSFLKDDSIDNKVLTRSDKARGKSDNVPSEEVVKKMKNYWRQLLNAKLITQRKFDNLTKAERGGLSELDKAGFIKRQLVETRQITKHVAQILDSRMNTKYDENDKLIREVKVITLKSKLVSDFRKDFQFYKVREINNYHHAHDAYLNAVVGTALIKKYPKLESEFVYGDYKVYDVRKMIAKSEQEIGKATAKYFFYSNIMNFFKTEITLANGEIRKRPLIETNGETGEIVWDKGRDFATVRKVLSMPQVNIVKKTEVQTGGFSKESILPKRNSDKLIARKKDWDPKKYGGFDSPTVAYSVLVVAKVEKGKSKKLKSVKELLGITIMERSSFEKNPIDFLEAKGYKEVKKDLIIKLPKYSLFELENGRKRMLASAGELQKGNELALPSKYVNFLYLASHYEKLKGSPEDNEQKQLFVEQHKHYLDEIIEQISEFSKRVILADANLDKVLSAYNKHRDKPIREQAENIIHLFTLTNLGAPAAFKYFDTTIDRKRYTSTKEVLDATLIHQSITGLYETRIDLSQLGGDGGGSSGGGGGSGGTLGDQGSRGSDPLPEPRVTLTVEGIPTEFLVNTGAEHSVLTKPMGKMGSKRTVVAGATGSKVYPWTTKRLLKIGQKQVTHSFLVIPECPAPLLGRDLLTKLKAQIQFSTEGPQVTWEDRPAMCLVLNLEEEYRLHEKPVPPSIDPSWLQLFPMVWAEKAGMGLANQVPPVVVELKSDASPVAVRQYPMSKEAREGIRPHIQRFLDLGILVPCQSPWNTPLLPVKKPGTNDYRPVQDLREVNKRVQDIHPTVPNPYNLLSSLPPSHTWYSVLDLKDAFFCLKLHPNSQPLFAFEWRDPEKGNTGQLTWTRLPQGFKNSPTLFDEALHRDLASFRALNPQVVMLQYVDDLLVAAPTYRDCKEGTRRLLQELSKLGYRVSAKKAQLCREEVTYLGYLLKGGKRWLTPARKATVMKIPTPTTPRQVREFLGTAGFCRLWIPGFASLAAPLYPLTREKVPFTWTEAHQEAFGRIKEALLSAPALALPDLTKPFALYVDEKEGVARGVLTQTLGPWRRPVAYLSKKLDPVASGWPTCLKAIAAVALLLKDADKLTLGQNVLVIAPHNLESIVRQPPDRWMTNARMTHYQSLLLNERVSFAPPAILNPATLLPVESDDTPIHICSEILAEETGTRPDLRDQPLPGVPAWYTDGSSFIMDGRRQAGAAIVDNKRTVWASNLPEGTSAQKAELIALTQALRLAEGKSINIYTDSRYAFATAHVHGAIYKQRGLLTSAGKDIKNKEEILALLEAIHLPKRVAIIHCPGHQRGTDPVATGNRKADEAAKQAAQSTRILTETTKNAGKRTADGSEFEKRTADGSEFESPKKKAKVE

SEQ ID NO: 6874 - protein, 2125 aa, synthetic construct
MPAAKRVKLDGGDKKYSIGLDIGTNSVGWAVITDEYKVPSKKFKVLGNTDRHSIKKNLIGALLFDSGETAEATRLKRTARRRYTRRKNRICYLQEIFSNEMAKVDDSFFHRLEESFLVEEDKKHERHPIFGNIVDEVAYHEKYPTIYHLRKKLVDSTDKADLRLIYLALAHMIKFRGHFLIEGDLNPDNSDVDKLFIQLVQTYNQLFEENPINASGVDAKAILSARLSKSRRLENLIAQLPGEKKNGLFGNLIALSLGLTPNFKSNFDLAEDAKLQLSKDTYDDDLDNLLAQIGDQYADLFLAAKNLSDAILLSDILRVNTEITKAPLSASMIKRYDEHHQDLTLLKALVRQQLPEKYKEIFFDQSKNGYAGYIDGGASQEEFYKFIKPILEKMDGTEELLVKLNREDLLRKQRTFDNGSIPHQIHLGELHAILRRQEDFYPFLKDNREKIEKILTFRIPYYVGPLARGNSRFAWMTRKSEETITPWNFEEVVDKGASAQSFIERMTNFDKNLPNEKVLPKHSLLYEYFTVYNELTKVKYVTEGMRKPAFLSGEQKKAIVDLLFKTNRKVTVKQLKEDYFKKIECFDSVEISGVEDRFNASLGTYHDLLKIIKDKDFLDNEENEDILEDIVLTLTLFEDREMIEERLKTYAHLFDDKVMKQLKRRRYTGWGRLSRKLINGIRDKQSGKTILDFLKSDGFANRNFMQLIHDDSLTFKEDIQKAQVSGQGDSLHEHIANLAGSPAIKKGILQTVKVVDELVKVMGRHKPENIVIEMARENQTTQKGQKNSRERMKRIEEGIKELGSQILKEHPVENTQLQNEKLYLYYLQNGRDMYVDQELDINRLSDYDVDHIVPQSFLKDDSIDNKVLTRSDKARGKSDNVPSEEVVKKMKNYWRQLLNAKLITQRKFDNLTKAERGGLSELDKAGFIKRQLVETRQITKHVAQILDSRMNTKYDENDKLIREVKVITLKSKLVSDFRKDFQFYKVREINNYHHAHDAYLNAVVGTALIKKYPKLESEFVYGDYKVYDVRKMIAKSEQEIGKATAKYFFYSNIMNFFKTEITLANGEIRKRPLIETNGETGEIVWDKGRDFATVRKVLSMPQVNIVKKTEVQTGGFSKESILPKRNSDKLIARKKDWDPKKYGGFDSPTVAYSVLVVAKVEKGKSKKLKSVKELLGITIMERSSFEKNPIDFLEAKGYKEVKKDLIIKLPKYSLFELENGRKRMLASAGELQKGNELALPSKYVNFLYLASHYEKLKGSPEDNEQKQLFVEQHKHYLDEIIEQISEFSKRVILADANLDKVLSAYNKHRDKPIREQAENIIHLFTLTNLGAPAAFKYFDTTIDRKRYTSTKEVLDATLIHQSITGLYETRIDLSQLGGDGGGSSGGGGGSGGLLGRDLLTKLKAQIQFSTEGPQVTWEDRPAMCLVLNLEEEYRLHEKPVPPSIDPSWLQLFPMVWAEKAGMGLANQVPPVVVELKSDASPVAVRQYPMSKEAREGIRPHIQRFLDLGILVPCQSPWNTPLLPVKKPGTNDYRPVQDLREVNKRVQDIHPTVPNPYNLLSSLPPSHTWYSVLDLKDAFFCLKLHPNSQPLFAFEWRDPEKGNTGQLTWTRLPQGFKNSPTLFNEALHRDLASFRALNPQVVMLQYVDDLLVAAPTYRDCKEGTRRLLQELSKLGYRVSAKKAQLCREEVTYLGYLLKGGKRWLTPARKATVMKIPTPTTPRQVREFLGTAGFCRLWIPGFASLAAPLYPLTRPKVPFTWTEAHQEAFGRIKEALLSAPALALPDLTKPFALYVDEKEGVARGVLTQTLGPWRRPVAYLSKKLDPVASGWPTCLKAIAAVALLLKDADKLTLGQNVLVIAPHNLESIVRQPPDRWMTNARMTHYQSLLLNERVSFAPPAILNPATLLPVESDDTPIHICSEILAEETGTRPDLRDQPLPGVPAWYTDGSSFIMDGRRQAGAAIVDNKRTVWASNLPEGTSAQKAELIALTQALRLAEGKSINIYTDSRYAFATAHVHGAIYKQRGWLTSAGKDIKNKEEILALLEAIHLPKRVAIIHCPGHQRGTDPVATGNRKADEAAKQAAQSTRILTETTKNAGKRTADGSEFEKRTADGSEFESPKKKAKVE

SEQ ID NO: 6875 - protein, 2094 aa, synthetic construct; identical to SEQ ID NO: 4517

SEQ ID NO: 6876 - protein, 2094 aa, synthetic construct; identical to SEQ ID NO: 4517

SEQ ID NO: 6877 - protein, 2094 aa, synthetic construct
MPAAKRVKLDGGDKKYSIGLDIGTNSVGWAVITDEYKVPSKKFKVLGNTDRHSIKKNLIGALLFDSGETAEATRLKRTARRRYTRRKNRICYLQEIFSNEMAKVDDSFFHRLEESFLVEEDKKHERHPIFGNIVDEVAYHEKYPTIYHLRKKLVDSTDKADLRLIYLALAHMIKFRGHFLIEGDLNPDNSDVDKLFIQLVQTYNQLFEENPINASGVDAKAILSARLSKSRRLENLIAQLPGEKKNGLFGNLIALSLGLTPNFKSNFDLAEDAKLQLSKDTYDDDLDNLLAQIGDQYADLFLAAKNLSDAILLSDILRVNTEITKAPLSASMIKRYDEHHQDLTLLKALVRQQLPEKYKEIFFDQSKNGYAGYIDGGASQEEFYKFIKPILEKMDGTEELLVKLNREDLLRKQRTFDNGSIPHQIHLGELHAILRRQEDFYPFLKDNREKIEKILTFRIPYYVGPLARGNSRFAWMTRKSEETITPWNFEEVVDKGASAQSFIERMTNFDKNLPNEKVLPKHSLLYEYFTVYNELTKVKYVTEGMRKPAFLSGEQKKAIVDLLFKTNRKVTVKQLKEDYFKKIECFDSVEISGVEDRFNASLGTYHDLLKIIKDKDFLDNEENEDILEDIVLTLTLFEDREMIEERLKTYAHLFDDKVMKQLKRRRYTGWGRLSRKLINGIRDKQSGKTILDFLKSDGFANRNFMQLIHDDSLTFKEDIQKAQVSGQGDSLHEHIANLAGSPAIKKGILQTVKVVDELVKVMGRHKPENIVIEMARENQTTQKGQKNSRERMKRIEEGIKELGSQILKEHPVENTQLQNEKLYLYYLQNGRDMYVDQELDINRLSDYDVDHIVPQSFLKDDSIDNKVLTRSDKARGKSDNVPSEEVVKKMKNYWRQLLNAKLITQRKFDNLTKAERGGLSELDKAGFIKRQLVETRQITKHVAQILDSRMNTKYDENDKLIREVKVITLKSKLVSDFRKDFQFYKVREINNYHHAHDAYLNAVVGTALIKKYPKLESEFVYGDYKVYDVRKMIAKSEQEIGKATAKYFFYSNIMNFFKTEITLANGEIRKRPLIETNGETGEIVWDKGRDFATVRKVLSMPQVNIVKKTEVQTGGFSKESILPKRNSDKLIARKKDWDPKKYGGFDSPTVAYSVLVVAKVEKGKSKKLKSVKELLGITIMERSSFEKNPIDFLEAKGYKEVKKDLIIKLPKYSLFELENGRKRMLASAGELQKGNELALPSKYVNFLYLASHYEKLKGSPEDNEQKQLFVEQHKHYLDEIIEQISEFSKRVILADANLDKVLSAYNKHRDKPIREQAENIIHLFTLTNLGAPAAFKYFDTTIDRKRYTSTKEVLDATLIHQSITGLYETRIDLSQLGGDGGGSSGGGGGSGGTLGIEDEYRLHETSTEPDVSLGSTWLSDFPQAWAETGGMGLAVRQAPLIIPLKATSTPVSIQQYPMSHEARLGIKPHIQRLLDQGILVPCQSPWNTPLLPVKKPGTNDYRPVQDLREVNKRVEDIHPTVPNPYNLLSGLPPSHQWYTVLDLKDAFFCLRLHPTSQPLFAFEWRDPGMGISGQLTWTRLPQGFKNSPTLFNEALHRDLADFRIQHPDLILLQYVDDILLAATSELDCQQGTRALLQTLGDLGYRASAKKAQICQKQVKYLGYLLREGQRWLTEARKETVMGQPVPKTPRQLREFLGTAGFCRLWIPGFAEMAAPLYPLTKPGTLFSWGPDQQKAYQEIKQALLTAPALGLPDLTKPFELFVDEKQGYAKGVLTQKLGPWRRPVAYLSKKLDPVAAGWPPCLRMVAAIAVLTKDAGKLTMGQPLVILAPHAVEALVKQPPDRWLSNARMTHYQAMLLDTDRVQFGPVVALNPATLLPLPEEGAPHDCLEILAETHGTRPDLTDQPIPDADHTWYTDGSSFLQEGQRKAGAAVTTETEVIWAGALPAGTSAQRAELIALTQALKMAEGKRLNVYTDSRYAFATAHIHGEIYRRRGWLTSEGREIKNKSEILALLKALFLPKRLSIIHCLGHQKGDSAEARGNRLADQAAREAAIKTPPDTSTLLAGKRTADGSEFEKRTADGSEFESPKKKAKVE

SEQ ID NO: 6878 - protein, 2094 aa, synthetic construct
MPAAKRVKLDGGDKKYSIGLDIGTNSVGWAVITDEYKVPSKKFKVLGNTDRHSIKKNLIGALLFDSGETAEATRLKRTARRRYTRRKNRICYLQEIFSNEMAKVDDSFFHRLEESFLVEEDKKHERHPIFGNIVDEVAYHEKYPTIYHLRKKLVDSTDKADLRLIYLALAHMIKFRGHFLIEGDLNPDNSDVDKLFIQLVQTYNQLFEENPINASGVDAKAILSARLSKSRRLENLIAQLPGEKKNGLFGNLIALSLGLTPNFKSNFDLAEDAKLQLSKDTYDDDLDNLLAQIGDQYADLFLAAKNLSDAILLSDILRVNTEITKAPLSASMIKRYDEHHQDLTLLKALVRQQLPEKYKEIFFDQSKNGYAGYIDGGASQEEFYKFIKPILEKMDGTEELLVKLNREDLLRKQRTFDNGSIPHQIHLGELHAILRRQEDFYPFLKDNREKIEKILTFRIPYYVGPLARGNSRFAWMTRKSEETITPWNFEEVVDKGASAQSFIERMTNFDKNLPNEKVLPKHSLLYEYFTVYNELTKVKYVTEGMRKPAFLSGEQKKAIVDLLFKTNRKVTVKQLKEDYFKKIECFDSVEISGVEDRFNASLGTYHDLLKIIKDKDFLDNEENEDILEDIVLTLTLFEDREMIEERLKTYAHLFDDKVMKQLKRRRYTGWGRLSRKLINGIRDKQSGKTILDFLKSDGFANRNFMQLIHDDSLTFKEDIQKAQVSGQGDSLHEHIANLAGSPAIKKGILQTVKVVDELVKVMGRHKPENIVIEMARENQTTQKGQKNSRERMKRIEEGIKELGSQILKEHPVENTQLQNEKLYLYYLQNGRDMYVDQELDINRLSDYDVDHIVPQSFLKDDSIDNKVLTRSDKARGKSDNVPSEEVVKKMKNYWRQLLNAKLITQRKFDNLTKAERGGLSELDKAGFIKRQLVETRQITKHVAQILDSRMNTKYDENDKLIREVKVITLKSKLVSDFRKDFQFYKVREINNYHHAHDAYLNAVVGTALIKKYPKLESEFVYGDYKVYDVRKMIAKSEQEIGKATAKYFFYSNIMNFFKTEITLANGEIRKRPLIETNGETGEIVWDKGRDFATVRKVLSMPQVNIVKKTEVQTGGFSKESILPKRNSDKLIARKKDWDPKKYGGFDSPTVAYSVLVVAKVEKGKSKKLKSVKELLGITIMERSSFEKNPIDFLEAKGYKEVKKDLIIKLPKYSLFELENGRKRMLASAGELQKGNELALPSKYVNFLYLASHYEKLKGSPEDNEQKQLFVEQHKHYLDEIIEQISEFSKRVILADANLDKVLSAYNKHRDKPIREQAENIIHLFTLTNLGAPAAFKYFDTTIDRKRYTSTKEVLDATLIHQSITGLYETRIDLSQLGGDGGGSSGGGGGSGGTLNIEDEYRLHETSKEPDVSLGSTWLSDFPQAWAETGGMGLAVRQAPLIIPLKATSTPVSIKQYPMSQEARLGIKPHIQRLLDQGILVPCQSPWNTPLLPVKKPGTNDYRPVQDLREVNKRVEDIHPTVPNPYNLLSGLPPSHQWYTVLDLKDAFFCLRLHPTSQPLFAFEWRDPEMGISGQLTWTRLPQGFKNSPTLFNEALHRDLAGFRIQHPDLILLQYVDDLLLAATSELDCQQGTRALLQTLGDLGYRASAKKAQICQKQVKYLGYLLKEGQRWLTEARKETVMGQPIPKTPRQLREFLGTAGFCRLWIPGFAEMAAPLYPLTKPGTLFNWGPDQQKAFQEIKQALLTAPALGLPDLTKPFELFVDEKQGYAKGVLTQKLGPWRRPVAYLSKKLDPVAAGWPPCLRMVAAIAVLTKDAGKLTMGQPLVILAPHAVEALVKQPPDRWLSNARMTHYQALLLDTDRVQFGPVVALNPATLLPLPEEGLQHDCLDILAEAHGTRSDLMDQPLPDADHTWYTDGSSFLQEGQRKAGAAVTTETEVIWARALPAGTSAQRAELIALTQALKMAEGKKLNVYTDSRYAFATAHIHGEIYRRRGWLTSEGKEIKNKDEILALLKALFLPKRLSIIHCPGHQKGNSAEARGNRMADQAAREVATRETPETSTLLAGKRTADGSEFEKRTADGSEFESPKKKAKVE

SEQ ID NO: 6879 - protein, 2094 aa, synthetic construct
MPAAKRVKLDGGDKKYSIGLDIGTNSVGWAVITDEYKVPSKKFKVLGNTDRHSIKKNLIGALLFDSGETAEATRLKRTARRRYTRRKNRICYLQEIFSNEMAKVDDSFFHRLEESFLVEEDKKHERHPIFGNIVDEVAYHEKYPTIYHLRKKLVDSTDKADLRLIYLALAHMIKFRGHFLIEGDLNPDNSDVDKLFIQLVQTYNQLFEENPINASGVDAKAILSARLSKSRRLENLIAQLPGEKKNGLFGNLIALSLGLTPNFKSNFDLAEDAKLQLSKDTYDDDLDNLLAQIGDQYADLFLAAKNLSDAILLSDILRVNTEITKAPLSASMIKRYDEHHQDLTLLKALVRQQLPEKYKEIFFDQSKNGYAGYIDGGASQEEFYKFIKPILEKMDGTEELLVKLNREDLLRKQRTFDNGSIPHQIHLGELHAILRRQEDFYPFLKDNREKIEKILTFRIPYYVGPLARGNSRFAWMTRKSEETITPWNFEEVVDKGASAQSFIERMTNFDKNLPNEKVLPKHSLLYEYFTVYNELTKVKYVTEGMRKPAFLSGEQKKAIVDLLFKTNRKVTVKQLKEDYFKKIECFDSVEISGVEDRFNASLGTYHDLLKIIKDKDFLDNEENEDILEDIVLTLTLFEDREMIEERLKTYAHLFDDKVMKQLKRRRYTGWGRLSRKLINGIRDKQSGKTILDFLKSDGFANRNFMQLIHDDSLTFKEDIQKAQVSGQGDSLHEHIANLAGSPAIKKGILQTVKVVDELVKVMGRHKPENIVIEMARENQTTQKGQKNSRERMKRIEEGIKELGSQILKEHPVENTQLQNEKLYLYYLQNGRDMYVDQELDINRLSDYDVDHIVPQSFLKDDSIDNKVLTRSDKARGKSDNVPSEEVVKKMKNYWRQLLNAKLITQRKFDNLTKAERGGLSELDKAGFIKRQLVETRQITKHVAQILDSRMNTKYDENDKLIREVKVITLKSKLVSDFRKDFQFYKVREINNYHHAHDAYLNAVVGTALIKKYPKLESEFVYGDYKVYDVRKMIAKSEQEIGKATAKYFFYSNIMNFFKTEITLANGEIRKRPLIETNGETGEIVWDKGRDFATVRKVLSMPQVNIVKKTEVQTGGFSKESILPKRNSDKLIARKKDWDPKKYGGFDSPTVAYSVLVVAKVEKGKSKKLKSVKELLGITIMERSSFEKNPIDFLEAKGYKEVKKDLIIKLPKYSLFELENGRKRMLASAGELQKGNELALPSKYVNFLYLASHYEKLKGSPEDNEQKQLFVEQHKHYLDEIIEQISEFSKRVILADANLDKVLSAYNKHRDKPIREQAENIIHLFTLTNLGAPAAFKYFDTTIDRKRYTSTKEVLDATLIHQSITGLYETRIDLSQLGGDGGGSSGGGGGSGGTLNIEDEYRLHETSKEPDVSLGSTWLSDFPQAWAETGGMGLAVRQAPLIIPLKATSTPVSIKQYPMSQEARLGIKPHIQRLLDQGILVPCQSPWNTPLLPVKKPGTNDYRPVQDLREVNKRVEDIHPTVPNPYNLLSGLPPSHQWYTVLDLKDAFFCLRLHPTSQPLFAFEWRDPEMGISGQLTWTRLPQGFKNSPTLFNEALHRDLAGFRIQHPDLILLQYVDDLLLAATSELDCQQGTRALLQTLGDLGYRASAKKAQICQKQVKYLGYLLKEGQRWLTEARKETVMGQPIPKTPRQLREFLGKAGFCRLFIPGFAEMAAPLYPLTKPGTLFNWGPDQQKAFQEIKQALLTAPALGLPDLTKPFELFVDEKQGYAKGVLTQKLGPWRRPVAYLSKKLDPVAAGWPPCLRMVAAIAVLTKDAGKLTMGQPLVILAPHAVEALVKQPPDRWLSNARMTHYQALLLDTDRVQFGPVVALNPATLLPLPEEGLQHDCLDILAEAHGTRSDLMDQPLPDADHTWYTDGSSFLQEGQRKAGAAVTTETEVIWARALPAGTSAQRAELIALTQALKMAEGKKLNVYTDSRYAFATAHIHGEIYRRRGWLTSEGKEIKNKDEILALLKALFLPKRLSIIHCPGHQKGNSAEARGNRMADQAAREVATRETPETSTLLAGKRTADGSEFEKRTADGSEFESPKKKAKVE

SEQ ID NO: 6880 - protein, 2114 aa, synthetic construct
MPAAKRVKLDGGDKKYSIGLDIGTNSVGWAVITDEYKVPSKKFKVLGNTDRHSIKKNLIGALLFDSGETAEATRLKRTARRRYTRRKNRICYLQEIFSNEMAKVDDSFFHRLEESFLVEEDKKHERHPIFGNIVDEVAYHEKYPTIYHLRKKLVDSTDKADLRLIYLALAHMIKFRGHFLIEGDLNPDNSDVDKLFIQLVQTYNQLFEENPINASGVDAKAILSARLSKSRRLENLIAQLPGEKKNGLFGNLIALSLGLTPNFKSNFDLAEDAKLQLSKDTYDDDLDNLLAQIGDQYADLFLAAKNLSDAILLSDILRVNTEITKAPLSASMIKRYDEHHQDLTLLKALVRQQLPEKYKEIFFDQSKNGYAGYIDGGASQEEFYKFIKPILEKMDGTEELLVKLNREDLLRKQRTFDNGSIPHQIHLGELHAILRRQEDFYPFLKDNREKIEKILTFRIPYYVGPLARGNSRFAWMTRKSEETITPWNFEEVVDKGASAQSFIERMTNFDKNLPNEKVLPKHSLLYEYFTVYNELTKVKYVTEGMRKPAFLSGEQKKAIVDLLFKTNRKVTVKQLKEDYFKKIECFDSVEISGVEDRFNASLGTYHDLLKIIKDKDFLDNEENEDILEDIVLTLTLFEDREMIEERLKTYAHLFDDKVMKQLKRRRYTGWGRLSRKLINGIRDKQSGKTILDFLKSDGFANRNFMQLIHDDSLTFKEDIQKAQVSGQGDSLHEHIANLAGSPAIKKGILQTVKVVDELVKVMGRHKPENIVIEMARENQTTQKGQKNSRERMKRIEEGIKELGSQILKEHPVENTQLQNEKLYLYYLQNGRDMYVDQELDINRLSDYDVDHIVPQSFLKDDSIDNKVLTRSDKARGKSDNVPSEEVVKKMKNYWRQLLNAKLITQRKFDNLTKAERGGLSELDKAGFIKRQLVETRQITKHVAQILDSRMNTKYDENDKLIREVKVITLKSKLVSDFRKDFQFYKVREINNYHHAHDAYLNAVVGTALIKKYPKLESEFVYGDYKVYDVRKMIAKSEQEIGKATAKYFFYSNIMNFFKTEITLANGEIRKRPLIETNGETGEIVWDKGRDFATVRKVLSMPQVNIVKKTEVQTGGFSKESILPKRNSDKLIARKKDWDPKKYGGFDSPTVAYSVLVVAKVEKGKSKKLKSVKELLGITIMERSSFEKNPIDFLEAKGYKEVKKDLIIKLPKYSLFELENGRKRMLASAGELQKGNELALPSKYVNFLYLASHYEKLKGSPEDNEQKQLFVEQHKHYLDEIIEQISEFSKRVILADANLDKVLSAYNKHRDKPIREQAENIIHLFTLTNLGAPAAFKYFDTTIDRKRYTSTKEVLDATLIHQSITGLYETRIDLSQLGGDGGGSSGGGGGSGGVQEISDSRPMLHIYLNGRRFLGLLDTGADKTCIAGRDWPANWPIHQTESSLQGLGMACGVARSSQPLRWQHEDKSGIIHPFVIPTLPFTLWGRDIMKDIKVRLMTDSPDDSQDLMIGAIESNLFADQISWKSDQPVWLNQWPLKQEKLQALQQLVTEQLQLGHLEESNSPWNTPVFVIKKKSGKWRLLQDLRAVNATMHDMGALQPGLPSPVAVPKGWEIIIIDLQDCFFNIKLHPEDCKRFAFSVPSPNFKRPYQRFQWKVLPQGMKNSPTLCQKFVDKAILTVRDKYQDSYIVHYMDDILLAHPSRSIVDEILTSMIQALNKHGLVVSTEKIQKYDNLKYLGTHIQGDSVSYQKLQIRTDKLRTLNDFQKLLGNINWIRPFLKLTTGELKPLFEILNGDSNPISTRKLTPEACKALQLMNERLSTARVKRLDLSQPWSLCILKTEYTPTACLWQDGVVEWIHLPHISPKVITPYDIFCTQLIIKGRHRSKELFSKDPDYIVVPYTKVQFDLLLQEKEDWPISLLGFLGEVHFHLPKDPLLTFTLQTAIIFPHMTSTTPLEKGIVIFTDGSANGRSVTYIQGREPIIKENTQNTAQQAEIVAVITAFEEVSQPFNLYTDSKYVTGLFPEIETATLSPRTKIYTELKHLQRLIHKRQEKFYIGHIRGHTGLPGPLAQGNAYADSLTRILTAAGKRTADGSEFEKRTADGSEFESPKKKAKVE

SEQ ID NO: 6881 - protein, 2086 aa, synthetic construct
MPAAKRVKLDGGDKKYSIGLDIGTNSVGWAVITDEYKVPSKKFKVLGNTDRHSIKKNLIGALLFDSGETAEATRLKRTARRRYTRRKNRICYLQEIFSNEMAKVDDSFFHRLEESFLVEEDKKHERHPIFGNIVDEVAYHEKYPTIYHLRKKLVDSTDKADLRLIYLALAHMIKFRGHFLIEGDLNPDNSDVDKLFIQLVQTYNQLFEENPINASGVDAKAILSARLSKSRRLENLIAQLPGEKKNGLFGNLIALSLGLTPNFKSNFDLAEDAKLQLSKDTYDDDLDNLLAQIGDQYADLFLAAKNLSDAILLSDILRVNTEITKAPLSASMIKRYDEHHQDLTLLKALVRQQLPEKYKEIFFDQSKNGYAGYIDGGASQEEFYKFIKPILEKMDGTEELLVKLNREDLLRKQRTFDNGSIPHQIHLGELHAILRRQEDFYPFLKDNREKIEKILTFRIPYYVGPLARGNSRFAWMTRKSEETITPWNFEEVVDKGASAQSFIERMTNFDKNLPNEKVLPKHSLLYEYFTVYNELTKVKYVTEGMRKPAFLSGEQKKAIVDLLFKTNRKVTVKQLKEDYFKKIECFDSVEISGVEDRFNASLGTYHDLLKIIKDKDFLDNEENEDILEDIVLTLTLFEDREMIEERLKTYAHLFDDKVMKQLKRRRYTGWGRLSRKLINGIRDKQSGKTILDFLKSDGFANRNFMQLIHDDSLTFKEDIQKAQVSGQGDSLHEHIANLAGSPAIKKGILQTVKVVDELVKVMGRHKPENIVIEMARENQTTQKGQKNSRERMKRIEEGIKELGSQILKEHPVENTQLQNEKLYLYYLQNGRDMYVDQELDINRLSDYDVDHIVPQSFLKDDSIDNKVLTRSDKARGKSDNVPSEEVVKKMKNYWRQLLNAKLITQRKFDNLTKAERGGLSELDKAGFIKRQLVETRQITKHVAQILDSRMNTKYDENDKLIREVKVITLKSKLVSDFRKDFQFYKVREINNYHHAHDAYLNAVVGTALIKKYPKLESEFVYGDYKVYDVRKMIAKSEQEIGKATAKYFFYSNIMNFFKTEITLANGEIRKRPLIETNGETGEIVWDKGRDFATVRKVLSMPQVNIVKKTEVQTGGFSKESILPKRNSDKLIARKKDWDPKKYGGFDSPTVAYSVLVVAKVEKGKSKKLKSVKELLGITIMERSSFEKNPIDFLEAKGYKEVKKDLIIKLPKYSLFELENGRKRMLASAGELQKGNELALPSKYVNFLYLASHYEKLKGSPEDNEQKQLFVEQHKHYLDEIIEQISEFSKRVILADANLDKVLSAYNKHRDKPIREQAENIIHLFTLTNLGAPAAFKYFDTTIDRKRYTSTKEVLDATLIHQSITGLYETRIDLSQLGGDGGGSSGGGGGSGGLDDEYRLYSPLVKPDQNIQFWLEQFPQAWAETAGMGLAKQVPPQVIQLKASATPVSVRQYPLSKEAQEGIRPHVQRLIQQGILVPVQSPWNTPLLPVRKPGTNDYRPVQDLREVNKRVQDIHPTVPNPYNLLCALPPQRSWYTVLDLKDAFFCLRLHPTSQPLFAFEWRDPGTGRTGQLTWTRLPQGFKNSPTIFNEALHRDLANFRIQHPQVTLLQYVDDLLLAGATKQDCLEGTKALLLELSDLGYRASAKKAQICRREVTYLGYSLRDGQRWLTEARKKTVVQIPAPTTAKQVREFLGKAGFCRLFIPGFATLAAPLYPLTKPKGEFSWAPEHQKAFDAIKKALLSAPALALPDVTKPFTLYVDERKGVARGVLTQTLGPWRRPVAYLSKKLDPVASGWPVCLKAIAAVAILVKDADKLTLGQNITVIAPHALENIVRQPPDRWMTNARMTHYQSLLLTERVTFAPPAALNPATLLPEETDEPVTHDCHQLLIEETGVRKDLTDIPLTGEVLTWFTDGSSYVVEGKRMAGAAVVDGTRTIWASSLPEGTSAQKAELMALTQALRLAEGKSINIYTDSRYAFATAHVHGAIYKQRGWLTSAGREIKNKEEILSLLEALHLPKRLAIIHCPGHQKAKDPISRGNQMADRVAKQAAQGVNLLPAGKRTADGSEFEKRTADGSEFESPKKKAKVE

SEQ ID NO: 6882 - protein, 2094 aa, synthetic construct
MPAAKRVKLDGGDKKYSIGLDIGTNSVGWAVITDEYKVPSKKFKVLGNTDRHSIKKNLIGALLFDSGETAEATRLKRTARRRYTRRKNRICYLQEIFSNEMAKVDDSFFHRLEESFLVEEDKKHERHPIFGNIVDEVAYHEKYPTIYHLRKKLVDSTDKADLRLIYLALAHMIKFRGHFLIEGDLNPDNSDVDKLFIQLVQTYNQLFEENPINASGVDAKAILSARLSKSRRLENLIAQLPGEKKNGLFGNLIALSLGLTPNFKSNFDLAEDAKLQLSKDTYDDDLDNLLAQIGDQYADLFLAAKNLSDAILLSDILRVNTEITKAPLSASMIKRYDEHHQDLTLLKALVRQQLPEKYKEIFFDQSKNGYAGYIDGGASQEEFYKFIKPILEKMDGTEELLVKLNREDLLRKQRTFDNGSIPHQIHLGELHAILRRQEDFYPFLKDNREKIEKILTFRIPYYVGPLARGNSRFAWMTRKSEETITPWNFEEVVDKGASAQSFIERMTNFDKNLPNEKVLPKHSLLYEYFTVYNELTKVKYVTEGMRKPAFLSGEQKKAIVDLLFKTNRKVTVKQLKEDYFKKIECFDSVEISGVEDRFNASLGTYHDLLKIIKDKDFLDNEENEDILEDIVLTLTLFEDREMIEERLKTYAHLFDDKVMKQLKRRRYTGWGRLSRKLINGIRDKQSGKTILDFLKSDGFANRNFMQLIHDDSLTFKEDIQKAQVSGQGDSLHEHIANLAGSPAIKKGILQTVKVVDELVKVMGRHKPENIVIEMARENQTTQKGQKNSRERMKRIEEGIKELGSQILKEHPVENTQLQNEKLYLYYLQNGRDMYVDQELDINRLSDYDVDHIVPQSFLKDDSIDNKVLTRSDKARGKSDNVPSEEVVKKMKNYWRQLLNAKLITQRKFDNLTKAERGGLSELDKAGFIKRQLVETRQITKHVAQILDSRMNTKYDENDKLIREVKVITLKSKLVSDFRKDFQFYKVREINNYHHAHDAYLNAVVGTALIKKYPKLESEFVYGDYKVYDVRKMIAKSEQEIGKATAKYFFYSNIMNFFKTEITLANGEIRKRPLIETNGETGEIVWDKGRDFATVRKVLSMPQVNIVKKTEVQTGGFSKESILPKRNSDKLIARKKDWDPKKYGGFDSPTVAYSVLVVAKVEKGKSKKLKSVKELLGITIMERSSFEKNPIDFLEAKGYKEVKKDLIIKLPKYSLFELENGRKRMLASAGELQKGNELALPSKYVNFLYLASHYEKLKGSPEDNEQKQLFVEQHKHYLDEIIEQISEFSKRVILADANLDKVLSAYNKHRDKPIREQAENIIHLFTLTNLGAPAAFKYFDTTIDRKRYTSTKEVLDATLIHQSITGLYETRIDLSQLGGDGGGSSGGGGGSGGTLNIEDEYRLHETSKEPDVPLGSTWLSDFPQAWAETGGMGLAVRQAPLIIPLKATSTPVSIKQYPMSQEARLGIKPHIQRLLDQGILVPCQSPWNTPLLPVKKPGTNDYRPVQDLREVNKRVEDIHPTVPNPYNLLSGLPPSHQWYTVLDLKDAFFCLRLHPTSQPLFAFEWRDPEMGISGQLTWTRLPQGFKNSPTLFNEALHRDLADFRIQHPDLILLQYVDDLLLAATSEQDCQRGTRALLQTLGNLGYRASAKKAQICQKQVKYLGYLLKEGQRWLTEARKETVMGQPTPKTPRQLREFLGTAGFCRLWIPGFAEMAAPLYPLTKPGTLFNWGPDQQKAYQEIKQALLTAPALGLPDLTKPFELFVDEKQGYAKGVLTQKLGPWRRPVAYLSKKLDPVAAGWPPCLRMVAAIAVLTKDAGKLTMGQPLVILAPHAVEALVKQPPDRWLSNARMTHYQAMLLDTDRVQFGPVVALNPATLLPLPEKEAPHDCLEILAETHGTRPDLTDQPIPDADYTWYTDGSSFLQEGQRRAGAAVTTETEVIWARALPAGTSAQRAELIALTQALKMAEGKKLNVYTDSRYAFATAHVHGEIYRRRGWLTSEGREIKNKNEILALLKALFLPKRLSIIHCPGHQKGNSAEARGNRMADQAAREAAMKAVLETSTLLAGKRTADGSEFEKRTADGSEFESPKKKAKVE

SEQ ID NO: 6883 - protein, 2094 aa, synthetic construct; identical to SEQ ID NO: 4518

SEQ ID NO: 6884 - protein, 2098 aa, synthetic construct
MPAAKRVKLDGGDKKYSIGLDIGTNSVGWAVITDEYKVPSKKFKVLGNTDRHSIKKNLIGALLFDSGETAEATRLKRTARRRYTRRKNRICYLQEIFSNEMAKVDDSFFHRLEESFLVEEDKKHERHPIFGNIVDEVAYHEKYPTIYHLRKKLVDSTDKADLRLIYLALAHMIKFRGHFLIEGDLNPDNSDVDKLFIQLVQTYNQLFEENPINASGVDAKAILSARLSKSRRLENLIAQLPGEKKNGLFGNLIALSLGLTPNFKSNFDLAEDAKLQLSKDTYDDDLDNLLAQIGDQYADLFLAAKNLSDAILLSDILRVNTEITKAPLSASMIKRYDEHHQDLTLLKALVRQQLPEKYKEIFFDQSKNGYAGYIDGGASQEEFYKFIKPILEKMDGTEELLVKLNREDLLRKQRTFDNGSIPHQIHLGELHAILRRQEDFYPFLKDNREKIEKILTFRIPYYVGPLARGNSRFAWMTRKSEETITPWNFEEVVDKGASAQSFIERMTNFDKNLPNEKVLPKHSLLYEYFTVYNELTKVKYVTEGMRKPAFLSGEQKKAIVDLLFKTNRKVTVKQLKEDYFKKIECFDSVEISGVEDRFNASLGTYHDLLKIIKDKDFLDNEENEDILEDIVLTLTLFEDREMIEERLKTYAHLFDDKVMKQLKRRRYTGWGRLSRKLINGIRDKQSGKTILDFLKSDGFANRNFMQLIHDDSLTFKEDIQKAQVSGQGDSLHEHIANLAGSPAIKKGILQTVKVVDELVKVMGRHKPENIVIEMARENQTTQKGQKNSRERMKRIEEGIKELGSQILKEHPVENTQLQNEKLYLYYLQNGRDMYVDQELDINRLSDYDVDHIVPQSFLKDDSIDNKVLTRSDKARGKSDNVPSEEVVKKMKNYWRQLLNAKLITQRKFDNLTKAERGGLSELDKAGFIKRQLVETRQITKHVAQILDSRMNTKYDENDKLIREVKVITLKSKLVSDFRKDFQFYKVREINNYHHAHDAYLNAVVGTALIKKYPKLESEFVYGDYKVYDVRKMIAKSEQEIGKATAKYFFYSNIMNFFKTEITLANGEIRKRPLIETNGETGEIVWDKGRDFATVRKVLSMPQVNIVKKTEVQTGGFSKESILPKRNSDKLIARKKDWDPKKYGGFDSPTVAYSVLVVAKVEKGKSKKLKSVKELLGITIMERSSFEKNPIDFLEAKGYKEVKKDLIIKLPKYSLFELENGRKRMLASAGELQKGNELALPSKYVNFLYLASHYEKLKGSPEDNEQKQLFVEQHKHYLDEIIEQISEFSKRVILADANLDKVLSAYNKHRDKPIREQAENIIHLFTLTNLGAPAAFKYFDTTIDRKRYTSTKEVLDATLIHQSITGLYETRIDLSQLGGDGGGGSGGGEAAAKGGTAPLEEEYRLFLEAPIQNVTLLEQWKREIPKVWAEINPPGLASTQAPIHVQLLSTALPVRVRQYPITLEAKRSLRETIRKFRAAGILRPVHSPWNTPLLPVRKSGTSEYRMVQDLREVNKRVETIHPTVPNPYTLLSLLPPDRIWYSVLDLKDAFFCIPLAPESQLIFAFEWADAEEGESGQLTWTRLPQGFKNSPTLFDEALNRDLQGFRLDHPSVSLLQYVDDLLIAADTQAACLSATRDLLMTLAELGYRVSGKKAQLCQEEVTYLGFKIHKGSRSLSNSRTQAILQIPVPKTKRQVREFLGTIGYCRLWIPGFAELAQPLYAATRGGNDPLVWGEKEEEAFQSLKLALTQPPALALPSLDKPFQLFVEETSGAAKGVLTQALGPWKRPVAYLSKRLDPVAAGWPRCLRAIAAAALLTREASKLTFGQDIEITSSHNLESLLRSPPDKWLTNARITQYQVLLLDPPRVRFKQTAALNPATLLPETDDTLPIHHCLDTLDSLTSTRPDLTDQPLAQAEATLFTDGSSYIRDGKRYAGAAVVTLDSVIWAEPLPIGTSAQKAELIALTKALEWSKDKSVNIYTDSRYAFATLHVHGMIYRERGLLTAGGKAIKNAPEILALLTAVWLPKRVAVMHCKGHQKDDAPTSTGNRRADEVAREVAIRPLSTQATISAGKRTADGSEFEKRTADGSEFESPKKKAKVE

SEQ ID NO: 6885 - protein, 2098 aa, synthetic construct
MPAAKRVKLDGGDKKYSIGLDIGTNSVGWAVITDEYKVPSKKFKVLGNTDRHSIKKNLIGALLFDSGETAEATRLKRTARRRYTRRKNRICYLQEIFSNEMAKVDDSFFHRLEESFLVEEDKKHERHPIFGNIVDEVAYHEKYPTIYHLRKKLVDSTDKADLRLIYLALAHMIKFRGHFLIEGDLNPDNSDVDKLFIQLVQTYNQLFEENPINASGVDAKAILSARLSKSRRLENLIAQLPGEKKNGLFGNLIALSLGLTPNFKSNFDLAEDAKLQLSKDTYDDDLDNLLAQIGDQYADLFLAAKNLSDAILLSDILRVNTEITKAPLSASMIKRYDEHHQDLTLLKALVRQQLPEKYKEIFFDQSKNGYAGYIDGGASQEEFYKFIKPILEKMDGTEELLVKLNREDLLRKQRTFDNGSIPHQIHLGELHAILRRQEDFYPFLKDNREKIEKILTFRIPYYVGPLARGNSRFAWMTRKSEETITPWNFEEVVDKGASAQSFIERMTNFDKNLPNEKVLPKHSLLYEYFTVYNELTKVKYVTEGMRKPAFLSGEQKKAIVDLLFKTNRKVTVKQLKEDYFKKIECFDSVEISGVEDRFNASLGTYHDLLKIIKDKDFLDNEENEDILEDIVLTLTLFEDREMIEERLKTYAHLFDDKVMKQLKRRRYTGWGRLSRKLINGIRDKQSGKTILDFLKSDGFANRNFMQLIHDDSLTFKEDIQKAQVSGQGDSLHEHIANLAGSPAIKKGILQTVKVVDELVKVMGRHKPENIVIEMARENQTTQKGQKNSRERMKRIEEGIKELGSQILKEHPVENTQLQNEKLYLYYLQNGRDMYVDQELDINRLSDYDVDHIVPQSFLKDDSIDNKVLTRSDKARGKSDNVPSEEVVKKMKNYWRQLLNAKLITQRKFDNLTKAERGGLSELDKAGFIKRQLVETRQITKHVAQILDSRMNTKYDENDKLIREVKVITLKSKLVSDFRKDFQFYKVREINNYHHAHDAYLNAVVGTALIKKYPKLESEFVYGDYKVYDVRKMIAKSEQEIGKATAKYFFYSNIMNFFKTEITLANGEIRKRPLIETNGETGEIVWDKGRDFATVRKVLSMPQVNIVKKTEVQTGGFSKESILPKRNSDKLIARKKDWDPKKYGGFDSPTVAYSVLVVAKVEKGKSKKLKSVKELLGITIMERSSFEKNPIDFLEAKGYKEVKKDLIIKLPKYSLFELENGRKRMLASAGELQKGNELALPSKYVNFLYLASHYEKLKGSPEDNEQKQLFVEQHKHYLDEIIEQISEFSKRVILADANLDKVLSAYNKHRDKPIREQAENIIHLFTLTNLGAPAAFKYFDTTIDRKRYTSTKEVLDATLIHQSITGLYETRIDLSQLGGDGGGGSGGGEAAAKGGTAPLEEEYRLFLEAPIQNVTLLEQWKREIPKVWAEINPPGLASTQAPIHVQLLSTALPVRVRQYPITLEAKRSLRETIRKFRAAGILRPVHSPWNTPLLPVRKSGTSEYRMVQDLREVNKRVETIHPTVPNPYTLLSLLPPDRIWYSVLDLKDAFFCIPLAPESQLIFAFEWADAEEGESGQLTWTRLPQGFKNSPTLFNEALNRDLQGFRLDHPSVSLLQYVDDLLIAADTQAACLSATRDLLMTLAELGYRVSGKKAQLCQEEVTYLGFKIHKGSRSLSNSRTQAILQIPVPKTKRQVREFLGTIGYCRLWIPGFAELAQPLYAATRPGNDPLVWGEKEEEAFQSLKLALTQPPALALPSLDKPFQLFVEETSGAAKGVLTQALGPWKRPVAYLSKRLDPVAAGWPRCLRAIAAAALLTREASKLTFGQDIEITSSHNLESLLRSPPDKWLTNARITQYQVLLLDPPRVRFKQTAALNPATLLPETDDTLPIHHCLDTLDSLTSTRPDLTDQPLAQAEATLFTDGSSYIRDGKRYAGAAVVTLDSVIWAEPLPIGTSAQKAELIALTKALEWSKDKSVNIYTDSRYAFATLHVHGMIYRERGWLTAGGKAIKNAPEILALLTAVWLPKRVAVMHCKGHQKDDAPTSTGNRRADEVAREVAIRPLSTQATISAGKRTADGSEFEKRTADGSEFESPKKKAKVE

SEQ ID NO: 6886 - protein, 2102 aa, synthetic construct
MPAAKRVKLDGGDKKYSIGLDIGTNSVGWAVITDEYKVPSKKFKVLGNTDRHSIKKNLIGALLFDSGETAEATRLKRTARRRYTRRKNRICYLQEIFSNEMAKVDDSFFHRLEESFLVEEDKKHERHPIFGNIVDEVAYHEKYPTIYHLRKKLVDSTDKADLRLIYLALAHMIKFRGHFLIEGDLNPDNSDVDKLFIQLVQTYNQLFEENPINASGVDAKAILSARLSKSRRLENLIAQLPGEKKNGLFGNLIALSLGLTPNFKSNFDLAEDAKLQLSKDTYDDDLDNLLAQIGDQYADLFLAAKNLSDAILLSDILRVNTEITKAPLSASMIKRYDEHHQDLTLLKALVRQQLPEKYKEIFFDQSKNGYAGYIDGGASQEEFYKFIKPILEKMDGTEELLVKLNREDLLRKQRTFDNGSIPHQIHLGELHAILRRQEDFYPFLKDNREKIEKILTFRIPYYVGPLARGNSRFAWMTRKSEETITPWNFEEVVDKGASAQSFIERMTNFDKNLPNEKVLPKHSLLYEYFTVYNELTKVKYVTEGMRKPAFLSGEQKKAIVDLLFKTNRKVTVKQLKEDYFKKIECFDSVEISGVEDRFNASLGTYHDLLKIIKDKDFLDNEENEDILEDIVLTLTLFEDREMIEERLKTYAHLFDDKVMKQLKRRRYTGWGRLSRKLINGIRDKQSGKTILDFLKSDGFANRNFMQLIHDDSLTFKEDIQKAQVSGQGDSLHEHIANLAGSPAIKKGILQTVKVVDELVKVMGRHKPENIVIEMARENQTTQKGQKNSRERMKRIEEGIKELGSQILKEHPVENTQLQNEKLYLYYLQNGRDMYVDQELDINRLSDYDVDHIVPQSFLKDDSIDNKVLTRSDKARGKSDNVPSEEVVKKMKNYWRQLLNAKLITQRKFDNLTKAERGGLSELDKAGFIKRQLVETRQITKHVAQILDSRMNTKYDENDKLIREVKVITLKSKLVSDFRKDFQFYKVREINNYHHAHDAYLNAVVGTALIKKYPKLESEFVYGDYKVYDVRKMIAKSEQEIGKATAKYFFYSNIMNFFKTEITLANGEIRKRPLIETNGETGEIVWDKGRDFATVRKVLSMPQVNIVKKTEVQTGGFSKESILPKRNSDKLIARKKDWDPKKYGGFDSPTVAYSVLVVAKVEKGKSKKLKSVKELLGITIMERSSFEKNPIDFLEAKGYKEVKKDLIIKLPKYSLFELENGRKRMLASAGELQKGNELALPSKYVNFLYLASHYEKLKGSPEDNEQKQLFVEQHKHYLDEIIEQISEFSKRVILADANLDKVLSAYNKHRDKPIREQAENIIHLFTLTNLGAPAAFKYFDTTIDRKRYTSTKEVLDATLIHQSITGLYETRIDLSQLGGDGGGGSGGGEAAAKGGTVSLQDEHRLFDIPVTTSLPDVWLQDFPQAWAETGGLGRAKCQAPIIIDLKPTAVPVSIKQYPMSLEAHMGIRQHIIKFLELGVLRPCRSPWNTPLLPVKKPGTQDYRPVQDLREINKRTVDIHPTVPNPYNLLSTLKPDYSWYTVLDLKDAFFCLPLAPQSQELFAFEWKDPERGISGQLTWTRLPQGFKNSPTLFNEALHRDLTDFRTQHPEVTLLQYVDDLLLAAPTKKACTQGTRHLLQELGEKGYRASAKKAQICQTKVTYLGYILSEGKRWLTPGRIETVARIPPPRNPREVREFLGTAGFCRLWIPGFAELAAPLYALTKPSTPFTWQTEHQLAFEALKKALLSAPALGLPDTSKPFTLFLDERQGIAKGVLTQKLGPWKRPVAYLSKKLDPVAAGWPPCLRIMAATAMLVKDSAKLTLGQPLTVITPHTLEAIVRQPPDRWITNARLTHYQALLLDTDRVQFGPPVTLNPATLLPVPENQPSPHDCRQVLAETHGTREDLKDQELPDADHTWYTDGSSYLDSGTRRAGAAVVDGHNTIWAQSLPPGTSAQKAELIALTKALELSKGKKANIYTDSRYAFATAHTHGSIYERRGWLTSEGKEIKNKAEIIALLKALFLPQEVAIIHCPGHQKGQDPVAVGNRQADRVARQAAMAEVLTLATEPDNTSHITAGKRTADGSEFEKRTADGSEFESPKKKAKVE

SEQ ID NO: 6887 - protein, 2173 aa, synthetic construct
MPAAKRVKLDGGDKKYSIGLDIGTNSVGWAVITDEYKVPSKKFKVLGNTDRHSIKKNLIGALLFDSGETAEATRLKRTARRRYTRRKNRICYLQEIFSNEMAKVDDSFFHRLEESFLVEEDKKHERHPIFGNIVDEVAYHEKYPTIYHLRKKLVDSTDKADLRLIYLALAHMIKFRGHFLIEGDLNPDNSDVDKLFIQLVQTYNQLFEENPINASGVDAKAILSARLSKSRRLENLIAQLPGEKKNGLFGNLIALSLGLTPNFKSNFDLAEDAKLQLSKDTYDDDLDNLLAQIGDQYADLFLAAKNLSDAILLSDILRVNTEITKAPLSASMIKRYDEHHQDLTLLKALVRQQLPEKYKEIFFDQSKNGYAGYIDGGASQEEFYKFIKPILEKMDGTEELLVKLNREDLLRKQRTFDNGSIPHQIHLGELHAILRRQEDFYPFLKDNREKIEKILTFRIPYYVGPLARGNSRFAWMTRKSEETITPWNFEEVVDKGASAQSFIERMTNFDKNLPNEKVLPKHSLLYEYFTVYNELTKVKYVTEGMRKPAFLSGEQKKAIVDLLFKTNRKVTVKQLKEDYFKKIECFDSVEISGVEDRFNASLGTYHDLLKIIKDKDFLDNEENEDILEDIVLTLTLFEDREMIEERLKTYAHLFDDKVMKQLKRRRYTGWGRLSRKLINGIRDKQSGKTILDFLKSDGFANRNFMQLIHDDSLTFKEDIQKAQVSGQGDSLHEHIANLAGSPAIKKGILQTVKVVDELVKVMGRHKPENIVIEMARENQTTQKGQKNSRERMKRIEEGIKELGSQILKEHPVENTQLQNEKLYLYYLQNGRDMYVDQELDINRLSDYDVDHIVPQSFLKDDSIDNKVLTRSDKARGKSDNVPSEEVVKKMKNYWRQLLNAKLITQRKFDNLTKAERGGLSELDKAGFIKRQLVETRQITKHVAQILDSRMNTKYDENDKLIREVKVITLKSKLVSDFRKDFQFYKVREINNYHHAHDAYLNAVVGTALIKKYPKLESEFVYGDYKVYDVRKMIAKSEQEIGKATAKYFFYSNIMNFFKTEITLANGEIRKRPLIETNGETGEIVWDKGRDFATVRKVLSMPQVNIVKKTEVQTGGFSKESILPKRNSDKLIARKKDWDPKKYGGFDSPTVAYSVLVVAKVEKGKSKKLKSVKELLGITIMERSSFEKNPIDFLEAKGYKEVKKDLIIKLPKYSLFELENGRKRMLASAGELQKGNELALPSKYVNFLYLASHYEKLKGSPEDNEQKQLFVEQHKHYLDEIIEQISEFSKRVILADANLDKVLSAYNKHRDKPIREQAENIIHLFTLTNLGAPAAFKYFDTTIDRKRYTSTKEVLDATLIHQSITGLYETRIDLSQLGGDGGGGSGGGEAAAKGGMDLLKPLTVERKGVKIKGYWNSQADITCVPKDLLQGEEPVRQQNVTTIHGTQEGDVYYVNLKIDGRRINTEVIGTTLDYAIITPGDVPWILKKPLELTIKLDLEEQQGTLLNNSILSKKGKEELKQLFEKYSALWQSWENQVGHRRIRPHKIATGTVKPTPQKQYHINPKAKPDIQIVINDLLKQGVLIQKESTMNTPVYPVPKPNGRWRMVLDYRAVNKVTPLIAVQNQHSYGILGSLFKGRYKTTIDLSNGFWAHPIVPEDYWITAFTWQGKQYCWTVLPQGFLNSPGLFTGDVVDLLQGIPNVEVYVDDVYISHDSEKEHLEYLDILFNRLKEAGYIISLKKSNIANSIVDFLGFQITNEGRGLTDTFKEKLENITAPTTLKQLQSILGLLNFARNFIPDFTELIAPLYALIPKSTKNYVPWQIEHSTTLETLITKLNGAEYLQGRKGDKTLIMKVNASYTTGYIRYYNEGEKKPISYVSIVFSKTELKFTELEKLLTTVHKGLLKALDLSMGQNIHVYSPIVSMQNIQKTPQTAKKALASRWLSWLSYLEDPRIRFFYDPQMPALKDLPAVDTGKDNKKHPSNFQHIFYTDGSAITSPTKEGHLNAGMGIVYFINKDGNLQKQQEWSISLGNHTAQFAEIAAFEFALKKCLPLGGNILVVTDSNYVAKAYNEELDVWASNGFVNNRKKPLKHISKWKSVADLKRLRPDVVVTHEPGHQKLDSSPHAYGNNLADQLATQASFKVHAGKRTADGSEFEKRTADGSEFESPKKKAKVE

SEQ ID NO: 6888 - protein, 2173 aa, synthetic construct
MPAAKRVKLDGGDKKYSIGLDIGTNSVGWAVITDEYKVPSKKFKVLGNTDRHSIKKNLIGALLFDSGETAEATRLKRTARRRYTRRKNRICYLQEIFSNEMAKVDDSFFHRLEESFLVEEDKKHERHPIFGNIVDEVAYHEKYPTIYHLRKKLVDSTDKADLRLIYLALAHMIKFRGHFLIEGDLNPDNSDVDKLFIQLVQTYNQLFEENPINASGVDAKAILSARLSKSRRLENLIAQLPGEKKNGLFGNLIALSLGLTPNFKSNFDLAEDAKLQLSKDTYDDDLDNLLAQIGDQYADLFLAAKNLSDAILLSDILRVNTEITKAPLSASMIKRYDEHHQDLTLLKALVRQQLPEKYKEIFFDQSKNGYAGYIDGGASQEEFYKFIKPILEKMDGTEELLVKLNREDLLRKQRTFDNGSIPHQIHLGELHAILRRQEDFYPFLKDNREKIEKILTFRIPYYVGPLARGNSRFAWMTRKSEETITPWNFEEVVDKGASAQSFIERMTNFDKNLPNEKVLPKHSLLYEYFTVYNELTKVKYVTEGMRKPAFLSGEQKKAIVDLLFKTNRKVTVKQLKEDYFKKIECFDSVEISGVEDRFNASLGTYHDLLKIIKDKDFLDNEENEDILEDIVLTLTLFEDREMIEERLKTYAHLFDDKVMKQLKRRRYTGWGRLSRKLINGIRDKQSGKTILDFLKSDGFANRNFMQLIHDDSLTFKEDIQKAQVSGQGDSLHEHIANLAGSPAIKKGILQTVKVVDELVKVMGRHKPENIVIEMARENQTTQKGQKNSRERMKRIEEGIKELGSQILKEHPVENTQLQNEKLYLYYLQNGRDMYVDQELDINRLSDYDVDHIVPQSFLKDDSIDNKVLTRSDKARGKSDNVPSEEVVKKMKNYWRQLLNAKLITQRKFDNLTKAERGGLSELDKAGFIKRQLVETRQITKHVAQILDSRMNTKYDENDKLIREVKVITLKSKLVSDFRKDFQFYKVREINNYHHAHDAYLNAVVGTALIKKYPKLESEFVYGDYKVYDVRKMIAKSEQEIGKATAKYFFYSNIMNFFKTEITLANGEIRKRPLIETNGETGEIVWDKGRDFATVRKVLSMPQVNIVKKTEVQTGGFSKESILPKRNSDKLIARKKDWDPKKYGGFDSPTVAYSVLVVAKVEKGKSKKLKSVKELLGITIMERSSFEKNPIDFLEAKGYKEVKKDLIIKLPKYSLFELENGRKRMLASAGELQKGNELALPSKYVNFLYLASHYEKLKGSPEDNEQKQLFVEQHKHYLDEIIEQISEFSKRVILADANLDKVLSAYNKHRDKPIREQAENIIHLFTLTNLGAPAAFKYFDTTIDRKRYTSTKEVLDATLIHQSITGLYETRIDLSQLGGDGGGGSGGGEAAAKGGMDLLKPLTVERKGVKIKGYWNSQADITCVPKDLLQGEEPVRQQNVTTIHGTQEGDVYYVNLKIDGRRINTEVIGTTLDYAIITPGDVPWILKKPLELTIKLDLEEQQGTLLNNSILSKKGKEELKQLFEKYSALWQSWENQVGHRRIRPHKIATGTVKPTPQKQYHINPKAKPDIQIVINDLLKQGVLIQKESTMNTPVYPVPKPNGRWRMVLDYRAVNKVTPLIAVQNQHSYGILGSLFKGRYKTTIDLSNGFWAHPIVPEDYWITAFTWQGKQYCWTVLPQGFLNSPGLFNGDVVDLLQGIPNVEVYVDDVYISHDSEKEHLEYLDILFNRLKEAGYIISLKKSNIANSIVDFLGFQITNEGRGLTDTFKEKLENITAPTTLKQLQSILGLLNFARNFIPDFTELIAPLYALIPKSPKNYVPWQIEHSTTLETLITKLNGAEYLQGRKGDKTLIMKVNASYTTGYIRYYNEGEKKPISYVSIVFSKTELKFTELEKLLTTVHKGLLKALDLSMGQNIHVYSPIVSMQNIQKTPQTAKKALASRWLSWLSYLEDPRIRFFYDPQMPALKDLPAVDTGKDNKKHPSNFQHIFYTDGSAITSPTKEGHLNAGMGIVYFINKDGNLQKQQEWSISLGNHTAQFAEIAAFEFALKKCLPLGGNILVVTDSNYVAKAYNEELDVWASNGFVNNRKKPLKHISKWKSVADLKRLRPDVVVTHEPGHQKLDSSPHAYGNNLADQLATQASFKVHAGKRTADGSEFEKRTADGSEFESPKKKAKVE

SEQ ID NO: 6889 - protein, 2095 aa, synthetic construct
MPAAKRVKLDGGDKKYSIGLDIGTNSVGWAVITDEYKVPSKKFKVLGNTDRHSIKKNLIGALLFDSGETAEATRLKRTARRRYTRRKNRICYLQEIFSNEMAKVDDSFFHRLEESFLVEEDKKHERHPIFGNIVDEVAYHEKYPTIYHLRKKLVDSTDKADLRLIYLALAHMIKFRGHFLIEGDLNPDNSDVDKLFIQLVQTYNQLFEENPINASGVDAKAILSARLSKSRRLENLIAQLPGEKKNGLFGNLIALSLGLTPNFKSNFDLAEDAKLQLSKDTYDDDLDNLLAQIGDQYADLFLAAKNLSDAILLSDILRVNTEITKAPLSASMIKRYDEHHQDLTLLKALVRQQLPEKYKEIFFDQSKNGYAGYIDGGASQEEFYKFIKPILEKMDGTEELLVKLNREDLLRKQRTFDNGSIPHQIHLGELHAILRRQEDFYPFLKDNREKIEKILTFRIPYYVGPLARGNSRFAWMTRKSEETITPWNFEEVVDKGASAQSFIERMTNFDKNLPNEKVLPKHSLLYEYFTVYNELTKVKYVTEGMRKPAFLSGEQKKAIVDLLFKTNRKVTVKQLKEDYFKKIECFDSVEISGVEDRFNASLGTYHDLLKIIKDKDFLDNEENEDILEDIVLTLTLFEDREMIEERLKTYAHLFDDKVMKQLKRRRYTGWGRLSRKLINGIRDKQSGKTILDFLKSDGFANRNFMQLIHDDSLTFKEDIQKAQVSGQGDSLHEHIANLAGSPAIKKGILQTVKVVDELVKVMGRHKPENIVIEMARENQTTQKGQKNSRERMKRIEEGIKELGSQILKEHPVENTQLQNEKLYLYYLQNGRDMYVDQELDINRLSDYDVDHIVPQSFLKDDSIDNKVLTRSDKARGKSDNVPSEEVVKKMKNYWRQLLNAKLITQRKFDNLTKAERGGLSELDKAGFIKRQLVETRQITKHVAQILDSRMNTKYDENDKLIREVKVITLKSKLVSDFRKDFQFYKVREINNYHHAHDAYLNAVVGTALIKKYPKLESEFVYGDYKVYDVRKMIAKSEQEIGKATAKYFFYSNIMNFFKTEITLANGEIRKRPLIETNGETGEIVWDKGRDFATVRKVLSMPQVNIVKKTEVQTGGFSKESILPKRNSDKLIARKKDWDPKKYGGFDSPTVAYSVLVVAKVEKGKSKKLKSVKELLGITIMERSSFEKNPIDFLEAKGYKEVKKDLIIKLPKYSLFELENGRKRMLASAGELQKGNELALPSKYVNFLYLASHYEKLKGSPEDNEQKQLFVEQHKHYLDEIIEQISEFSKRVILADANLDKVLSAYNKHRDKPIREQAENIIHLFTLTNLGAPAAFKYFDTTIDRKRYTSTKEVLDATLIHQSITGLYETRIDLSQLGGDGGGGSGGGEAAAKGGTLQLEEEYRLFEPESTQKQEMDIWLKNFPQAWAETGGMGTAHCQAPVLIQLKATATPISIRQYPMPHEAYQGIKPHIRRMLDQGILKPCQSPWNTPLLPVKKPGTEDYRPVQDLREVNKRVEDIHPTVPNPYNLLSTLPPSHPWYTVLDLKDAFFCLRLHSESQLLFAFEWRDPEIGLSGQLTWTRLPQGFKNSPTLFNEALHSDLADFRVRYPALVLLQYVDDLLLAAATRTECLEGTKALLETLGNKGYRASAKKAQICLQEVTYLGYSLKDGQRWLTKARKEAILSIPVPKNSRQVREFLGTAGYCRLWIPGFAELAAPLYPLTRPGTLFQWGTEQQLAFEDIKKALLSSPALGLPDITKPFELFIDENSGFAKGVLVQKLGPWKRPVAYLSKKLDTVASGWPPCLRMVAAIAILVKDAGKLTLGQPLTILTSHPVEALVRQPPNKWLSNARMTHYQAMLLDAERVHFGPTVSLNPATLLPLPSGGNHHDCLQILAETHGTRPDLTDQPLPDADLTWYTDGSSFIRNGEREAGAAVTTESEVIWAAPLPPGTSAQRAELIALTQALKMAEGKKLTVYTDSRYAFATTHVHGEIYRRRGWLTSEGKEIKNKNEILALLEALFLPKRLSIIHCPGHQKGDSPQAKGNRLADDTAKKAATETHSSLTVLPAGKRTADGSEFEKRTADGSEFESPKKKAKVE

SEQ ID NO: 6890 - protein, 2127 aa, synthetic construct
MPAAKRVKLDGGDKKYSIGLDIGTNSVGWAVITDEYKVPSKKFKVLGNTDRHSIKKNLIGALLFDSGETAEATRLKRTARRRYTRRKNRICYLQEIFSNEMAKVDDSFFHRLEESFLVEEDKKHERHPIFGNIVDEVAYHEKYPTIYHLRKKLVDSTDKADLRLIYLALAHMIKFRGHFLIEGDLNPDNSDVDKLFIQLVQTYNQLFEENPINASGVDAKAILSARLSKSRRLENLIAQLPGEKKNGLFGNLIALSLGLTPNFKSNFDLAEDAKLQLSKDTYDDDLDNLLAQIGDQYADLFLAAKNLSDAILLSDILRVNTEITKAPLSASMIKRYDEHHQDLTLLKALVRQQLPEKYKEIFFDQSKNGYAGYIDGGASQEEFYKFIKPILEKMDGTEELLVKLNREDLLRKQRTFDNGSIPHQIHLGELHAILRRQEDFYPFLKDNREKIEKILTFRIPYYVGPLARGNSRFAWMTRKSEETITPWNFEEVVDKGASAQSFIERMTNFDKNLPNEKVLPKHSLLYEYFTVYNELTKVKYVTEGMRKPAFLSGEQKKAIVDLLFKTNRKVTVKQLKEDYFKKIECFDSVEISGVEDRFNASLGTYHDLLKIIKDKDFLDNEENEDILEDIVLTLTLFEDREMIEERLKTYAHLFDDKVMKQLKRRRYTGWGRLSRKLINGIRDKQSGKTILDFLKSDGFANRNFMQLIHDDSLTFKEDIQKAQVSGQGDSLHEHIANLAGSPAIKKGILQTVKVVDELVKVMGRHKPENIVIEMARENQTTQKGQKNSRERMKRIEEGIKELGSQILKEHPVENTQLQNEKLYLYYLQNGRDMYVDQELDINRLSDYDVDHIVPQSFLKDDSIDNKVLTRSDKARGKSDNVPSEEVVKKMKNYWRQLLNAKLITQRKFDNLTKAERGGLSELDKAGFIKRQLVETRQITKHVAQILDSRMNTKYDENDKLIREVKVITLKSKLVSDFRKDFQFYKVREINNYHHAHDAYLNAVVGTALIKKYPKLESEFVYGDYKVYDVRKMIAKSEQEIGKATAKYFFYSNIMNFFKTEITLANGEIRKRPLIETNGETGEIVWDKGRDFATVRKVLSMPQVNIVKKTEVQTGGFSKESILPKRNSDKLIARKKDWDPKKYGGFDSPTVAYSVLVVAKVEKGKSKKLKSVKELLGITIMERSSFEKNPIDFLEAKGYKEVKKDLIIKLPKYSLFELENGRKRMLASAGELQKGNELALPSKYVNFLYLASHYEKLKGSPEDNEQKQLFVEQHKHYLDEIIEQISEFSKRVILADANLDKVLSAYNKHRDKPIREQAENIIHLFTLTNLGAPAAFKYFDTTIDRKRYTSTKEVLDATLIHQSITGLYETRIDLSQLGGDGGGGSGGGEAAAKGGLLGRDLLTKLKAQIQFSTEGPQVTWEDRPAMCLVLNLEEEYRLHEKPVPPSIDPSWLQLFPMVWAEKAGMGLANQVPPVVVELKSDASPVAVRQYPMSKEAREGIRPHIQRFLDLGILVPCQSPWNTPLLPVKKPGTNDYRPVQDLREVNKRVQDIHPTVPNPYNLLSSLPPSHTWYSVLDLKDAFFCLKLHPNSQPLFAFEWRDPEKGNTGQLTWTRLPQGFKNSPTLFDEALHRDLASFRALNPQVVMLQYVDDLLVAAPTYRDCKEGTRRLLQELSKLGYRVSAKKAQLCREEVTYLGYLLKGGKRWLTPARKATVMKIPTPTTPRQVREFLGTAGFCRLWIPGFASLAAPLYPLTREKVPFTWTEAHQEAFGRIKEALLSAPALALPDLTKPFALYVDEKEGVARGVLTQTLGPWRRPVAYLSKKLDPVASGWPTCLKAIAAVALLLKDADKLTLGQNVLVIAPHNLESIVRQPPDRWMTNARMTHYQSLLLNERVSFAPPAILNPATLLPVESDDTPIHICSEILAEETGTRPDLRDQPLPGVPAWYTDGSSFIMDGRRQAGAAIVDNKRTVWASNLPEGTSAQKAELIALTQALRLAEGKSINIYTDSRYAFATAHVHGAIYKQRGLLTSAGKDIKNKEEILALLEAIHLPKRVAIIHCPGHQRGTDPVATGNRKADEAAKQAAQSTRILTETTKNAGKRTADGSEFEKRTADGSEFESPKKKAKVE

SEQ ID NO: 6891 - protein, 2218 aa, synthetic construct
MPAAKRVKLDGGDKKYSIGLDIGTNSVGWAVITDEYKVPSKKFKVLGNTDRHSIKKNLIGALLFDSGETAEATRLKRTARRRYTRRKNRICYLQEIFSNEMAKVDDSFFHRLEESFLVEEDKKHERHPIFGNIVDEVAYHEKYPTIYHLRKKLVDSTDKADLRLIYLALAHMIKFRGHFLIEGDLNPDNSDVDKLFIQLVQTYNQLFEENPINASGVDAKAILSARLSKSRRLENLIAQLPGEKKNGLFGNLIALSLGLTPNFKSNFDLAEDAKLQLSKDTYDDDLDNLLAQIGDQYADLFLAAKNLSDAILLSDILRVNTEITKAPLSASMIKRYDEHHQDLTLLKALVRQQLPEKYKEIFFDQSKNGYAGYIDGGASQEEFYKFIKPILEKMDGTEELLVKLNREDLLRKQRTFDNGSIPHQIHLGELHAILRRQEDFYPFLKDNREKIEKILTFRIPYYVGPLARGNSRFAWMTRKSEETITPWNFEEVVDKGASAQSFIERMTNFDKNLPNEKVLPKHSLLYEYFTVYNELTKVKYVTEGMRKPAFLSGEQKKAIVDLLFKTNRKVTVKQLKEDYFKKIECFDSVEISGVEDRFNASLGTYHDLLKIIKDKDFLDNEENEDILEDIVLTLTLFEDREMIEERLKTYAHLFDDKVMKQLKRRRYTGWGRLSRKLINGIRDKQSGKTILDFLKSDGFANRNFMQLIHDDSLTFKEDIQKAQVSGQGDSLHEHIANLAGSPAIKKGILQTVKVVDELVKVMGRHKPENIVIEMARENQTTQKGQKNSRERMKRIEEGIKELGSQILKEHPVENTQLQNEKLYLYYLQNGRDMYVDQELDINRLSDYDVDHIVPQSFLKDDSIDNKVLTRSDKARGKSDNVPSEEVVKKMKNYWRQLLNAKLITQRKFDNLTKAERGGLSELDKAGFIKRQLVETRQITKHVAQILDSRMNTKYDENDKLIREVKVITLKSKLVSDFRKDFQFYKVREINNYHHAHDAYLNAVVGTALIKKYPKLESEFVYGDYKVYDVRKMIAKSEQEIGKATAKYFFYSNIMNFFKTEITLANGEIRKRPLIETNGETGEIVWDKGRDFATVRKVLSMPQVNIVKKTEVQTGGFSKESILPKRNSDKLIARKKDWDPKKYGGFDSPTVAYSVLVVAKVEKGKSKKLKSVKELLGITIMERSSFEKNPIDFLEAKGYKEVKKDLIIKLPKYSLFELENGRKRMLASAGELQKGNELALPSKYVNFLYLASHYEKLKGSPEDNEQKQLFVEQHKHYLDEIIEQISEFSKRVILADANLDKVLSAYNKHRDKPIREQAENIIHLFTLTNLGAPAAFKYFDTTIDRKRYTSTKEVLDATLIHQSITGLYETRIDLSQLGGDGGGGSGGGEAAAKGGTLGDQGSRGSDPLPEPRVTLTVEGIPTEFLVNTGAEHSVLTKPMGKMGSKRTVVAGATGSKVYPWTTKRLLKIGQKQVTHSFLVIPECPAPLLGRDLLTKLKAQIQFSTEGPQVTWEDRPAMCLVLNLEEEYRLHEKPVPPSIDPSWLQLFPMVWAEKAGMGLANQVPPVVVELKSDASPVAVRQYPMSKEAREGIRPHIQRFLDLGILVPCQSPWNTPLLPVKKPGTNDYRPVQDLREVNKRVQDIHPTVPNPYNLLSSLPPSHTWYSVLDLKDAFFCLKLHPNSQPLFAFEWRDPEKGNTGQLTWTRLPQGFKNSPTLFNEALHRDLASFRALNPQVVMLQYVDDLLVAAPTYRDCKEGTRRLLQELSKLGYRVSAKKAQLCREEVTYLGYLLKGGKRWLTPARKATVMKIPTPTTPRQVREFLGKAGFCRLFIPGFASLAAPLYPLTRPKVPFTWTEAHQEAFGRIKEALLSAPALALPDLTKPFALYVDEKEGVARGVLTQTLGPWRRPVAYLSKKLDPVASGWPTCLKAIAAVALLLKDADKLTLGQNVLVIAPHNLESIVRQPPDRWMTNARMTHYQSLLLNERVSFAPPAILNPATLLPVESDDTPIHICSEILAEETGTRPDLRDQPLPGVPAWYTDGSSFIMDGRRQAGAAIVDNKRTVWASNLPEGTSAQKAELIALTQALRLAEGKSINIYTDSRYAFATAHVHGAIYKQRGWLTSAGKDIKNKEEILALLEAIHLPKRVAIIHCPGHQRGTDPVATGNRKADEAAKQAAQSTRILTETTKNAGKRTADGSEFEKRTADGSEFESPKKKAKVE

SEQ ID NO: 6892 - protein, 2096 aa, synthetic construct
MPAAKRVKLDGGDKKYSIGLDIGTNSVGWAVITDEYKVPSKKFKVLGNTDRHSIKKNLIGALLFDSGETAEATRLKRTARRRYTRRKNRICYLQEIFSNEMAKVDDSFFHRLEESFLVEEDKKHERHPIFGNIVDEVAYHEKYPTIYHLRKKLVDSTDKADLRLIYLALAHMIKFRGHFLIEGDLNPDNSDVDKLFIQLVQTYNQLFEENPINASGVDAKAILSARLSKSRRLENLIAQLPGEKKNGLFGNLIALSLGLTPNFKSNFDLAEDAKLQLSKDTYDDDLDNLLAQIGDQYADLFLAAKNLSDAILLSDILRVNTEITKAPLSASMIKRYDEHHQDLTLLKALVRQQLPEKYKEIFFDQSKNGYAGYIDGGASQEEFYKFIKPILEKMDGTEELLVKLNREDLLRKQRTFDNGSIPHQIHLGELHAILRRQEDFYPFLKDNREKIEKILTFRIPYYVGPLARGNSRFAWMTRKSEETITPWNFEEVVDKGASAQSFIERMTNFDKNLPNEKVLPKHSLLYEYFTVYNELTKVKYVTEGMRKPAFLSGEQKKAIVDLLFKTNRKVTVKQLKEDYFKKIECFDSVEISGVEDRFNASLGTYHDLLKIIKDKDFLDNEENEDILEDIVLTLTLFEDREMIEERLKTYAHLFDDKVMKQLKRRRYTGWGRLSRKLINGIRDKQSGKTILDFLKSDGFANRNFMQLIHDDSLTFKEDIQKAQVSGQGDSLHEHIANLAGSPAIKKGILQTVKVVDELVKVMGRHKPENIVIEMARENQTTQKGQKNSRERMKRIEEGIKELGSQILKEHPVENTQLQNEKLYLYYLQNGRDMYVDQELDINRLSDYDVDHIVPQSFLKDDSIDNKVLTRSDKARGKSDNVPSEEVVKKMKNYWRQLLNAKLITQRKFDNLTKAERGGLSELDKAGFIKRQLVETRQITKHVAQILDSRMNTKYDENDKLIREVKVITLKSKLVSDFRKDFQFYKVREINNYHHAHDAYLNAVVGTALIKKYPKLESEFVYGDYKVYDVRKMIAKSEQEIGKATAKYFFYSNIMNFFKTEITLANGEIRKRPLIETNGETGEIVWDKGRDFATVRKVLSMPQVNIVKKTEVQTGGFSKESILPKRNSDKLIARKKDWDPKKYGGFDSPTVAYSVLVVAKVEKGKSKKLKSVKELLGITIMERSSFEKNPIDFLEAKGYKEVKKDLIIKLPKYSLFELENGRKRMLASAGELQKGNELALPSKYVNFLYLASHYEKLKGSPEDNEQKQLFVEQHKHYLDEIIEQISEFSKRVILADANLDKVLSAYNKHRDKPIREQAENIIHLFTLTNLGAPAAFKYFDTTIDRKRYTSTKEVLDATLIHQSITGLYETRIDLSQLGGDGGGGSGGGEAAAKGGTLNLEDEYRLYETSAEPEVSPGSTWLSDFPQAWAETGGMGLAVRQAPLIIPLKATSTPVSIKQYPMSQEAKLGIKPHIQRLLDQGILVPCQSPWNTPLLPVKKPGTNDYRPVQDLREVNKRVEDIHPTVPNPYNLLSGLPPSHRWYTVLDLKDAFFCLRLHPTSQPLFAFEWRDPGMGISGQLTWTRLPQGFKNSPTLFNEALHRDLADFRIQHPDLILLQYVDDILLAATSELDCQQGTRALLLTLGNLGYRASAKKAQLCQKQVKYLGYLLKEGQRWLTEARKETVMGQPTPKTPRQLREFLGKAGFCRLFIPGFAEMAAPLYPLTKPGTLFNWGPDQQKAYQEIKQALLTAPALGLPDLTKPFELFVDEKQGYAKGVLTQKLGPWRRPVAYLSKKLDPVAAGWPPCLRMVAAIAVLRKDAGKLTMGQPLVILAPHAVEALVKQPPDRWLSNARMTHYQAMLLDTDRVQFGPVVALNPATLLPLPEEGAPHDCLEILAETHGTRPDLTDQPIPDADHTWYTDGSSFLQEGQRKAGAAVTTETEVIWARALPAGTSAQRAELIALTQALKMAEGKRLNVYTDSRYAFATAHIHGEIYRRRGWLTSEGREIKNKSEILALLKALFLPKRLSIIHCLGHQKGDSAEARGNRLADQAAREAAIKTPPDTSTLLAGKRTADGSEFEKRTADGSEFESPKKKAKVE

SEQ ID NO: 6893 - protein, 2096 aa, synthetic construct
MPAAKRVKLDGGDKKYSIGLDIGTNSVGWAVITDEYKVPSKKFKVLGNTDRHSIKKNLIGALLFDSGETAEATRLKRTARRRYTRRKNRICYLQEIFSNEMAKVDDSFFHRLEESFLVEEDKKHERHPIFGNIVDEVAYHEKYPTIYHLRKKLVDSTDKADLRLIYLALAHMIKFRGHFLIEGDLNPDNSDVDKLFIQLVQTYNQLFEENPINASGVDAKAILSARLSKSRRLENLIAQLPGEKKNGLFGNLIALSLGLTPNFKSNFDLAEDAKLQLSKDTYDDDLDNLLAQIGDQYADLFLAAKNLSDAILLSDILRVNTEITKAPLSASMIKRYDEHHQDLTLLKALVRQQLPEKYKEIFFDQSKNGYAGYIDGGASQEEFYKFIKPILEKMDGTEELLVKLNREDLLRKQRTFDNGSIPHQIHLGELHAILRRQEDFYPFLKDNREKIEKILTFRIPYYVGPLARGNSRFAWMTRKSEETITPWNFEEVVDKGASAQSFIERMTNFDKNLPNEKVLPKHSLLYEYFTVYNELTKVKYVTEGMRKPAFLSGEQKKAIVDLLFKTNRKVTVKQLKEDYFKKIECFDSVEISGVEDRFNASLGTYHDLLKIIKDKDFLDNEENEDILEDIVLTLTLFEDREMIEERLKTYAHLFDDKVMKQLKRRRYTGWGRLSRKLINGIRDKQSGKTILDFLKSDGFANRNFMQLIHDDSLTFKEDIQKAQVSGQGDSLHEHIANLAGSPAIKKGILQTVKVVDELVKVMGRHKPENIVIEMARENQTTQKGQKNSRERMKRIEEGIKELGSQILKEHPVENTQLQNEKLYLYYLQNGRDMYVDQELDINRLSDYDVDHIVPQSFLKDDSIDNKVLTRSDKARGKSDNVPSEEVVKKMKNYWRQLLNAKLITQRKFDNLTKAERGGLSELDKAGFIKRQLVETRQITKHVAQILDSRMNTKYDENDKLIREVKVITLKSKLVSDFRKDFQFYKVREINNYHHAHDAYLNAVVGTALIKKYPKLESEFVYGDYKVYDVRKMIAKSEQEIGKATAKYFFYSNIMNFFKTEITLANGEIRKRPLIETNGETGEIVWDKGRDFATVRKVLSMPQVNIVKKTEVQTGGFSKESILPKRNSDKLIARKKDWDPKKYGGFDSPTVAYSVLVVAKVEKGKSKKLKSVKELLGITIMERSSFEKNPIDFLEAKGYKEVKKDLIIKLPKYSLFELENGRKRMLASAGELQKGNELALPSKYVNFLYLASHYEKLKGSPEDNEQKQLFVEQHKHYLDEIIEQISEFSKRVILADANLDKVLSAYNKHRDKPIREQAENIIHLFTLTNLGAPAAFKYFDTTIDRKRYTSTKEVLDATLIHQSITGLYETRIDLSQLGGDGGGGSGGGEAAAKGGTLNIEDEYRLHEISTEPDVSPGSTWLSDFPQAWAETGGMGLAVRQAPLIIPLKATSTPVSIKQYPMSQEAKLGIKPHIQRLLDQGILVPCQSPWNTPLLPVKKPGTNDYRPVQGLREVNKRVEDIHPTVPNPYNLLSGLPTSHRWYTVLDLKDAFFCLRLHPTSQPLFASEWRDPGMGISGQLTWTRLPQGFKNSPTLFNEALHRGLADFRIQHPDLILLQYVDDLLLAATSELDCQQGTRALLKTLGNLGYRASAKKAQICQKQVKYLGYLLREGQRWLTEARKETVMGQPTPKTPRQLREFLGTAGFCRLWIPRFAEMAAPLYPLTKPGTLFNWGPDQQKAYHEIKQALLTAPALGLPDLTKPFELFVDEKQGYAKGVLTQKLGPWRRPVAYLSKKLDPVAAGWPPCLRMVAAIAVLTKDAGKLTMGQPLVILAPHAVEALVKQPPDRWLSNARMTHYQAMLLDTDRVQFGPVVALNPATLLPLPEEGAPHDCLEILAETHGTEPDLTDQPIPDADHTWYTDGSSFLQEGQRKAGAAVTTETEVIWARALPAGTSAQRAELIALTQALKMAEGKRLNVYTDSRYAFATAHIHGEIYKRRGWLTSEGREIKNKSEILALLKALFLPKRLSIIHCLGHQKGDSAEARGNRLADQAAREAAIKTPPDTSTLLAGKRTADGSEFEKRTADGSEFESPKKKAKVE

SEQ ID NO: 6894 - protein, 2087 aa, synthetic construct
MPAAKRVKLDGGDKKYSIGLDIGTNSVGWAVITDEYKVPSKKFKVLGNTDRHSIKKNLIGALLFDSGETAEATRLKRTARRRYTRRKNRICYLQEIFSNEMAKVDDSFFHRLEESFLVEEDKKHERHPIFGNIVDEVAYHEKYPTIYHLRKKLVDSTDKADLRLIYLALAHMIKFRGHFLIEGDLNPDNSDVDKLFIQLVQTYNQLFEENPINASGVDAKAILSARLSKSRRLENLIAQLPGEKKNGLFGNLIALSLGLTPNFKSNFDLAEDAKLQLSKDTYDDDLDNLLAQIGDQYADLFLAAKNLSDAILLSDILRVNTEITKAPLSASMIKRYDEHHQDLTLLKALVRQQLPEKYKEIFFDQSKNGYAGYIDGGASQEEFYKFIKPILEKMDGTEELLVKLNREDLLRKQRTFDNGSIPHQIHLGELHAILRRQEDFYPFLKDNREKIEKILTFRIPYYVGPLARGNSRFAWMTRKSEETITPWNFEEVVDKGASAQSFIERMTNFDKNLPNEKVLPKHSLLYEYFTVYNELTKVKYVTEGMRKPAFLSGEQKKAIVDLLFKTNRKVTVKQLKEDYFKKIECFDSVEISGVEDRFNASLGTYHDLLKIIKDKDFLDNEENEDILEDIVLTLTLFEDREMIEERLKTYAHLFDDKVMKQLKRRRYTGWGRLSRKLINGIRDKQSGKTILDFLKSDGFANRNFMQLIHDDSLTFKEDIQKAQVSGQGDSLHEHIANLAGSPAIKKGILQTVKVVDELVKVMGRHKPENIVIEMARENQTTQKGQKNSRERMKRIEEGIKELGSQILKEHPVENTQLQNEKLYLYYLQNGRDMYVDQELDINRLSDYDVDHIVPQSFLKDDSIDNKVLTRSDKARGKSDNVPSEEVVKKMKNYWRQLLNAKLITQRKFDNLTKAERGGLSELDKAGFIKRQLVETRQITKHVAQILDSRMNTKYDENDKLIREVKVITLKSKLVSDFRKDFQFYKVREINNYHHAHDAYLNAVVGTALIKKYPKLESEFVYGDYKVYDVRKMIAKSEQEIGKATAKYFFYSNIMNFFKTEITLANGEIRKRPLIETNGETGEIVWDKGRDFATVRKVLSMPQVNIVKKTEVQTGGFSKESILPKRNSDKLIARKKDWDPKKYGGFDSPTVAYSVLVVAKVEKGKSKKLKSVKELLGITIMERSSFEKNPIDFLEAKGYKEVKKDLIIKLPKYSLFELENGRKRMLASAGELQKGNELALPSKYVNFLYLASHYEKLKGSPEDNEQKQLFVEQHKHYLDEIIEQISEFSKRVILADANLDKVLSAYNKHRDKPIREQAENIIHLFTLTNLGAPAAFKYFDTTIDRKRYTSTKEVLDATLIHQSITGLYETRIDLSQLGGDGGGGSGGGEAAAKGGIPWLMKKPLQLTTLVPLQEYEERLLKQTMLTGSYKEKLQSLFLKYDALWQHWENQVGHRRIKPHHIATGTVNPRPQKQYPINPKAKASIQTVINDLLKQGVLIQQNSIMNTPVYPVPKPDGKWRMVLDYREVNKTIPLIAAQNQHSAGILSSIFRGKYKTTLDLSNGFWAHSITPESYWLTAFTWLGQQYCWTRLPQGFLNSPALFNADVVDLLKEVPNVQVYVDDIYISHDDPREHLEQLEKVFSLLLNAGYVVSLKKSEIAQHEVEFLGFNITKEGRGLTETFKQKLLNITPPRDLKQLQSILGLLNFARNFIPNFSELVKPLYNIIATAPGKYITWTTDNSQQLQNIISMLNSAENLEERNPEVRLIMKVNTSPSAGYIRFYNEFAKRPIMYLNYVYTKAEVKFTNTEKLLTTIHKGLIKALDLGMGQEILVYSPIVSMTKIQKTPLPERKALPIRWITWMSYLEDPRIQFHYDKTLPELQQVPTVTDDIIAKIKHPSEFSMVFYTDGSAIKHPNVNKSHNAGMGIAQVQFKPEFTVINTWSIPLGDHTAQLAEVAAVEFACKKALKIDGPVLIVTDSFYVAESVNKELPYWQSNGFFNNKKKPLKHVSKWKSIADCIQLKPDIIIIHEKGHQPTASTFHTEGNNLADKLATQGSYVVNAGKRTADGSEFEKRTADGSEFESPKKKAKVE

SEQ ID NO: 6895 - protein, 2176 aa, synthetic construct
MPAAKRVKLDGGDKKYSIGLDIGTNSVGWAVITDEYKVPSKKFKVLGNTDRHSIKKNLIGALLFDSGETAEATRLKRTARRRYTRRKNRICYLQEIFSNEMAKVDDSFFHRLEESFLVEEDKKHERHPIFGNIVDEVAYHEKYPTIYHLRKKLVDSTDKADLRLIYLALAHMIKFRGHFLIEGDLNPDNSDVDKLFIQLVQTYNQLFEENPINASGVDAKAILSARLSKSRRLENLIAQLPGEKKNGLFGNLIALSLGLTPNFKSNFDLAEDAKLQLSKDTYDDDLDNLLAQIGDQYADLFLAAKNLSDAILLSDILRVNTEITKAPLSASMIKRYDEHHQDLTLLKALVRQQLPEKYKEIFFDQSKNGYAGYIDGGASQEEFYKFIKPILEKMDGTEELLVKLNREDLLRKQRTFDNGSIPHQIHLGELHAILRRQEDFYPFLKDNREKIEKILTFRIPYYVGPLARGNSRFAWMTRKSEETITPWNFEEVVDKGASAQSFIERMTNFDKNLPNEKVLPKHSLLYEYFTVYNELTKVKYVTEGMRKPAFLSGEQKKAIVDLLFKTNRKVTVKQLKEDYFKKIECFDSVEISGVEDRFNASLGTYHDLLKIIKDKDFLDNEENEDILEDIVLTLTLFEDREMIEERLKTYAHLFDDKVMKQLKRRRYTGWGRLSRKLINGIRDKQSGKTILDFLKSDGFANRNFMQLIHDDSLTFKEDIQKAQVSGQGDSLHEHIANLAGSPAIKKGILQTVKVVDELVKVMGRHKPENIVIEMARENQTTQKGQKNSRERMKRIEEGIKELGSQILKEHPVENTQLQNEKLYLYYLQNGRDMYVDQELDINRLSDYDVDHIVPQSFLKDDSIDNKVLTRSDKARGKSDNVPSEEVVKKMKNYWRQLLNAKLITQRKFDNLTKAERGGLSELDKAGFIKRQLVETRQITKHVAQILDSRMNTKYDENDKLIREVKVITLKSKLVSDFRKDFQFYKVREINNYHHAHDAYLNAVVGTALIKKYPKLESEFVYGDYKVYDVRKMIAKSEQEIGKATAKYFFYSNIMNFFKTEITLANGEIRKRPLIETNGETGEIVWDKGRDFATVRKVLSMPQVNIVKKTEVQTGGFSKESILPKRNSDKLIARKKDWDPKKYGGFDSPTVAYSVLVVAKVEKGKSKKLKSVKELLGITIMERSSFEKNPIDFLEAKGYKEVKKDLIIKLPKYSLFELENGRKRMLASAGELQKGNELALPSKYVNFLYLASHYEKLKGSPEDNEQKQLFVEQHKHYLDEIIEQISEFSKRVILADANLDKVLSAYNKHRDKPIREQAENIIHLFTLTNLGAPAAFKYFDTTIDRKRYTSTKEVLDATLIHQSITGLYETRIDLSQLGGDGGGGSGGGEAAAKGGMDPLQLLQPLEAEIKGTKLKAHWNSGATITCVPQAFLEEEVPIKNIWIKTIHGEKEQPVYYLTFKIQGRKVEAEVISSPYDYILVSPSDIPWLMKKPLQLTTLVPLQEYEERLLKQTMLTGSYKEKLQSLFLKYDALWQHWENQVGHRRIKPHHIATGTVNPRPQKQYPINPKAKASIQTVINDLLKQGVLIQQNSIMNTPVYPVPKPDGKWRMVLDYREVNKTIPLIAAQNQHSAGILSSIFRGKYKTTLDLSNGFWAHSITPESYWLTAFTWLGQQYCWTRLPQGFLNSPALFNADVVDLLKEVPNVQVYVDDIYISHDDPREHLEQLEKVFSLLLNAGYVVSLKKSEIAQHEVEFLGFNITKEGRGLTETFKQKLLNITPPRDLKQLQSILGLLNFARNFIPNFSELVKPLYNIIATAPGKYITWTTDNSQQLQNIISMLNSAENLEERNPEVRLIMKVNTSPSAGYIRFYNEFAKRPIMYLNYVYTKAEVKFTNTEKLLTTIHKGLIKALDLGMGQEILVYSPIVSMTKIQKTPLPERKALPIRWITWMSYLEDPRIQFHYDKTLPELQQVPTVTDDIIAKIKHPSEFSMVFYTDGSAIKHPNVNKSHNAGMGIAQVQFKPEFTVINTWSIPLGDHTAQLAEVAAVEFACKKALKIDGPVLIVTDSFYVAESVNKELPYWQSNGFFNNKKKPLKHVSKWKSIADCIQLKPDIIIIHEKGHQPTASTFHTEGNNLADKLATQGSYVVNAGKRTADGSEFEKRTADGSEFESPKKKAKVE

SEQ ID NO: 6896 - protein, 2094 aa, synthetic construct
MPAAKRVKLDGGDKKYSIGLDIGTNSVGWAVITDEYKVPSKKFKVLGNTDRHSIKKNLIGALLFDSGETAEATRLKRTARRRYTRRKNRICYLQEIFSNEMAKVDDSFFHRLEESFLVEEDKKHERHPIFGNIVDEVAYHEKYPTIYHLRKKLVDSTDKADLRLIYLALAHMIKFRGHFLIEGDLNPDNSDVDKLFIQLVQTYNQLFEENPINASGVDAKAILSARLSKSRRLENLIAQLPGEKKNGLFGNLIALSLGLTPNFKSNFDLAEDAKLQLSKDTYDDDLDNLLAQIGDQYADLFLAAKNLSDAILLSDILRVNTEITKAPLSASMIKRYDEHHQDLTLLKALVRQQLPEKYKEIFFDQSKNGYAGYIDGGASQEEFYKFIKPILEKMDGTEELLVKLNREDLLRKQRTFDNGSIPHQIHLGELHAILRRQEDFYPFLKDNREKIEKILTFRIPYYVGPLARGNSRFAWMTRKSEETITPWNFEEVVDKGASAQSFIERMTNFDKNLPNEKVLPKHSLLYEYFTVYNELTKVKYVTEGMRKPAFLSGEQKKAIVDLLFKTNRKVTVKQLKEDYFKKIECFDSVEISGVEDRFNASLGTYHDLLKIIKDKDFLDNEENEDILEDIVLTLTLFEDREMIEERLKTYAHLFDDKVMKQLKRRRYTGWGRLSRKLINGIRDKQSGKTILDFLKSDGFANRNFMQLIHDDSLTFKEDIQKAQVSGQGDSLHEHIANLAGSPAIKKGILQTVKVVDELVKVMGRHKPENIVIEMARENQTTQKGQKNSRERMKRIEEGIKELGSQILKEHPVENTQLQNEKLYLYYLQNGRDMYVDQELDINRLSDYDVDHIVPQSFLKDDSIDNKVLTRSDKARGKSDNVPSEEVVKKMKNYWRQLLNAKLITQRKFDNLTKAERGGLSELDKAGFIKRQLVETRQITKHVAQILDSRMNTKYDENDKLIREVKVITLKSKLVSDFRKDFQFYKVREINNYHHAHDAYLNAVVGTALIKKYPKLESEFVYGDYKVYDVRKMIAKSEQEIGKATAKYFFYSNIMNFFKTEITLANGEIRKRPLIETNGETGEIVWDKGRDFATVRKVLSMPQVNIVKKTEVQTGGFSKESILPKRNSDKLIARKKDWDPKKYGGFDSPTVAYSVLVVAKVEKGKSKKLKSVKELLGITIMERSSFEKNPIDFLEAKGYKEVKKDLIIKLPKYSLFELENGRKRMLASAGELQKGNELALPSKYVNFLYLASHYEKLKGSPEDNEQKQLFVEQHKHYLDEIIEQISEFSKRVILADANLDKVLSAYNKHRDKPIREQAENIIHLFTLTNLGAPAAFKYFDTTIDRKRYTSTKEVLDATLIHQSITGLYETRIDLSQLGGDGGGGSGGGEAAAKGGVLNLEEEYRLHEKPVPSSIDPSWLQLFPTVWAERAGMGLANQVPPVVVELRSGASPVAVRQYPMSKEAREGIRPHIQRFLDLGVLVPCQSPWNTPLLPVKKPGTNDYRPVQDLREINKRVQDIHPTVPNPYNLLSSLPPSHTWYSVLDLKDAFFCLKLHPNSQPLFAFEWRDPEKGNTGQLTWTRLPQGFKNSPTLFNEALHRDLAPFRALNPQVVLLQYVDDLLVAAPTYRDCKEGTQKLLQELSKLGYRVSAKKAQLCQKEVTYLGYLLKEGKRWLTPARKATVMKIPPPTTPRQVREFLGKAGFCRLFIPGFASLAAPLYPLTKPSIPFIWTEEHQKAFDRIKEALLSAPALALPDLTKPFTLYVDERAGVARGVLTQTLGPWRRPVAYLSKKLDPVASGWPTCLKAVAAVALLLKDADKLTLGQNVTVIASHSLESIVRQPPDRWMTNARMTHYQSLLLNERVSFAPPAVLNPATLLPVESEATPVHRCSEILAEETGTRRDLKDQPLPGVPAWYTDGSSFIAEGKRRAGAAIVDGKRTVWASSLPEGTSAQKAELVALTQALRLAEGKDINIYTDSRYAFATAHIHGAIYKQRGWLTSAGKDIKNKEEILALLEAIHLPKRVAIIHCPGHQKGNDPVATGNRRADEAAKQAALSTRVLAETTKPAGKRTADGSEFEKRTADGSEFESPKKKAKVE

SEQ ID NO: 6897 - protein, 2096 aa, synthetic construct
MPAAKRVKLDGGDKKYSIGLDIGTNSVGWAVITDEYKVPSKKFKVLGNTDRHSIKKNLIGALLFDSGETAEATRLKRTARRRYTRRKNRICYLQEIFSNEMAKVDDSFFHRLEESFLVEEDKKHERHPIFGNIVDEVAYHEKYPTIYHLRKKLVDSTDKADLRLIYLALAHMIKFRGHFLIEGDLNPDNSDVDKLFIQLVQTYNQLFEENPINASGVDAKAILSARLSKSRRLENLIAQLPGEKKNGLFGNLIALSLGLTPNFKSNFDLAEDAKLQLSKDTYDDDLDNLLAQIGDQYADLFLAAKNLSDAILLSDILRVNTEITKAPLSASMIKRYDEHHQDLTLLKALVRQQLPEKYKEIFFDQSKNGYAGYIDGGASQEEFYKFIKPILEKMDGTEELLVKLNREDLLRKQRTFDNGSIPHQIHLGELHAILRRQEDFYPFLKDNREKIEKILTFRIPYYVGPLARGNSRFAWMTRKSEETITPWNFEEVVDKGASAQSFIERMTNFDKNLPNEKVLPKHSLLYEYFTVYNELTKVKYVTEGMRKPAFLSGEQKKAIVDLLFKTNRKVTVKQLKEDYFKKIECFDSVEISGVEDRFNASLGTYHDLLKIIKDKDFLDNEENEDILEDIVLTLTLFEDREMIEERLKTYAHLFDDKVMKQLKRRRYTGWGRLSRKLINGIRDKQSGKTILDFLKSDGFANRNFMQLIHDDSLTFKEDIQKAQVSGQGDSLHEHIANLAGSPAIKKGILQTVKVVDELVKVMGRHKPENIVIEMARENQTTQKGQKNSRERMKRIEEGIKELGSQILKEHPVENTQLQNEKLYLYYLQNGRDMYVDQELDINRLSDYDVDHIVPQSFLKDDSIDNKVLTRSDKARGKSDNVPSEEVVKKMKNYWRQLLNAKLITQRKFDNLTKAERGGLSELDKAGFIKRQLVETRQITKHVAQILDSRMNTKYDENDKLIREVKVITLKSKLVSDFRKDFQFYKVREINNYHHAHDAYLNAVVGTALIKKYPKLESEFVYGDYKVYDVRKMIAKSEQEIGKATAKYFFYSNIMNFFKTEITLANGEIRKRPLIETNGETGEIVWDKGRDFATVRKVLSMPQVNIVKKTEVQTGGFSKESILPKRNSDKLIARKKDWDPKKYGGFDSPTVAYSVLVVAKVEKGKSKKLKSVKELLGITIMERSSFEKNPIDFLEAKGYKEVKKDLIIKLPKYSLFELENGRKRMLASAGELQKGNELALPSKYVNFLYLASHYEKLKGSPEDNEQKQLFVEQHKHYLDEIIEQISEFSKRVILADANLDKVLSAYNKHRDKPIREQAENIIHLFTLTNLGAPAAFKYFDTTIDRKRYTSTKEVLDATLIHQSITGLYETRIDLSQLGGDGGGGSGGGEAAAKGGTLNIEDEYRLHETSKEPDVPLGSTWLSDFPQAWAETGGMGLAVRQAPLIIPLKATSTPVSIKQYPMSQEARLGIKPHIQRLLDQGILVPCQSPWNTPLLPVKKPGTNDYRPVQDLREVNKRVEDIHPTVPNPYNLLSGLPPSHQWYTVLDLKDAFFCLRLHPTSQPLFAFEWRDPEMGISGQLTWTRLPQGFKNSPTLFNEALHRDLADFRIQHPDLILLQYVDDLLLAATSEQDCQRGTRALLQTLGNLGYRASAKKAQICQKQVKYLGYLLKEGQRWLTEARKETVMGQPTPKTPRQLREFLGTAGFCRLWIPGFAEMAAPLYPLTKPGTLFNWGPDQQKAYQEIKQALLTAPALGLPDLTKPFELFVDEKQGYAKGVLTQKLGPWRRPVAYLSKKLDPVAAGWPPCLRMVAAIAVLTKDAGKLTMGQPLVILAPHAVEALVKQPPDRWLSNARMTHYQAMLLDTDRVQFGPVVALNPATLLPLPEKEAPHDCLEILAETHGTRPDLTDQPIPDADYTWYTDGSSFLQEGQRRAGAAVTTETEVIWARALPAGTSAQRAELIALTQALKMAEGKKLNVYTDSRYAFATAHVHGEIYRRRGWLTSEGREIKNKNEILALLKALFLPKRLSIIHCPGHQKGNSAEARGNRMADQAAREAAMKAVLETSTLLAGKRTADGSEFEKRTADGSEFESPKKKAKVE

SEQ ID NO: 6898 - protein, 2098 aa, synthetic construct
MPAAKRVKLDGGDKKYSIGLDIGTNSVGWAVITDEYKVPSKKFKVLGNTDRHSIKKNLIGALLFDSGETAEATRLKRTARRRYTRRKNRICYLQEIFSNEMAKVDDSFFHRLEESFLVEEDKKHERHPIFGNIVDEVAYHEKYPTIYHLRKKLVDSTDKADLRLIYLALAHMIKFRGHFLIEGDLNPDNSDVDKLFIQLVQTYNQLFEENPINASGVDAKAILSARLSKSRRLENLIAQLPGEKKNGLFGNLIALSLGLTPNFKSNFDLAEDAKLQLSKDTYDDDLDNLLAQIGDQYADLFLAAKNLSDAILLSDILRVNTEITKAPLSASMIKRYDEHHQDLTLLKALVRQQLPEKYKEIFFDQSKNGYAGYIDGGASQEEFYKFIKPILEKMDGTEELLVKLNREDLLRKQRTFDNGSIPHQIHLGELHAILRRQEDFYPFLKDNREKIEKILTFRIPYYVGPLARGNSRFAWMTRKSEETITPWNFEEVVDKGASAQSFIERMTNFDKNLPNEKVLPKHSLLYEYFTVYNELTKVKYVTEGMRKPAFLSGEQKKAIVDLLFKTNRKVTVKQLKEDYFKKIECFDSVEISGVEDRFNASLGTYHDLLKIIKDKDFLDNEENEDILEDIVLTLTLFEDREMIEERLKTYAHLFDDKVMKQLKRRRYTGWGRLSRKLINGIRDKQSGKTILDFLKSDGFANRNFMQLIHDDSLTFKEDIQKAQVSGQGDSLHEHIANLAGSPAIKKGILQTVKVVDELVKVMGRHKPENIVIEMARENQTTQKGQKNSRERMKRIEEGIKELGSQILKEHPVENTQLQNEKLYLYYLQNGRDMYVDQELDINRLSDYDVDHIVPQSFLKDDSIDNKVLTRSDKARGKSDNVPSEEVVKKMKNYWRQLLNAKLITQRKFDNLTKAERGGLSELDKAGFIKRQLVETRQITKHVAQILDSRMNTKYDENDKLIREVKVITLKSKLVSDFRKDFQFYKVREINNYHHAHDAYLNAVVGTALIKKYPKLESEFVYGDYKVYDVRKMIAKSEQEIGKATAKYFFYSNIMNFFKTEITLANGEIRKRPLIETNGETGEIVWDKGRDFATVRKVLSMPQVNIVKKTEVQTGGFSKESILPKRNSDKLIARKKDWDPKKYGGFDSPTVAYSVLVVAKVEKGKSKKLKSVKELLGITIMERSSFEKNPIDFLEAKGYKEVKKDLIIKLPKYSLFELENGRKRMLASAGELQKGNELALPSKYVNFLYLASHYEKLKGSPEDNEQKQLFVEQHKHYLDEIIEQISEFSKRVILADANLDKVLSAYNKHRDKPIREQAENIIHLFTLTNLGAPAAFKYFDTTIDRKRYTSTKEVLDATLIHQSITGLYETRIDLSQLGGDGGGGSEAAAKGGGGGTAPLEEEYRLFLEAPIQNVTLLEQWKREIPKVWAEINPPGLASTQAPIHVQLLSTALPVRVRQYPITLEAKRSLRETIRKFRAAGILRPVHSPWNTPLLPVRKSGTSEYRMVQDLREVNKRVETIHPTVPNPYTLLSLLPPDRIWYSVLDLKDAFFCIPLAPESQLIFAFEWADAEEGESGQLTWTRLPQGFKNSPTLFNEALNRDLQGFRLDHPSVSLLQYVDDLLIAADTQAACLSATRDLLMTLAELGYRVSGKKAQLCQEEVTYLGFKIHKGSRSLSNSRTQAILQIPVPKTKRQVREFLGTIGYCRLWIPGFAELAQPLYAATRPGNDPLVWGEKEEEAFQSLKLALTQPPALALPSLDKPFQLFVEETSGAAKGVLTQALGPWKRPVAYLSKRLDPVAAGWPRCLRAIAAAALLTREASKLTFGQDIEITSSHNLESLLRSPPDKWLTNARITQYQVLLLDPPRVRFKQTAALNPATLLPETDDTLPIHHCLDTLDSLTSTRPDLTDQPLAQAEATLFTDGSSYIRDGKRYAGAAVVTLDSVIWAEPLPIGTSAQKAELIALTKALEWSKDKSVNIYTDSRYAFATLHVHGMIYRERGWLTAGGKAIKNAPEILALLTAVWLPKRVAVMHCKGHQKDDAPTSTGNRRADEVAREVAIRPLSTQATISAGKRTADGSEFEKRTADGSEFESPKKKAKVE

SEQ ID NO: 6899 - protein, 2102 aa, synthetic construct
MPAAKRVKLDGGDKKYSIGLDIGTNSVGWAVITDEYKVPSKKFKVLGNTDRHSIKKNLIGALLFDSGETAEATRLKRTARRRYTRRKNRICYLQEIFSNEMAKVDDSFFHRLEESFLVEEDKKHERHPIFGNIVDEVAYHEKYPTIYHLRKKLVDSTDKADLRLIYLALAHMIKFRGHFLIEGDLNPDNSDVDKLFIQLVQTYNQLFEENPINASGVDAKAILSARLSKSRRLENLIAQLPGEKKNGLFGNLIALSLGLTPNFKSNFDLAEDAKLQLSKDTYDDDLDNLLAQIGDQYADLFLAAKNLSDAILLSDILRVNTEITKAPLSASMIKRYDEHHQDLTLLKALVRQQLPEKYKEIFFDQSKNGYAGYIDGGASQEEFYKFIKPILEKMDGTEELLVKLNREDLLRKQRTFDNGSIPHQIHLGELHAILRRQEDFYPFLKDNREKIEKILTFRIPYYVGPLARGNSRFAWMTRKSEETITPWNFEEVVDKGASAQSFIERMTNFDKNLPNEKVLPKHSLLYEYFTVYNELTKVKYVTEGMRKPAFLSGEQKKAIVDLLFKTNRKVTVKQLKEDYFKKIECFDSVEISGVEDRFNASLGTYHDLLKIIKDKDFLDNEENEDILEDIVLTLTLFEDREMIEERLKTYAHLFDDKVMKQLKRRRYTGWGRLSRKLINGIRDKQSGKTILDFLKSDGFANRNFMQLIHDDSLTFKEDIQKAQVSGQGDSLHEHIANLAGSPAIKKGILQTVKVVDELVKVMGRHKPENIVIEMARENQTTQKGQKNSRERMKRIEEGIKELGSQILKEHPVENTQLQNEKLYLYYLQNGRDMYVDQELDINRLSDYDVDHIVPQSFLKDDSIDNKVLTRSDKARGKSDNVPSEEVVKKMKNYWRQLLNAKLITQRKFDNLTKAERGGLSELDKAGFIKRQLVETRQITKHVAQILDSRMNTKYDENDKLIREVKVITLKSKLVSDFRKDFQFYKVREINNYHHAHDAYLNAVVGTALIKKYPKLESEFVYGDYKVYDVRKMIAKSEQEIGKATAKYFFYSNIMNFFKTEITLANGEIRKRPLIETNGETGEIVWDKGRDFATVRKVLSMPQVNIVKKTEVQTGGFSKESILPKRNSDKLIARKKDWDPKKYGGFDSPTVAYSVLVVAKVEKGKSKKLKSVKELLGITIMERSSFEKNPIDFLEAKGYKEVKKDLIIKLPKYSLFELENGRKRMLASAGELQKGNELALPSKYVNFLYLASHYEKLKGSPEDNEQKQLFVEQHKHYLDEIIEQISEFSKRVILADANLDKVLSAYNKHRDKPIREQAENIIHLFTLTNLGAPAAFKYFDTTIDRKRYTSTKEVLDATLIHQSITGLYETRIDLSQLGGDGGGGSEAAAKGGGGGTVSLQDEHRLFDIPVTTSLPDVWLQDFPQAWAETGGLGRAKCQAPIIIDLKPTAVPVSIKQYPMSLEAHMGIRQHIIKFLELGVLRPCRSPWNTPLLPVKKPGTQDYRPVQDLREINKRTVDIHPTVPNPYNLLSTLKPDYSWYTVLDLKDAFFCLPLAPQSQELFAFEWKDPERGISGQLTWTRLPQGFKNSPTLFNEALHRDLTDFRTQHPEVTLLQYVDDLLLAAPTKKACTQGTRHLLQELGEKGYRASAKKAQICQTKVTYLGYILSEGKRWLTPGRIETVARIPPPRNPREVREFLGTAGFCRLWIPGFAELAAPLYALTKPSTPFTWQTEHQLAFEALKKALLSAPALGLPDTSKPFTLFLDERQGIAKGVLTQKLGPWKRPVAYLSKKLDPVAAGWPPCLRIMAATAMLVKDSAKLTLGQPLTVITPHTLEAIVRQPPDRWITNARLTHYQALLLDTDRVQFGPPVTLNPATLLPVPENQPSPHDCRQVLAETHGTREDLKDQELPDADHTWYTDGSSYLDSGTRRAGAAVVDGHNTIWAQSLPPGTSAQKAELIALTKALELSKGKKANIYTDSRYAFATAHTHGSIYERRGWLTSEGKEIKNKAEIIALLKALFLPQEVAIIHCPGHQKGQDPVAVGNRQADRVARQAAMAEVLTLATEPDNTSHITAGKRTADGSEFEKRTADGSEFESPKKKAKVE

SEQ ID NO: 6900 - protein, 2087 aa, synthetic construct
MPAAKRVKLDGGDKKYSIGLDIGTNSVGWAVITDEYKVPSKKFKVLGNTDRHSIKKNLIGALLFDSGETAEATRLKRTARRRYTRRKNRICYLQEIFSNEMAKVDDSFFHRLEESFLVEEDKKHERHPIFGNIVDEVAYHEKYPTIYHLRKKLVDSTDKADLRLIYLALAHMIKFRGHFLIEGDLNPDNSDVDKLFIQLVQTYNQLFEENPINASGVDAKAILSARLSKSRRLENLIAQLPGEKKNGLFGNLIALSLGLTPNFKSNFDLAEDAKLQLSKDTYDDDLDNLLAQIGDQYADLFLAAKNLSDAILLSDILRVNTEITKAPLSASMIKRYDEHHQDLTLLKALVRQQLPEKYKEIFFDQSKNGYAGYIDGGASQEEFYKFIKPILEKMDGTEELLVKLNREDLLRKQRTFDNGSIPHQIHLGELHAILRRQEDFYPFLKDNREKIEKILTFRIPYYVGPLARGNSRFAWMTRKSEETITPWNFEEVVDKGASAQSFIERMTNFDKNLPNEKVLPKHSLLYEYFTVYNELTKVKYVTEGMRKPAFLSGEQKKAIVDLLFKTNRKVTVKQLKEDYFKKIECFDSVEISGVEDRFNASLGTYHDLLKIIKDKDFLDNEENEDILEDIVLTLTLFEDREMIEERLKTYAHLFDDKVMKQLKRRRYTGWGRLSRKLINGIRDKQSGKTILDFLKSDGFANRNFMQLIHDDSLTFKEDIQKAQVSGQGDSLHEHIANLAGSPAIKKGILQTVKVVDELVKVMGRHKPENIVIEMARENQTTQKGQKNSRERMKRIEEGIKELGSQILKEHPVENTQLQNEKLYLYYLQNGRDMYVDQELDINRLSDYDVDHIVPQSFLKDDSIDNKVLTRSDKARGKSDNVPSEEVVKKMKNYWRQLLNAKLITQRKFDNLTKAERGGLSELDKAGFIKRQLVETRQITKHVAQILDSRMNTKYDENDKLIREVKVITLKSKLVSDFRKDFQFYKVREINNYHHAHDAYLNAVVGTALIKKYPKLESEFVYGDYKVYDVRKMIAKSEQEIGKATAKYFFYSNIMNFFKTEITLANGEIRKRPLIETNGETGEIVWDKGRDFATVRKVLSMPQVNIVKKTEVQTGGFSKESILPKRNSDKLIARKKDWDPKKYGGFDSPTVAYSVLVVAKVEKGKSKKLKSVKELLGITIMERSSFEKNPIDFLEAKGYKEVKKDLIIKLPKYSLFELENGRKRMLASAGELQKGNELALPSKYVNFLYLASHYEKLKGSPEDNEQKQLFVEQHKHYLDEIIEQISEFSKRVILADANLDKVLSAYNKHRDKPIREQAENIIHLFTLTNLGAPAAFKYFDTTIDRKRYTSTKEVLDATLIHQSITGLYETRIDLSQLGGDGGGGSEAAAKGGGGGVPWILKKPLELTIKLDLEEQQGTLLNNSILSKKGKEELKQLFEKYSALWQSWENQVGHRRIRPHKIATGTVKPTPQKQYHINPKAKPDIQIVINDLLKQGVLIQKESTMNTPVYPVPKPNGRWRMVLDYRAVNKVTPLIAVQNQHSYGILGSLFKGRYKTTIDLSNGFWAHPIVPEDYWITAFTWQGKQYCWTVLPQGFLNSPGLFTGDVVDLLQGIPNVEVYVDDVYISHDSEKEHLEYLDILFNRLKEAGYIISLKKSNIANSIVDFLGFQITNEGRGLTDTFKEKLENITAPTTLKQLQSILGLLNFARNFIPDFTELIAPLYALIPKSTKNYVPWQIEHSTTLETLITKLNGAEYLQGRKGDKTLIMKVNASYTTGYIRYYNEGEKKPISYVSIVFSKTELKFTELEKLLTTVHKGLLKALDLSMGQNIHVYSPIVSMQNIQKTPQTAKKALASRWLSWLSYLEDPRIRFFYDPQMPALKDLPAVDTGKDNKKHPSNFQHIFYTDGSAITSPTKEGHLNAGMGIVYFINKDGNLQKQQEWSISLGNHTAQFAEIAAFEFALKKCLPLGGNILVVTDSNYVAKAYNEELDVWASNGFVNNRKKPLKHISKWKSVADLKRLRPDVVVTHEPGHQKLDSSPHAYGNNLADQLATQASFKVHAGKRTADGSEFEKRTADGSEFESPKKKAKVE

SEQ ID NO: 6901 - protein, 2096 aa, synthetic construct
MPAAKRVKLDGGDKKYSIGLDIGTNSVGWAVITDEYKVPSKKFKVLGNTDRHSIKKNLIGALLFDSGETAEATRLKRTARRRYTRRKNRICYLQEIFSNEMAKVDDSFFHRLEESFLVEEDKKHERHPIFGNIVDEVAYHEKYPTIYHLRKKLVDSTDKADLRLIYLALAHMIKFRGHFLIEGDLNPDNSDVDKLFIQLVQTYNQLFEENPINASGVDAKAILSARLSKSRRLENLIAQLPGEKKNGLFGNLIALSLGLTPNFKSNFDLAEDAKLQLSKDTYDDDLDNLLAQIGDQYADLFLAAKNLSDAILLSDILRVNTEITKAPLSASMIKRYDEHHQDLTLLKALVRQQLPEKYKEIFFDQSKNGYAGYIDGGASQEEFYKFIKPILEKMDGTEELLVKLNREDLLRKQRTFDNGSIPHQIHLGELHAILRRQEDFYPFLKDNREKIEKILTFRIPYYVGPLARGNSRFAWMTRKSEETITPWNFEEVVDKGASAQSFIERMTNFDKNLPNEKVLPKHSLLYEYFTVYNELTKVKYVTEGMRKPAFLSGEQKKAIVDLLFKTNRKVTVKQLKEDYFKKIECFDSVEISGVEDRFNASLGTYHDLLKIIKDKDFLDNEENEDILEDIVLTLTLFEDREMIEERLKTYAHLFDDKVMKQLKRRRYTGWGRLSRKLINGIRDKQSGKTILDFLKSDGFANRNFMQLIHDDSLTFKEDIQKAQVSGQGDSLHEHIANLAGSPAIKKGILQTVKVVDELVKVMGRHKPENIVIEMARENQTTQKGQKNSRERMKRIEEGIKELGSQILKEHPVENTQLQNEKLYLYYLQNGRDMYVDQELDINRLSDYDVDHIVPQSFLKDDSIDNKVLTRSDKARGKSDNVPSEEVVKKMKNYWRQLLNAKLITQRKFDNLTKAERGGLSELDKAGFIKRQLVETRQITKHVAQILDSRMNTKYDENDKLIREVKVITLKSKLVSDFRKDFQFYKVREINNYHHAHDAYLNAVVGTALIKKYPKLESEFVYGDYKVYDVRKMIAKSEQEIGKATAKYFFYSNIMNFFKTEITLANGEIRKRPLIETNGETGEIVWDKGRDFATVRKVLSMPQVNIVKKTEVQTGGFSKESILPKRNSDKLIARKKDWDPKKYGGFDSPTVAYSVLVVAKVEKGKSKKLKSVKELLGITIMERSSFEKNPIDFLEAKGYKEVKKDLIIKLPKYSLFELENGRKRMLASAGELQKGNELALPSKYVNFLYLASHYEKLKGSPEDNEQKQLFVEQHKHYLDEIIEQISEFSKRVILADANLDKVLSAYNKHRDKPIREQAENIIHLFTLTNLGAPAAFKYFDTTIDRKRYTSTKEVLDATLIHQSITGLYETRIDLSQLGGDGGGGSEAAAKGGGGGTLNLEDEYRLYETSAEPEVSPGSTWLSDFPQAWAETGGMGLAVRQAPLIIPLKATSTPVSIKQYPMSQEAKLGIKPHIQRLLDQGILVPCQSPWNTPLLPVKKPGTNDYRPVQDLREVNKRVEDIHPTVPNPYNLLSGLPPSHRWYTVLDLKDAFFCLRLHPTSQPLFAFEWRDPGMGISGQLTWTRLPQGFKNSPTLFNEALHRDLADFRIQHPDLILLQYVDDILLAATSELDCQQGTRALLLTLGNLGYRASAKKAQLCQKQVKYLGYLLKEGQRWLTEARKETVMGQPTPKTPRQLREFLGTAGFCRLWIPGFAEMAAPLYPLTKPGTLFNWGPDQQKAYQEIKQALLTAPALGLPDLTKPFELFVDEKQGYAKGVLTQKLGPWRRPVAYLSKKLDPVAAGWPPCLRMVAAIAVLRKDAGKLTMGQPLVILAPHAVEALVKQPPDRWLSNARMTHYQAMLLDTDRVQFGPVVALNPATLLPLPEEGAPHDCLEILAETHGTRPDLTDQPIPDADHTWYTDGSSFLQEGQRKAGAAVTTETEVIWARALPAGTSAQRAELIALTQALKMAEGKRLNVYTDSRYAFATAHIHGEIYRRRGWLTSEGREIKNKSEILALLKALFLPKRLSIIHCLGHQKGDSAEARGNRLADQAAREAAIKTPPDTSTLLAGKRTADGSEFEKRTADGSEFESPKKKAKVE

SEQ ID NO: 6902 - protein, 2096 aa, synthetic construct
MPAAKRVKLDGGDKKYSIGLDIGTNSVGWAVITDEYKVPSKKFKVLGNTDRHSIKKNLIGALLFDSGETAEATRLKRTARRRYTRRKNRICYLQEIFSNEMAKVDDSFFHRLEESFLVEEDKKHERHPIFGNIVDEVAYHEKYPTIYHLRKKLVDSTDKADLRLIYLALAHMIKFRGHFLIEGDLNPDNSDVDKLFIQLVQTYNQLFEENPINASGVDAKAILSARLSKSRRLENLIAQLPGEKKNGLFGNLIALSLGLTPNFKSNFDLAEDAKLQLSKDTYDDDLDNLLAQIGDQYADLFLAAKNLSDAILLSDILRVNTEITKAPLSASMIKRYDEHHQDLTLLKALVRQQLPEKYKEIFFDQSKNGYAGYIDGGASQEEFYKFIKPILEKMDGTEELLVKLNREDLLRKQRTFDNGSIPHQIHLGELHAILRRQEDFYPFLKDNREKIEKILTFRIPYYVGPLARGNSRFAWMTRKSEETITPWNFEEVVDKGASAQSFIERMTNFDKNLPNEKVLPKHSLLYEYFTVYNELTKVKYVTEGMRKPAFLSGEQKKAIVDLLFKTNRKVTVKQLKEDYFKKIECFDSVEISGVEDRFNASLGTYHDLLKIIKDKDFLDNEENEDILEDIVLTLTLFEDREMIEERLKTYAHLFDDKVMKQLKRRRYTGWGRLSRKLINGIRDKQSGKTILDFLKSDGFANRNFMQLIHDDSLTFKEDIQKAQVSGQGDSLHEHIANLAGSPAIKKGILQTVKVVDELVKVMGRHKPENIVIEMARENQTTQKGQKNSRERMKRIEEGIKELGSQILKEHPVENTQLQNEKLYLYYLQNGRDMYVDQELDINRLSDYDVDHIVPQSFLKDDSIDNKVLTRSDKARGKSDNVPSEEVVKKMKNYWRQLLNAKLITQRKFDNLTKAERGGLSELDKAGFIKRQLVETRQITKHVAQILDSRMNTKYDENDKLIREVKVITLKSKLVSDFRKDFQFYKVREINNYHHAHDAYLNAVVGTALIKKYPKLESEFVYGDYKVYDVRKMIAKSEQEIGKATAKYFFYSNIMNFFKTEITLANGEIRKRPLIETNGETGEIVWDKGRDFATVRKVLSMPQVNIVKKTEVQTGGFSKESILPKRNSDKLIARKKDWDPKKYGGFDSPTVAYSVLVVAKVEKGKSKKLKSVKELLGITIMERSSFEKNPIDFLEAKGYKEVKKDLIIKLPKYSLFELENGRKRMLASAGELQKGNELALPSKYVNFLYLASHYEKLKGSPEDNEQKQLFVEQHKHYLDEIIEQISEFSKRVILADANLDKVLSAYNKHRDKPIREQAENIIHLFTLTNLGAPAAFKYFDTTIDRKRYTSTKEVLDATLIHQSITGLYETRIDLSQLGGDGGGGSEAAAKGGGGGTLNIEDEYRLHETSKGPDVPLGSTWLSDFPQAWAETGGMGLAVRQAPLIIPLKATSTPVSIKQYPMSQEARLGIKPHIQRLLDQGILVPCQSPWNTPLLPVKKPGTNDYRPVQDLREVNKRVEDIHPTVPNPYNLLSGLPPSHQWYTVLDLKDAFFCLRLHPTSQSLFAFEWRDPEMGISGQLTWTRLPQGFKNSPTLFNEALHRDLADFRIQHPDLILLQYVDDLLLAATSELDCQQGTRALLQTLGDLGYRASAKKAQICQKQVKYLGYLLKEGQRWLTEARKETVMGQPTPKTPRQLREFLGTAGFCRLWIPGFAEMAAPLYPLTKPGTLFEWGPDQQKAYQEIKQALLTAPALGLPDLTKPFELFVDEKQGYAKGVLTQKLGPWRRPVAYLSKKLDPVAAGWPPCLRMVAAIAVLTKDAGKLTMGQPLVILAPHAVEALVKQPPDRWLSNARMTHYQALLLDTDRVQFGPIVALNPATLLPLPEEGLQHDCLDILAEAHGTRPDLTDQPLPDADHTWYTDGSSFLQEGQRKAGAAVTTETEVVWAKALPAGTSAQRAELIALTQALKMAEGKKLNVYTDSRYAFATAHIHGEIYRRRGWLTSEGKEIKNKDEILALLKALFLPKRLSIIHCPGHQKGNRAEARGNRMADQAAREVATRETPETSTLLAGKRTADGSEFEKRTADGSEFESPKKKAKVE

SEQ ID NO: 6903 - protein, 2096 aa, synthetic construct
MPAAKRVKLDGGDKKYSIGLDIGTNSVGWAVITDEYKVPSKKFKVLGNTDRHSIKKNLIGALLFDSGETAEATRLKRTARRRYTRRKNRICYLQEIFSNEMAKVDDSFFHRLEESFLVEEDKKHERHPIFGNIVDEVAYHEKYPTIYHLRKKLVDSTDKADLRLIYLALAHMIKFRGHFLIEGDLNPDNSDVDKLFIQLVQTYNQLFEENPINASGVDAKAILSARLSKSRRLENLIAQLPGEKKNGLFGNLIALSLGLTPNFKSNFDLAEDAKLQLSKDTYDDDLDNLLAQIGDQYADLFLAAKNLSDAILLSDILRVNTEITKAPLSASMIKRYDEHHQDLTLLKALVRQQLPEKYKEIFFDQSKNGYAGYIDGGASQEEFYKFIKPILEKMDGTEELLVKLNREDLLRKQRTFDNGSIPHQIHLGELHAILRRQEDFYPFLKDNREKIEKILTFRIPYYVGPLARGNSRFAWMTRKSEETITPWNFEEVVDKGASAQSFIERMTNFDKNLPNEKVLPKHSLLYEYFTVYNELTKVKYVTEGMRKPAFLSGEQKKAIVDLLFKTNRKVTVKQLKEDYFKKIECFDSVEISGVEDRFNASLGTYHDLLKIIKDKDFLDNEENEDILEDIVLTLTLFEDREMIEERLKTYAHLFDDKVMKQLKRRRYTGWGRLSRKLINGIRDKQSGKTILDFLKSDGFANRNFMQLIHDDSLTFKEDIQKAQVSGQGDSLHEHIANLAGSPAIKKGILQTVKVVDELVKVMGRHKPENIVIEMARENQTTQKGQKNSRERMKRIEEGIKELGSQILKEHPVENTQLQNEKLYLYYLQNGRDMYVDQELDINRLSDYDVDHIVPQSFLKDDSIDNKVLTRSDKARGKSDNVPSEEVVKKMKNYWRQLLNAKLITQRKFDNLTKAERGGLSELDKAGFIKRQLVETRQITKHVAQILDSRMNTKYDENDKLIREVKVITLKSKLVSDFRKDFQFYKVREINNYHHAHDAYLNAVVGTALIKKYPKLESEFVYGDYKVYDVRKMIAKSEQEIGKATAKYFFYSNIMNFFKTEITLANGEIRKRPLIETNGETGEIVWDKGRDFATVRKVLSMPQVNIVKKTEVQTGGFSKESILPKRNSDKLIARKKDWDPKKYGGFDSPTVAYSVLVVAKVEKGKSKKLKSVKELLGITIMERSSFEKNPIDFLEAKGYKEVKKDLIIKLPKYSLFELENGRKRMLASAGELQKGNELALPSKYVNFLYLASHYEKLKGSPEDNEQKQLFVEQHKHYLDEIIEQISEFSKRVILADANLDKVLSAYNKHRDKPIREQAENIIHLFTLTNLGAPAAFKYFDTTIDRKRYTSTKEVLDATLIHQSITGLYETRIDLSQLGGDGGGGSEAAAKGGGGGTLNIEDEYRLHEISTEPDVSPGSTWLSDFPQAWAETGGMGLAVRQAPLIIPLKATSTPVSIKQYPMSQEAKLGIKPHIQRLLDQGILVPCQSPWNTPLLPVKKPGTNDYRPVQGLREVNKRVEDIHPTVPNPYNLLSGLPTSHRWYTVLDLKDAFFCLRLHPTSQPLFASEWRDPGMGISGQLTWTRLPQGFKNSPTLFNEALHRGLADFRIQHPDLILLQYVDDLLLAATSELDCQQGTRALLKTLGNLGYRASAKKAQICQKQVKYLGYLLREGQRWLTEARKETVMGQPTPKTPRQLREFLGTAGFCRLWIPRFAEMAAPLYPLTKPGTLFNWGPDQQKAYHEIKQALLTAPALGLPDLTKPFELFVDEKQGYAKGVLTQKLGPWRRPVAYLSKKLDPVAAGWPPCLRMVAAIAVLTKDAGKLTMGQPLVILAPHAVEALVKQPPDRWLSNARMTHYQAMLLDTDRVQFGPVVALNPATLLPLPEEGAPHDCLEILAETHGTEPDLTDQPIPDADHTWYTDGSSFLQEGQRKAGAAVTTETEVIWARALPAGTSAQRAELIALTQALKMAEGKRLNVYTDSRYAFATAHIHGEIYKRRGWLTSEGREIKNKSEILALLKALFLPKRLSIIHCLGHQKGDSAEARGNRLADQAAREAAIKTPPDTSTLLAGKRTADGSEFEKRTADGSEFESPKKKAKVE

SEQ ID NO: 6904 - protein, 2090 aa, synthetic construct
MPAAKRVKLDGGDKKYSIGLDIGTNSVGWAVITDEYKVPSKKFKVLGNTDRHSIKKNLIGALLFDSGETAEATRLKRTARRRYTRRKNRICYLQEIFSNEMAKVDDSFFHRLEESFLVEEDKKHERHPIFGNIVDEVAYHEKYPTIYHLRKKLVDSTDKADLRLIYLALAHMIKFRGHFLIEGDLNPDNSDVDKLFIQLVQTYNQLFEENPINASGVDAKAILSARLSKSRRLENLIAQLPGEKKNGLFGNLIALSLGLTPNFKSNFDLAEDAKLQLSKDTYDDDLDNLLAQIGDQYADLFLAAKNLSDAILLSDILRVNTEITKAPLSASMIKRYDEHHQDLTLLKALVRQQLPEKYKEIFFDQSKNGYAGYIDGGASQEEFYKFIKPILEKMDGTEELLVKLNREDLLRKQRTFDNGSIPHQIHLGELHAILRRQEDFYPFLKDNREKIEKILTFRIPYYVGPLARGNSRFAWMTRKSEETITPWNFEEVVDKGASAQSFIERMTNFDKNLPNEKVLPKHSLLYEYFTVYNELTKVKYVTEGMRKPAFLSGEQKKAIVDLLFKTNRKVTVKQLKEDYFKKIECFDSVEISGVEDRFNASLGTYHDLLKIIKDKDFLDNEENEDILEDIVLTLTLFEDREMIEERLKTYAHLFDDKVMKQLKRRRYTGWGRLSRKLINGIRDKQSGKTILDFLKSDGFANRNFMQLIHDDSLTFKEDIQKAQVSGQGDSLHEHIANLAGSPAIKKGILQTVKVVDELVKVMGRHKPENIVIEMARENQTTQKGQKNSRERMKRIEEGIKELGSQILKEHPVENTQLQNEKLYLYYLQNGRDMYVDQELDINRLSDYDVDHIVPQSFLKDDSIDNKVLTRSDKARGKSDNVPSEEVVKKMKNYWRQLLNAKLITQRKFDNLTKAERGGLSELDKAGFIKRQLVETRQITKHVAQILDSRMNTKYDENDKLIREVKVITLKSKLVSDFRKDFQFYKVREINNYHHAHDAYLNAVVGTALIKKYPKLESEFVYGDYKVYDVRKMIAKSEQEIGKATAKYFFYSNIMNFFKTEITLANGEIRKRPLIETNGETGEIVWDKGRDFATVRKVLSMPQVNIVKKTEVQTGGFSKESILPKRNSDKLIARKKDWDPKKYGGFDSPTVAYSVLVVAKVEKGKSKKLKSVKELLGITIMERSSFEKNPIDFLEAKGYKEVKKDLIIKLPKYSLFELENGRKRMLASAGELQKGNELALPSKYVNFLYLASHYEKLKGSPEDNEQKQLFVEQHKHYLDEIIEQISEFSKRVILADANLDKVLSAYNKHRDKPIREQAENIIHLFTLTNLGAPAAFKYFDTTIDRKRYTSTKEVLDATLIHQSITGLYETRIDLSQLGGDGGGGSEAAAKGGGGGTLQLDDEYRLYSPLVKPDQNIQFWLEQFPQAWAETAGMGLAKQVPPQVIQLKASATPVSVRQYPLSKEAQEGIRPHVQRLIQQGILVPVQSPWNTPLLPVRKPGTNDYRPVQDLREVNKRVQDIHPTVPNPYNLLCALPPQRSWYTVLDLKDAFFCLRLHPTSQPLFAFEWRDPGTGRTGQLTWTRLPQGFKNSPTIFDEALHRDLANFRIQHPQVTLLQYVDDLLLAGATKQDCLEGTKALLLELSDLGYRASAKKAQICRREVTYLGYSLRDGQRWLTEARKKTVVQIPAPTTAKQVREFLGTAGFCRLWIPGFATLAAPLYPLTKEKGEFSWAPEHQKAFDAIKKALLSAPALALPDVTKPFTLYVDERKGVARGVLTQTLGPWRRPVAYLSKKLDPVASGWPVCLKAIAAVAILVKDADKLTLGQNITVIAPHALENIVRQPPDRWMTNARMTHYQSLLLTERVTFAPPAALNPATLLPEETDEPVTHDCHQLLIEETGVRKDLTDIPLTGEVLTWFTDGSSYVVEGKRMAGAAVVDGTRTIWASSLPEGTSAQKAELMALTQALRLAEGKSINIYTDSRYAFATAHVHGAIYKQRGLLTSAGREIKNKEEILSLLEALHLPKRLAIIHCPGHQKAKDPISRGNQMADRVAKQAAQGVNLLAGKRTADGSEFEKRTADGSEFESPKKKAKVE

SEQ ID NO: 6905 - protein, 2096 aa, synthetic construct
MPAAKRVKLDGGDKKYSIGLDIGTNSVGWAVITDEYKVPSKKFKVLGNTDRHSIKKNLIGALLFDSGETAEATRLKRTARRRYTRRKNRICYLQEIFSNEMAKVDDSFFHRLEESFLVEEDKKHERHPIFGNIVDEVAYHEKYPTIYHLRKKLVDSTDKADLRLIYLALAHMIKFRGHFLIEGDLNPDNSDVDKLFIQLVQTYNQLFEENPINASGVDAKAILSARLSKSRRLENLIAQLPGEKKNGLFGNLIALSLGLTPNFKSNFDLAEDAKLQLSKDTYDDDLDNLLAQIGDQYADLFLAAKNLSDAILLSDILRVNTEITKAPLSASMIKRYDEHHQDLTLLKALVRQQLPEKYKEIFFDQSKNGYAGYIDGGASQEEFYKFIKPILEKMDGTEELLVKLNREDLLRKQRTFDNGSIPHQIHLGELHAILRRQEDFYPFLKDNREKIEKILTFRIPYYVGPLARGNSRFAWMTRKSEETITPWNFEEVVDKGASAQSFIERMTNFDKNLPNEKVLPKHSLLYEYFTVYNELTKVKYVTEGMRKPAFLSGEQKKAIVDLLFKTNRKVTVKQLKEDYFKKIECFDSVEISGVEDRFNASLGTYHDLLKIIKDKDFLDNEENEDILEDIVLTLTLFEDREMIEERLKTYAHLFDDKVMKQLKRRRYTGWGRLSRKLINGIRDKQSGKTILDFLKSDGFANRNFMQLIHDDSLTFKEDIQKAQVSGQGDSLHEHIANLAGSPAIKKGILQTVKVVDELVKVMGRHKPENIVIEMARENQTTQKGQKNSRERMKRIEEGIKELGSQILKEHPVENTQLQNEKLYLYYLQNGRDMYVDQELDINRLSDYDVDHIVPQSFLKDDSIDNKVLTRSDKARGKSDNVPSEEVVKKMKNYWRQLLNAKLITQRKFDNLTKAERGGLSELDKAGFIKRQLVETRQITKHVAQILDSRMNTKYDENDKLIREVKVITLKSKLVSDFRKDFQFYKVREINNYHHAHDAYLNAVVGTALIKKYPKLESEFVYGDYKVYDVRKMIAKSEQEIGKATAKYFFYSNIMNFFKTEITLANGEIRKRPLIETNGETGEIVWDKGRDFATVRKVLSMPQVNIVKKTEVQTGGFSKESILPKRNSDKLIARKKDWDPKKYGGFDSPTVAYSVLVVAKVEKGKSKKLKSVKELLGITIMERSSFEKNPIDFLEAKGYKEVKKDLIIKLPKYSLFELENGRKRMLASAGELQKGNELALPSKYVNFLYLASHYEKLKGSPEDNEQKQLFVEQHKHYLDEIIEQISEFSKRVILADANLDKVLSAYNKHRDKPIREQAENIIHLFTLTNLGAPAAFKYFDTTIDRKRYTSTKEVLDATLIHQSITGLYETRIDLSQLGGDGGGGSEAAAKGGGGGTLNIEDEYRLHETSKEPDVPLGSTWLSDFPQAWAETGGMGLAVRQAPLIIPLKATSTPVSIKQYPMSQEARLGIKPHIQRLLDQGILVPCQSPWNTPLLPVKKPGTNDYRPVQDLREVNKRVEDIHPTVPNPYNLLSGLPPSHQWYTVLDLKDAFFCLRLHPTSQPLFAFEWRDPEMGISGQLTWTRLPQGFKNSPTLFDEALHRDLADFRIQHPDLILLQYVDDLLLAATSEQDCQRGTRALLQTLGNLGYRASAKKAQICQKQVKYLGYLLKEGQRWLTEARKETVMGQPTPKTPRQLREFLGTAGFCRLWIPGFAEMAAPLYPLTKTGTLFNWGPDQQKAYQEIKQALLTAPALGLPDLTKPFELFVDEKQGYAKGVLTQKLGPWRRPVAYLSKKLDPVAAGWPPCLRMVAAIAVLTKDAGKLTMGQPLVILAPHAVEALVKQPPDRWLSNARMTHYQAMLLDTDRVQFGPVVALNPATLLPLPEKEAPHDCLEILAETHGTRPDLTDQPIPDADYTWYTDGSSFLQEGQRRAGAAVTTETEVIWARALPAGTSAQRAELIALTQALKMAEGKKLNVYTDSRYAFATAHVHGEIYRRRGLLTSEGREIKNKNEILALLKALFLPKRLSIIHCPGHQKGNSAEARGNRMADQAAREAAMKAVLETSTLLAGKRTADGSEFEKRTADGSEFESPKKKAKVE

SEQ ID NO: 6906 - protein, 2096 aa, synthetic construct
MPAAKRVKLDGGDKKYSIGLDIGTNSVGWAVITDEYKVPSKKFKVLGNTDRHSIKKNLIGALLFDSGETAEATRLKRTARRRYTRRKNRICYLQEIFSNEMAKVDDSFFHRLEESFLVEEDKKHERHPIFGNIVDEVAYHEKYPTIYHLRKKLVDSTDKADLRLIYLALAHMIKFRGHFLIEGDLNPDNSDVDKLFIQLVQTYNQLFEENPINASGVDAKAILSARLSKSRRLENLIAQLPGEKKNGLFGNLIALSLGLTPNFKSNFDLAEDAKLQLSKDTYDDDLDNLLAQIGDQYADLFLAAKNLSDAILLSDILRVNTEITKAPLSASMIKRYDEHHQDLTLLKALVRQQLPEKYKEIFFDQSKNGYAGYIDGGASQEEFYKFIKPILEKMDGTEELLVKLNREDLLRKQRTFDNGSIPHQIHLGELHAILRRQEDFYPFLKDNREKIEKILTFRIPYYVGPLARGNSRFAWMTRKSEETITPWNFEEVVDKGASAQSFIERMTNFDKNLPNEKVLPKHSLLYEYFTVYNELTKVKYVTEGMRKPAFLSGEQKKAIVDLLFKTNRKVTVKQLKEDYFKKIECFDSVEISGVEDRFNASLGTYHDLLKIIKDKDFLDNEENEDILEDIVLTLTLFEDREMIEERLKTYAHLFDDKVMKQLKRRRYTGWGRLSRKLINGIRDKQSGKTILDFLKSDGFANRNFMQLIHDDSLTFKEDIQKAQVSGQGDSLHEHIANLAGSPAIKKGILQTVKVVDELVKVMGRHKPENIVIEMARENQTTQKGQKNSRERMKRIEEGIKELGSQILKEHPVENTQLQNEKLYLYYLQNGRDMYVDQELDINRLSDYDVDHIVPQSFLKDDSIDNKVLTRSDKARGKSDNVPSEEVVKKMKNYWRQLLNAKLITQRKFDNLTKAERGGLSELDKAGFIKRQLVETRQITKHVAQILDSRMNTKYDENDKLIREVKVITLKSKLVSDFRKDFQFYKVREINNYHHAHDAYLNAVVGTALIKKYPKLESEFVYGDYKVYDVRKMIAKSEQEIGKATAKYFFYSNIMNFFKTEITLANGEIRKRPLIETNGETGEIVWDKGRDFATVRKVLSMPQVNIVKKTEVQTGGFSKESILPKRNSDKLIARKKDWDPKKYGGFDSPTVAYSVLVVAKVEKGKSKKLKSVKELLGITIMERSSFEKNPIDFLEAKGYKEVKKDLIIKLPKYSLFELENGRKRMLASAGELQKGNELALPSKYVNFLYLASHYEKLKGSPEDNEQKQLFVEQHKHYLDEIIEQISEFSKRVILADANLDKVLSAYNKHRDKPIREQAENIIHLFTLTNLGAPAAFKYFDTTIDRKRYTSTKEVLDATLIHQSITGLYETRIDLSQLGGDGGGGSEAAAKGGGGGTLNIEDEYRLHETSKEPDVPLGSTWLSDFPQAWAETGGMGLAVRQAPLIIPLKATSTPVSIKQYPMSQEARLGIKPHIQRLLDQGILVPCQSPWNTPLLPVKKPGTNDYRPVQDLREVNKRVEDIHPTVPNPYNLLSGLPPSHQWYTVLDLKDAFFCLRLHPTSQPLFAFEWRDPEMGISGQLTWTRLPQGFKNSPTLFNEALHRDLADFRIQHPDLILLQYVDDLLLAATSEQDCQRGTRALLQTLGNLGYRASAKKAQICQKQVKYLGYLLKEGQRWLTEARKETVMGQPTPKTPRQLREFLGTAGFCRLWIPGFAEMAAPLYPLTKPGTLFNWGPDQQKAYQEIKQALLTAPALGLPDLTKPFELFVDEKQGYAKGVLTQKLGPWRRPVAYLSKKLDPVAAGWPPCLRMVAAIAVLTKDAGKLTMGQPLVILAPHAVEALVKQPPDRWLSNARMTHYQAMLLDTDRVQFGPVVALNPATLLPLPEKEAPHDCLEILAETHGTRPDLTDQPIPDADYTWYTDGSSFLQEGQRRAGAAVTTETEVIWARALPAGTSAQRAELIALTQALKMAEGKKLNVYTDSRYAFATAHVHGEIYRRRGWLTSEGREIKNKNEILALLKALFLPKRLSIIHCPGHQKGNSAEARGNRMADQAAREAAMKAVLETSTLLAGKRTADGSEFEKRTADGSEFESPKKKAKVE

SEQ ID NO: 6907 - protein, 2098 aa, synthetic construct
MPAAKRVKLDGGDKKYSIGLDIGTNSVGWAVITDEYKVPSKKFKVLGNTDRHSIKKNLIGALLFDSGETAEATRLKRTARRRYTRRKNRICYLQEIFSNEMAKVDDSFFHRLEESFLVEEDKKHERHPIFGNIVDEVAYHEKYPTIYHLRKKLVDSTDKADLRLIYLALAHMIKFRGHFLIEGDLNPDNSDVDKLFIQLVQTYNQLFEENPINASGVDAKAILSARLSKSRRLENLIAQLPGEKKNGLFGNLIALSLGLTPNFKSNFDLAEDAKLQLSKDTYDDDLDNLLAQIGDQYADLFLAAKNLSDAILLSDILRVNTEITKAPLSASMIKRYDEHHQDLTLLKALVRQQLPEKYKEIFFDQSKNGYAGYIDGGASQEEFYKFIKPILEKMDGTEELLVKLNREDLLRKQRTFDNGSIPHQIHLGELHAILRRQEDFYPFLKDNREKIEKILTFRIPYYVGPLARGNSRFAWMTRKSEETITPWNFEEVVDKGASAQSFIERMTNFDKNLPNEKVLPKHSLLYEYFTVYNELTKVKYVTEGMRKPAFLSGEQKKAIVDLLFKTNRKVTVKQLKEDYFKKIECFDSVEISGVEDRFNASLGTYHDLLKIIKDKDFLDNEENEDILEDIVLTLTLFEDREMIEERLKTYAHLFDDKVMKQLKRRRYTGWGRLSRKLINGIRDKQSGKTILDFLKSDGFANRNFMQLIHDDSLTFKEDIQKAQVSGQGDSLHEHIANLAGSPAIKKGILQTVKVVDELVKVMGRHKPENIVIEMARENQTTQKGQKNSRERMKRIEEGIKELGSQILKEHPVENTQLQNEKLYLYYLQNGRDMYVDQELDINRLSDYDVDHIVPQSFLKDDSIDNKVLTRSDKARGKSDNVPSEEVVKKMKNYWRQLLNAKLITQRKFDNLTKAERGGLSELDKAGFIKRQLVETRQITKHVAQILDSRMNTKYDENDKLIREVKVITLKSKLVSDFRKDFQFYKVREINNYHHAHDAYLNAVVGTALIKKYPKLESEFVYGDYKVYDVRKMIAKSEQEIGKATAKYFFYSNIMNFFKTEITLANGEIRKRPLIETNGETGEIVWDKGRDFATVRKVLSMPQVNIVKKTEVQTGGFSKESILPKRNSDKLIARKKDWDPKKYGGFDSPTVAYSVLVVAKVEKGKSKKLKSVKELLGITIMERSSFEKNPIDFLEAKGYKEVKKDLIIKLPKYSLFELENGRKRMLASAGELQKGNELALPSKYVNFLYLASHYEKLKGSPEDNEQKQLFVEQHKHYLDEIIEQISEFSKRVILADANLDKVLSAYNKHRDKPIREQAENIIHLFTLTNLGAPAAFKYFDTTIDRKRYTSTKEVLDATLIHQSITGLYETRIDLSQLGGDGGGGGGGSEAAAKGGTAPLEEEYRLFLEAPIQNVTLLEQWKREIPKVWAEINPPGLASTQAPIHVQLLSTALPVRVRQYPITLEAKRSLRETIRKFRAAGILRPVHSPWNTPLLPVRKSGTSEYRMVQDLREVNKRVETIHPTVPNPYTLLSLLPPDRIWYSVLDLKDAFFCIPLAPESQLIFAFEWADAEEGESGQLTWTRLPQGFKNSPTLFDEALNRDLQGFRLDHPSVSLLQYVDDLLIAADTQAACLSATRDLLMTLAELGYRVSGKKAQLCQEEVTYLGFKIHKGSRSLSNSRTQAILQIPVPKTKRQVREFLGTIGYCRLWIPGFAELAQPLYAATRGGNDPLVWGEKEEEAFQSLKLALTQPPALALPSLDKPFQLFVEETSGAAKGVLTQALGPWKRPVAYLSKRLDPVAAGWPRCLRAIAAAALLTREASKLTFGQDIEITSSHNLESLLRSPPDKWLTNARITQYQVLLLDPPRVRFKQTAALNPATLLPETDDTLPIHHCLDTLDSLTSTRPDLTDQPLAQAEATLFTDGSSYIRDGKRYAGAAVVTLDSVIWAEPLPIGTSAQKAELIALTKALEWSKDKSVNIYTDSRYAFATLHVHGMIYRERGLLTAGGKAIKNAPEILALLTAVWLPKRVAVMHCKGHQKDDAPTSTGNRRADEVAREVAIRPLSTQATISAGKRTADGSEFEKRTADGSEFESPKKKAKVE

SEQ ID NO: 6908 - protein, 2098 aa, synthetic construct
MPAAKRVKLDGGDKKYSIGLDIGTNSVGWAVITDEYKVPSKKFKVLGNTDRHSIKKNLIGALLFDSGETAEATRLKRTARRRYTRRKNRICYLQEIFSNEMAKVDDSFFHRLEESFLVEEDKKHERHPIFGNIVDEVAYHEKYPTIYHLRKKLVDSTDKADLRLIYLALAHMIKFRGHFLIEGDLNPDNSDVDKLFIQLVQTYNQLFEENPINASGVDAKAILSARLSKSRRLENLIAQLPGEKKNGLFGNLIALSLGLTPNFKSNFDLAEDAKLQLSKDTYDDDLDNLLAQIGDQYADLFLAAKNLSDAILLSDILRVNTEITKAPLSASMIKRYDEHHQDLTLLKALVRQQLPEKYKEIFFDQSKNGYAGYIDGGASQEEFYKFIKPILEKMDGTEELLVKLNREDLLRKQRTFDNGSIPHQIHLGELHAILRRQEDFYPFLKDNREKIEKILTFRIPYYVGPLARGNSRFAWMTRKSEETITPWNFEEVVDKGASAQSFIERMTNFDKNLPNEKVLPKHSLLYEYFTVYNELTKVKYVTEGMRKPAFLSGEQKKAIVDLLFKTNRKVTVKQLKEDYFKKIECFDSVEISGVEDRFNASLGTYHDLLKIIKDKDFLDNEENEDILEDIVLTLTLFEDREMIEERLKTYAHLFDDKVMKQLKRRRYTGWGRLSRKLINGIRDKQSGKTILDFLKSDGFANRNFMQLIHDDSLTFKEDIQKAQVSGQGDSLHEHIANLAGSPAIKKGILQTVKVVDELVKVMGRHKPENIVIEMARENQTTQKGQKNSRERMKRIEEGIKELGSQILKEHPVENTQLQNEKLYLYYLQNGRDMYVDQELDINRLSDYDVDHIVPQSFLKDDSIDNKVLTRSDKARGKSDNVPSEEVVKKMKNYWRQLLNAKLITQRKFDNLTKAERGGLSELDKAGFIKRQLVETRQITKHVAQILDSRMNTKYDENDKLIREVKVITLKSKLVSDFRKDFQFYKVREINNYHHAHDAYLNAVVGTALIKKYPKLESEFVYGDYKVYDVRKMIAKSEQEIGKATAKYFFYSNIMNFFKTEITLANGEIRKRPLIETNGETGEIVWDKGRDFATVRKVLSMPQVNIVKKTEVQTGGFSKESILPKRNSDKLIARKKDWDPKKYGGFDSPTVAYSVLVVAKVEKGKSKKLKSVKELLGITIMERSSFEKNPIDFLEAKGYKEVKKDLIIKLPKYSLFELENGRKRMLASAGELQKGNELALPSKYVNFLYLASHYEKLKGSPEDNEQKQLFVEQHKHYLDEIIEQISEFSKRVILADANLDKVLSAYNKHRDKPIREQAENIIHLFTLTNLGAPAAFKYFDTTIDRKRYTSTKEVLDATLIHQSITGLYETRIDLSQLGGDGGGGGGGSEAAAKGGTAPLEEEYRLFLEAPIQNVTLLEQWKREIPKVWAEINPPGLASTQAPIHVQLLSTALPVRVRQYPITLEAKRSLRETIRKFRAAGILRPVHSPWNTPLLPVRKSGTSEYRMVQDLREVNKRVETIHPTVPNPYTLLSLLPPDRIWYSVLDLKDAFFCIPLAPESQLIFAFEWADAEEGESGQLTWTRLPQGFKNSPTLFNEALNRDLQGFRLDHPSVSLLQYVDDLLIAADTQAACLSATRDLLMTLAELGYRVSGKKAQLCQEEVTYLGFKIHKGSRSLSNSRTQAILQIPVPKTKRQVREFLGTIGYCRLWIPGFAELAQPLYAATRPGNDPLVWGEKEEEAFQSLKLALTQPPALALPSLDKPFQLFVEETSGAAKGVLTQALGPWKRPVAYLSKRLDPVAAGWPRCLRAIAAAALLTREASKLTFGQDIEITSSHNLESLLRSPPDKWLTNARITQYQVLLLDPPRVRFKQTAALNPATLLPETDDTLPIHHCLDTLDSLTSTRPDLTDQPLAQAEATLFTDGSSYIRDGKRYAGAAVVTLDSVIWAEPLPIGTSAQKAELIALTKALEWSKDKSVNIYTDSRYAFATLHVHGMIYRERGWLTAGGKAIKNAPEILALLTAVWLPKRVAVMHCKGHQKDDAPTSTGNRRADEVAREVAIRPLSTQATISAGKRTADGSEFEKRTADGSEFESPKKKAKVE

SEQ ID NO: 6909 - protein, 2102 aa, synthetic construct
MPAAKRVKLDGGDKKYSIGLDIGTNSVGWAVITDEYKVPSKKFKVLGNTDRHSIKKNLIGALLFDSGETAEATRLKRTARRRYTRRKNRICYLQEIFSNEMAKVDDSFFHRLEESFLVEEDKKHERHPIFGNIVDEVAYHEKYPTIYHLRKKLVDSTDKADLRLIYLALAHMIKFRGHFLIEGDLNPDNSDVDKLFIQLVQTYNQLFEENPINASGVDAKAILSARLSKSRRLENLIAQLPGEKKNGLFGNLIALSLGLTPNFKSNFDLAEDAKLQLSKDTYDDDLDNLLAQIGDQYADLFLAAKNLSDAILLSDILRVNTEITKAPLSASMIKRYDEHHQDLTLLKALVRQQLPEKYKEIFFDQSKNGYAGYIDGGASQEEFYKFIKPILEKMDGTEELLVKLNREDLLRKQRTFDNGSIPHQIHLGELHAILRRQEDFYPFLKDNREKIEKILTFRIPYYVGPLARGNSRFAWMTRKSEETITPWNFEEVVDKGASAQSFIERMTNFDKNLPNEKVLPKHSLLYEYFTVYNELTKVKYVTEGMRKPAFLSGEQKKAIVDLLFKTNRKVTVKQLKEDYFKKIECFDSVEISGVEDRFNASLGTYHDLLKIIKDKDFLDNEENEDILEDIVLTLTLFEDREMIEERLKTYAHLFDDKVMKQLKRRRYTGWGRLSRKLINGIRDKQSGKTILDFLKSDGFANRNFMQLIHDDSLTFKEDIQKAQVSGQGDSLHEHIANLAGSPAIKKGILQTVKVVDELVKVMGRHKPENIVIEMARENQTTQKGQKNSRERMKRIEEGIKELGSQILKEHPVENTQLQNEKLYLYYLQNGRDMYVDQELDINRLSDYDVDHIVPQSFLKDDSIDNKVLTRSDKARGKSDNVPSEEVVKKMKNYWRQLLNAKLITQRKFDNLTKAERGGLSELDKAGFIKRQLVETRQITKHVAQILDSRMNTKYDENDKLIREVKVITLKSKLVSDFRKDFQFYKVREINNYHHAHDAYLNAVVGTALIKKYPKLESEFVYGDYKVYDVRKMIAKSEQEIGKATAKYFFYSNIMNFFKTEITLANGEIRKRPLIETNGETGEIVWDKGRDFATVRKVLSMPQVNIVKKTEVQTGGFSKESILPKRNSDKLIARKKDWDPKKYGGFDSPTVAYSVLVVAKVEKGKSKKLKSVKELLGITIMERSSFEKNPIDFLEAKGYKEVKKDLIIKLPKYSLFELENGRKRMLASAGELQKGNELALPSKYVNFLYLASHYEKLKGSPEDNEQKQLFVEQHKHYLDEIIEQISEFSKRVILADANLDKVLSAYNKHRDKPIREQAENIIHLFTLTNLGAPAAFKYFDTTIDRKRYTSTKEVLDATLIHQSITGLYETRIDLSQLGGDGGGGGGGSEAAAKGGTVSLQDEHRLFDIPVTTSLPDVWLQDFPQAWAETGGLGRAKCQAPIIIDLKPTAVPVSIKQYPMSLEAHMGIRQHIIKFLELGVLRPCRSPWNTPLLPVKKPGTQDYRPVQDLREINKRTVDIHPTVPNPYNLLSTLKPDYSWYTVLDLKDAFFCLPLAPQSQELFAFEWKDPERGISGQLTWTRLPQGFKNSPTLFNEALHRDLTDFRTQHPEVTLLQYVDDLLLAAPTKKACTQGTRHLLQELGEKGYRASAKKAQICQTKVTYLGYILSEGKRWLTPGRIETVARIPPPRNPREVREFLGTAGFCRLWIPGFAELAAPLYALTKPSTPFTWQTEHQLAFEALKKALLSAPALGLPDTSKPFTLFLDERQGIAKGVLTQKLGPWKRPVAYLSKKLDPVAAGWPPCLRIMAATAMLVKDSAKLTLGQPLTVITPHTLEAIVRQPPDRWITNARLTHYQALLLDTDRVQFGPPVTLNPATLLPVPENQPSPHDCRQVLAETHGTREDLKDQELPDADHTWYTDGSSYLDSGTRRAGAAVVDGHNTIWAQSLPPGTSAQKAELIALTKALELSKGKKANIYTDSRYAFATAHTHGSIYERRGWLTSEGKEIKNKAEIIALLKALFLPQEVAIIHCPGHQKGQDPVAVGNRQADRVARQAAMAEVLTLATEPDNTSHITAGKRTADGSEFEKRTADGSEFESPKKKAKVE

SEQ ID NO: 6910 - protein, 2173 aa, synthetic construct
MPAAKRVKLDGGDKKYSIGLDIGTNSVGWAVITDEYKVPSKKFKVLGNTDRHSIKKNLIGALLFDSGETAEATRLKRTARRRYTRRKNRICYLQEIFSNEMAKVDDSFFHRLEESFLVEEDKKHERHPIFGNIVDEVAYHEKYPTIYHLRKKLVDSTDKADLRLIYLALAHMIKFRGHFLIEGDLNPDNSDVDKLFIQLVQTYNQLFEENPINASGVDAKAILSARLSKSRRLENLIAQLPGEKKNGLFGNLIALSLGLTPNFKSNFDLAEDAKLQLSKDTYDDDLDNLLAQIGDQYADLFLAAKNLSDAILLSDILRVNTEITKAPLSASMIKRYDEHHQDLTLLKALVRQQLPEKYKEIFFDQSKNGYAGYIDGGASQEEFYKFIKPILEKMDGTEELLVKLNREDLLRKQRTFDNGSIPHQIHLGELHAILRRQEDFYPFLKDNREKIEKILTFRIPYYVGPLARGNSRFAWMTRKSEETITPWNFEEVVDKGASAQSFIERMTNFDKNLPNEKVLPKHSLLYEYFTVYNELTKVKYVTEGMRKPAFLSGEQKKAIVDLLFKTNRKVTVKQLKEDYFKKIECFDSVEISGVEDRFNASLGTYHDLLKIIKDKDFLDNEENEDILEDIVLTLTLFEDREMIEERLKTYAHLFDDKVMKQLKRRRYTGWGRLSRKLINGIRDKQSGKTILDFLKSDGFANRNFMQLIHDDSLTFKEDIQKAQVSGQGDSLHEHIANLAGSPAIKKGILQTVKVVDELVKVMGRHKPENIVIEMARENQTTQKGQKNSRERMKRIEEGIKELGSQILKEHPVENTQLQNEKLYLYYLQNGRDMYVDQELDINRLSDYDVDHIVPQSFLKDDSIDNKVLTRSDKARGKSDNVPSEEVVKKMKNYWRQLLNAKLITQRKFDNLTKAERGGLSELDKAGFIKRQLVETRQITKHVAQILDSRMNTKYDENDKLIREVKVITLKSKLVSDFRKDFQFYKVREINNYHHAHDAYLNAVVGTALIKKYPKLESEFVYGDYKVYDVRKMIAKSEQEIGKATAKYFFYSNIMNFFKTEITLANGEIRKRPLIETNGETGEIVWDKGRDFATVRKVLSMPQVNIVKKTEVQTGGFSKESILPKRNSDKLIARKKDWDPKKYGGFDSPTVAYSVLVVAKVEKGKSKKLKSVKELLGITIMERSSFEKNPIDFLEAKGYKEVKKDLIIKLPKYSLFELENGRKRMLASAGELQKGNELALPSKYVNFLYLASHYEKLKGSPEDNEQKQLFVEQHKHYLDEIIEQISEFSKRVILADANLDKVLSAYNKHRDKPIREQAENIIHLFTLTNLGAPAAFKYFDTTIDRKRYTSTKEVLDATLIHQSITGLYETRIDLSQLGGDGGGGGGGSEAAAKGGMDLLKPLTVERKGVKIKGYWNSQADITCVPKDLLQGEEPVRQQNVTTIHGTQEGDVYYVNLKIDGRRINTEVIGTTLDYAIITPGDVPWILKKPLELTIKLDLEEQQGTLLNNSILSKKGKEELKQLFEKYSALWQSWENQVGHRRIRPHKIATGTVKPTPQKQYHINPKAKPDIQIVINDLLKQGVLIQKESTMNTPVYPVPKPNGRWRMVLDYRAVNKVTPLIAVQNQHSYGILGSLFKGRYKTTIDLSNGFWAHPIVPEDYWITAFTWQGKQYCWTVLPQGFLNSPGLFTGDVVDLLQGIPNVEVYVDDVYISHDSEKEHLEYLDILFNRLKEAGYIISLKKSNIANSIVDFLGFQITNEGRGLTDTFKEKLENITAPTTLKQLQSILGLLNFARNFIPDFTELIAPLYALIPKSTKNYVPWQIEHSTTLETLITKLNGAEYLQGRKGDKTLIMKVNASYTTGYIRYYNEGEKKPISYVSIVFSKTELKFTELEKLLTTVHKGLLKALDLSMGQNIHVYSPIVSMQNIQKTPQTAKKALASRWLSWLSYLEDPRIRFFYDPQMPALKDLPAVDTGKDNKKHPSNFQHIFYTDGSAITSPTKEGHLNAGMGIVYFINKDGNLQKQQEWSISLGNHTAQFAEIAAFEFALKKCLPLGGNILVVTDSNYVAKAYNEELDVWASNGFVNNRKKPLKHISKWKSVADLKRLRPDVVVTHEPGHQKLDSSPHAYGNNLADQLATQASFKVHAGKRTADGSEFEKRTADGSEFESPKKKAKVE

SEQ ID NO: 6911 - protein, 2095 aa, synthetic construct
MPAAKRVKLDGGDKKYSIGLDIGTNSVGWAVITDEYKVPSKKFKVLGNTDRHSIKKNLIGALLFDSGETAEATRLKRTARRRYTRRKNRICYLQEIFSNEMAKVDDSFFHRLEESFLVEEDKKHERHPIFGNIVDEVAYHEKYPTIYHLRKKLVDSTDKADLRLIYLALAHMIKFRGHFLIEGDLNPDNSDVDKLFIQLVQTYNQLFEENPINASGVDAKAILSARLSKSRRLENLIAQLPGEKKNGLFGNLIALSLGLTPNFKSNFDLAEDAKLQLSKDTYDDDLDNLLAQIGDQYADLFLAAKNLSDAILLSDILRVNTEITKAPLSASMIKRYDEHHQDLTLLKALVRQQLPEKYKEIFFDQSKNGYAGYIDGGASQEEFYKFIKPILEKMDGTEELLVKLNREDLLRKQRTFDNGSIPHQIHLGELHAILRRQEDFYPFLKDNREKIEKILTFRIPYYVGPLARGNSRFAWMTRKSEETITPWNFEEVVDKGASAQSFIERMTNFDKNLPNEKVLPKHSLLYEYFTVYNELTKVKYVTEGMRKPAFLSGEQKKAIVDLLFKTNRKVTVKQLKEDYFKKIECFDSVEISGVEDRFNASLGTYHDLLKIIKDKDFLDNEENEDILEDIVLTLTLFEDREMIEERLKTYAHLFDDKVMKQLKRRRYTGWGRLSRKLINGIRDKQSGKTILDFLKSDGFANRNFMQLIHDDSLTFKEDIQKAQVSGQGDSLHEHIANLAGSPAIKKGILQTVKVVDELVKVMGRHKPENIVIEMARENQTTQKGQKNSRERMKRIEEGIKELGSQILKEHPVENTQLQNEKLYLYYLQNGRDMYVDQELDINRLSDYDVDHIVPQSFLKDDSIDNKVLTRSDKARGKSDNVPSEEVVKKMKNYWRQLLNAKLITQRKFDNLTKAERGGLSELDKAGFIKRQLVETRQITKHVAQILDSRMNTKYDENDKLIREVKVITLKSKLVSDFRKDFQFYKVREINNYHHAHDAYLNAVVGTALIKKYPKLESEFVYGDYKVYDVRKMIAKSEQEIGKATAKYFFYSNIMNFFKTEITLANGEIRKRPLIETNGETGEIVWDKGRDFATVRKVLSMPQVNIVKKTEVQTGGFSKESILPKRNSDKLIARKKDWDPKKYGGFDSPTVAYSVLVVAKVEKGKSKKLKSVKELLGITIMERSSFEKNPIDFLEAKGYKEVKKDLIIKLPKYSLFELENGRKRMLASAGELQKGNELALPSKYVNFLYLASHYEKLKGSPEDNEQKQLFVEQHKHYLDEIIEQISEFSKRVILADANLDKVLSAYNKHRDKPIREQAENIIHLFTLTNLGAPAAFKYFDTTIDRKRYTSTKEVLDATLIHQSITGLYETRIDLSQLGGDGGGGGGGSEAAAKGGTLQLEEEYRLFEPESTQKQEMDIWLKNFPQAWAETGGMGTAHCQAPVLIQLKATATPISIRQYPMPHEAYQGIKPHIRRMLDQGILKPCQSPWNTPLLPVKKPGTEDYRPVQDLREVNKRVEDIHPTVPNPYNLLSTLPPSHPWYTVLDLKDAFFCLRLHSESQLLFAFEWRDPEIGLSGQLTWTRLPQGFKNSPTLFNEALHSDLADFRVRYPALVLLQYVDDLLLAAATRTECLEGTKALLETLGNKGYRASAKKAQICLQEVTYLGYSLKDGQRWLTKARKEAILSIPVPKNSRQVREFLGKAGYCRLFIPGFAELAAPLYPLTRPGTLFQWGTEQQLAFEDIKKALLSSPALGLPDITKPFELFIDENSGFAKGVLVQKLGPWKRPVAYLSKKLDTVASGWPPCLRMVAAIAILVKDAGKLTLGQPLTILTSHPVEALVRQPPNKWLSNARMTHYQAMLLDAERVHFGPTVSLNPATLLPLPSGGNHHDCLQILAETHGTRPDLTDQPLPDADLTWYTDGSSFIRNGEREAGAAVTTESEVIWAAPLPPGTSAQRAELIALTQALKMAEGKKLTVYTDSRYAFATTHVHGEIYRRRGWLTSEGKEIKNKNEILALLEALFLPKRLSIIHCPGHQKGDSPQAKGNRLADDTAKKAATETHSSLTVLPAGKRTADGSEFEKRTADGSEFESPKKKAKVE

SEQ ID NO: 6912 - protein, 2176 aa, synthetic construct
MPAAKRVKLDGGDKKYSIGLDIGTNSVGWAVITDEYKVPSKKFKVLGNTDRHSIKKNLIGALLFDSGETAEATRLKRTARRRYTRRKNRICYLQEIFSNEMAKVDDSFFHRLEESFLVEEDKKHERHPIFGNIVDEVAYHEKYPTIYHLRKKLVDSTDKADLRLIYLALAHMIKFRGHFLIEGDLNPDNSDVDKLFIQLVQTYNQLFEENPINASGVDAKAILSARLSKSRRLENLIAQLPGEKKNGLFGNLIALSLGLTPNFKSNFDLAEDAKLQLSKDTYDDDLDNLLAQIGDQYADLFLAAKNLSDAILLSDILRVNTEITKAPLSASMIKRYDEHHQDLTLLKALVRQQLPEKYKEIFFDQSKNGYAGYIDGGASQEEFYKFIKPILEKMDGTEELLVKLNREDLLRKQRTFDNGSIPHQIHLGELHAILRRQEDFYPFLKDNREKIEKILTFRIPYYVGPLARGNSRFAWMTRKSEETITPWNFEEVVDKGASAQSFIERMTNFDKNLPNEKVLPKHSLLYEYFTVYNELTKVKYVTEGMRKPAFLSGEQKKAIVDLLFKTNRKVTVKQLKEDYFKKIECFDSVEISGVEDRFNASLGTYHDLLKIIKDKDFLDNEENEDILEDIVLTLTLFEDREMIEERLKTYAHLFDDKVMKQLKRRRYTGWGRLSRKLINGIRDKQSGKTILDFLKSDGFANRNFMQLIHDDSLTFKEDIQKAQVSGQGDSLHEHIANLAGSPAIKKGILQTVKVVDELVKVMGRHKPENIVIEMARENQTTQKGQKNSRERMKRIEEGIKELGSQILKEHPVENTQLQNEKLYLYYLQNGRDMYVDQELDINRLSDYDVDHIVPQSFLKDDSIDNKVLTRSDKARGKSDNVPSEEVVKKMKNYWRQLLNAKLITQRKFDNLTKAERGGLSELDKAGFIKRQLVETRQITKHVAQILDSRMNTKYDENDKLIREVKVITLKSKLVSDFRKDFQFYKVREINNYHHAHDAYLNAVVGTALIKKYPKLESEFVYGDYKVYDVRKMIAKSEQEIGKATAKYFFYSNIMNFFKTEITLANGEIRKRPLIETNGETGEIVWDKGRDFATVRKVLSMPQVNIVKKTEVQTGGFSKESILPKRNSDKLIARKKDWDPKKYGGFDSPTVAYSVLVVAKVEKGKSKKLKSVKELLGITIMERSSFEKNPIDFLEAKGYKEVKKDLIIKLPKYSLFELENGRKRMLASAGELQKGNELALPSKYVNFLYLASHYEKLKGSPEDNEQKQLFVEQHKHYLDEIIEQISEFSKRVILADANLDKVLSAYNKHRDKPIREQAENIIHLFTLTNLGAPAAFKYFDTTIDRKRYTSTKEVLDATLIHQSITGLYETRIDLSQLGGDGGGGGGGSEAAAKGGMNPLQLLQPLPAEIKGTKLLAHWNSGATITCIPESFLEDEQPIKKTLIKTIHGEKQQNVYYVTFKVKGRKVEAEVIASPYEYILLSPTDVPWLTQQPLQLTILVPLQEYQEKILSKTALPEDQKQQLKTLFVKYDNLWQHWENQVGHRKIRPHNIATGDYPPRPQKQYPINPKAKPSIQIVIDDLLKQGVLTPQNSTMNTPVYPVPKPDGRWRMVLDYREVNKTIPLTAAQNQHSAGILATIVRQKYKTTLDLANGFWAHPITPESYWLTAFTWQGKQYCWTRLPQGFLNSPALFTADVVDLLKEIPNVQVYVDDIYLSHDDPKEHVQQLEKVFQILLQAGYVVSLKKSEIGQKTVEFLGFNITKEGRGLTDTFKTKLLNITPPKDLKQLQSILGLLNFARNFIPNFAELVQPLYNLIASAKGKYIEWSEENTKQLNMVIEALNTASNLEERLPEQRLVIKVNTSPSAGYVRYYNETGKKPIMYLNYVFSKAELKFSMLEKLLTTMHKALIKAMDLAMGQEILVYSPIVSMTKIQKTPLPERKALPIRWITWMTYLEDPRIQFHYDKTLPELKHIPDVYTSSQSPVKHPSQYEGVFYTDGSAIKSPDPTKSNNAGMGIVHATYKPEYQVLNQWSIPLGNHTAQMAEIAAVEFACKKALKIPGPVLVITDSFYVAESANKELPYWKSNGFVNNKKKPLKHISKWKSIAECLSMKPDITIQHEKGISLQIPVFILKGNALADKLATQGSYVVNAGKRTADGSEFEKRTADGSEFESPKKKAKVE

SEQ ID NO: 6913 - protein, 2176 aa, synthetic construct
MPAAKRVKLDGGDKKYSIGLDIGTNSVGWAVITDEYKVPSKKFKVLGNTDRHSIKKNLIGALLFDSGETAEATRLKRTARRRYTRRKNRICYLQEIFSNEMAKVDDSFFHRLEESFLVEEDKKHERHPIFGNIVDEVAYHEKYPTIYHLRKKLVDSTDKADLRLIYLALAHMIKFRGHFLIEGDLNPDNSDVDKLFIQLVQTYNQLFEENPINASGVDAKAILSARLSKSRRLENLIAQLPGEKKNGLFGNLIALSLGLTPNFKSNFDLAEDAKLQLSKDTYDDDLDNLLAQIGDQYADLFLAAKNLSDAILLSDILRVNTEITKAPLSASMIKRYDEHHQDLTLLKALVRQQLPEKYKEIFFDQSKNGYAGYIDGGASQEEFYKFIKPILEKMDGTEELLVKLNREDLLRKQRTFDNGSIPHQIHLGELHAILRRQEDFYPFLKDNREKIEKILTFRIPYYVGPLARGNSRFAWMTRKSEETITPWNFEEVVDKGASAQSFIERMTNFDKNLPNEKVLPKHSLLYEYFTVYNELTKVKYVTEGMRKPAFLSGEQKKAIVDLLFKTNRKVTVKQLKEDYFKKIECFDSVEISGVEDRFNASLGTYHDLLKIIKDKDFLDNEENEDILEDIVLTLTLFEDREMIEERLKTYAHLFDDKVMKQLKRRRYTGWGRLSRKLINGIRDKQSGKTILDFLKSDGFANRNFMQLIHDDSLTFKEDIQKAQVSGQGDSLHEHIANLAGSPAIKKGILQTVKVVDELVKVMGRHKPENIVIEMARENQTTQKGQKNSRERMKRIEEGIKELGSQILKEHPVENTQLQNEKLYLYYLQNGRDMYVDQELDINRLSDYDVDHIVPQSFLKDDSIDNKVLTRSDKARGKSDNVPSEEVVKKMKNYWRQLLNAKLITQRKFDNLTKAERGGLSELDKAGFIKRQLVETRQITKHVAQILDSRMNTKYDENDKLIREVKVITLKSKLVSDFRKDFQFYKVREINNYHHAHDAYLNAVVGTALIKKYPKLESEFVYGDYKVYDVRKMIAKSEQEIGKATAKYFFYSNIMNFFKTEITLANGEIRKRPLIETNGETGEIVWDKGRDFATVRKVLSMPQVNIVKKTEVQTGGFSKESILPKRNSDKLIARKKDWDPKKYGGFDSPTVAYSVLVVAKVEKGKSKKLKSVKELLGITIMERSSFEKNPIDFLEAKGYKEVKKDLIIKLPKYSLFELENGRKRMLASAGELQKGNELALPSKYVNFLYLASHYEKLKGSPEDNEQKQLFVEQHKHYLDEIIEQISEFSKRVILADANLDKVLSAYNKHRDKPIREQAENIIHLFTLTNLGAPAAFKYFDTTIDRKRYTSTKEVLDATLIHQSITGLYETRIDLSQLGGDGGGGGGGSEAAAKGGMNPLQLLQPLPAEIKGTKLLAHWNSGATITCIPESFLEDEQPIKKTLIKTIHGEKQQNVYYVTFKVKGRKVEAEVIASPYEYILLSPTDVPWLTQQPLQLTILVPLQEYQEKILSKTALPEDQKQQLKTLFVKYDNLWQHWENQVGHRKIRPHNIATGDYPPRPQKQYPINPKAKPSIQIVIDDLLKQGVLTPQNSTMNTPVYPVPKPDGRWRMVLDYREVNKTIPLTAAQNQHSAGILATIVRQKYKTTLDLANGFWAHPITPESYWLTAFTWQGKQYCWTRLPQGFLNSPALFNADVVDLLKEIPNVQVYVDDIYLSHDDPKEHVQQLEKVFQILLQAGYVVSLKKSEIGQKTVEFLGFNITKEGRGLTDTFKTKLLNITPPKDLKQLQSILGKLNFARNFIPNFAELVQPLYNLIAPAKGKYIEWSEENTKQLNMVIEALNTASNLEERLPEQRLVIKVNTSPSAGYVRYYNETGKKPIMYLNYVFSKAELKFSMLEKLLTTMHKALIKAMDLAMGQEILVYSPIVSMTKIQKTPLPERKALPIRWITWMTYLEDPRIQFHYDKTLPELKHIPDVYTSSQSPVKHPSQYEGVFYTDGSAIKSPDPTKSNNAGMGIVHATYKPEYQVLNQWSIPLGNHTAQMAEIAAVEFACKKALKIPGPVLVITDSFYVAESANKELPYWKSNGFVNNKKKPLKHISKWKSIAECLSMKPDITIQHEKGISLQIPVFILKGNALADKLATQGSYVVNAGKRTADGSEFEKRTADGSEFESPKKKAKVE

SEQ ID NO: 6914 - protein, 2218 aa, synthetic construct
MPAAKRVKLDGGDKKYSIGLDIGTNSVGWAVITDEYKVPSKKFKVLGNTDRHSIKKNLIGALLFDSGETAEATRLKRTARRRYTRRKNRICYLQEIFSNEMAKVDDSFFHRLEESFLVEEDKKHERHPIFGNIVDEVAYHEKYPTIYHLRKKLVDSTDKADLRLIYLALAHMIKFRGHFLIEGDLNPDNSDVDKLFIQLVQTYNQLFEENPINASGVDAKAILSARLSKSRRLENLIAQLPGEKKNGLFGNLIALSLGLTPNFKSNFDLAEDAKLQLSKDTYDDDLDNLLAQIGDQYADLFLAAKNLSDAILLSDILRVNTEITKAPLSASMIKRYDEHHQDLTLLKALVRQQLPEKYKEIFFDQSKNGYAGYIDGGASQEEFYKFIKPILEKMDGTEELLVKLNREDLLRKQRTFDNGSIPHQIHLGELHAILRRQEDFYPFLKDNREKIEKILTFRIPYYVGPLARGNSRFAWMTRKSEETITPWNFEEVVDKGASAQSFIERMTNFDKNLPNEKVLPKHSLLYEYFTVYNELTKVKYVTEGMRKPAFLSGEQKKAIVDLLFKTNRKVTVKQLKEDYFKKIECFDSVEISGVEDRFNASLGTYHDLLKIIKDKDFLDNEENEDILEDIVLTLTLFEDREMIEERLKTYAHLFDDKVMKQLKRRRYTGWGRLSRKLINGIRDKQSGKTILDFLKSDGFANRNFMQLIHDDSLTFKEDIQKAQVSGQGDSLHEHIANLAGSPAIKKGILQTVKVVDELVKVMGRHKPENIVIEMARENQTTQKGQKNSRERMKRIEEGIKELGSQILKEHPVENTQLQNEKLYLYYLQNGRDMYVDQELDINRLSDYDVDHIVPQSFLKDDSIDNKVLTRSDKARGKSDNVPSEEVVKKMKNYWRQLLNAKLITQRKFDNLTKAERGGLSELDKAGFIKRQLVETRQITKHVAQILDSRMNTKYDENDKLIREVKVITLKSKLVSDFRKDFQFYKVREINNYHHAHDAYLNAVVGTALIKKYPKLESEFVYGDYKVYDVRKMIAKSEQEIGKATAKYFFYSNIMNFFKTEITLANGEIRKRPLIETNGETGEIVWDKGRDFATVRKVLSMPQVNIVKKTEVQTGGFSKESILPKRNSDKLIARKKDWDPKKYGGFDSPTVAYSVLVVAKVEKGKSKKLKSVKELLGITIMERSSFEKNPIDFLEAKGYKEVKKDLIIKLPKYSLFELENGRKRMLASAGELQKGNELALPSKYVNFLYLASHYEKLKGSPEDNEQKQLFVEQHKHYLDEIIEQISEFSKRVILADANLDKVLSAYNKHRDKPIREQAENIIHLFTLTNLGAPAAFKYFDTTIDRKRYTSTKEVLDATLIHQSITGLYETRIDLSQLGGDGGGGGGGSEAAAKGGTLGDQGSRGSDPLPEPRVTLTVEGIPTEFLVNTGAEHSVLTKPMGKMGSKRTVVAGATGSKVYPWTTKRLLKIGQKQVTHSFLVIPECPAPLLGRDLLTKLKAQIQFSTEGPQVTWEDRPAMCLVLNLEEEYRLHEKPVPPSIDPSWLQLFPMVWAEKAGMGLANQVPPVVVELKSDASPVAVRQYPMSKEAREGIRPHIQRFLDLGILVPCQSPWNTPLLPVKKPGTNDYRPVQDLREVNKRVQDIHPTVPNPYNLLSSLPPSHTWYSVLDLKDAFFCLKLHPNSQPLFAFEWRDPEKGNTGQLTWTRLPQGFKNSPTLFDEALHRDLASFRALNPQVVMLQYVDDLLVAAPTYRDCKEGTRRLLQELSKLGYRVSAKKAQLCREEVTYLGYLLKGGKRWLTPARKATVMKIPTPTTPRQVREFLGTAGFCRLWIPGFASLAAPLYPLTREKVPFTWTEAHQEAFGRIKEALLSAPALALPDLTKPFALYVDEKEGVARGVLTQTLGPWRRPVAYLSKKLDPVASGWPTCLKAIAAVALLLKDADKLTLGQNVLVIAPHNLESIVRQPPDRWMTNARMTHYQSLLLNERVSFAPPAILNPATLLPVESDDTPIHICSEILAEETGTRPDLRDQPLPGVPAWYTDGSSFIMDGRRQAGAAIVDNKRTVWASNLPEGTSAQKAELIALTQALRLAEGKSINIYTDSRYAFATAHVHGAIYKQRGLLTSAGKDIKNKEEILALLEAIHLPKRVAIIHCPGHQRGTDPVATGNRKADEAAKQAAQSTRILTETTKNAGKRTADGSEFEKRTADGSEFESPKKKAKVE

SEQ ID NO: 6915 - protein, 2127 aa, synthetic construct
MPAAKRVKLDGGDKKYSIGLDIGTNSVGWAVITDEYKVPSKKFKVLGNTDRHSIKKNLIGALLFDSGETAEATRLKRTARRRYTRRKNRICYLQEIFSNEMAKVDDSFFHRLEESFLVEEDKKHERHPIFGNIVDEVAYHEKYPTIYHLRKKLVDSTDKADLRLIYLALAHMIKFRGHFLIEGDLNPDNSDVDKLFIQLVQTYNQLFEENPINASGVDAKAILSARLSKSRRLENLIAQLPGEKKNGLFGNLIALSLGLTPNFKSNFDLAEDAKLQLSKDTYDDDLDNLLAQIGDQYADLFLAAKNLSDAILLSDILRVNTEITKAPLSASMIKRYDEHHQDLTLLKALVRQQLPEKYKEIFFDQSKNGYAGYIDGGASQEEFYKFIKPILEKMDGTEELLVKLNREDLLRKQRTFDNGSIPHQIHLGELHAILRRQEDFYPFLKDNREKIEKILTFRIPYYVGPLARGNSRFAWMTRKSEETITPWNFEEVVDKGASAQSFIERMTNFDKNLPNEKVLPKHSLLYEYFTVYNELTKVKYVTEGMRKPAFLSGEQKKAIVDLLFKTNRKVTVKQLKEDYFKKIECFDSVEISGVEDRFNASLGTYHDLLKIIKDKDFLDNEENEDILEDIVLTLTLFEDREMIEERLKTYAHLFDDKVMKQLKRRRYTGWGRLSRKLINGIRDKQSGKTILDFLKSDGFANRNFMQLIHDDSLTFKEDIQKAQVSGQGDSLHEHIANLAGSPAIKKGILQTVKVVDELVKVMGRHKPENIVIEMARENQTTQKGQKNSRERMKRIEEGIKELGSQILKEHPVENTQLQNEKLYLYYLQNGRDMYVDQELDINRLSDYDVDHIVPQSFLKDDSIDNKVLTRSDKARGKSDNVPSEEVVKKMKNYWRQLLNAKLITQRKFDNLTKAERGGLSELDKAGFIKRQLVETRQITKHVAQILDSRMNTKYDENDKLIREVKVITLKSKLVSDFRKDFQFYKVREINNYHHAHDAYLNAVVGTALIKKYPKLESEFVYGDYKVYDVRKMIAKSEQEIGKATAKYFFYSNIMNFFKTEITLANGEIRKRPLIETNGETGEIVWDKGRDFATVRKVLSMPQVNIVKKTEVQTGGFSKESILPKRNSDKLIARKKDWDPKKYGGFDSPTVAYSVLVVAKVEKGKSKKLKSVKELLGITIMERSSFEKNPIDFLEAKGYKEVKKDLIIKLPKYSLFELENGRKRMLASAGELQKGNELALPSKYVNFLYLASHYEKLKGSPEDNEQKQLFVEQHKHYLDEIIEQISEFSKRVILADANLDKVLSAYNKHRDKPIREQAENIIHLFTLTNLGAPAAFKYFDTTIDRKRYTSTKEVLDATLIHQSITGLYETRIDLSQLGGDGGGGGGGSEAAAKGGLLGRDLLTKLKAQIQFSTEGPQVTWEDRPAMCLVLNLEEEYRLHEKPVPPSIDPSWLQLFPMVWAEKAGMGLANQVPPVVVELKSDASPVAVRQYPMSKEAREGIRPHIQRFLDLGILVPCQSPWNTPLLPVKKPGTNDYRPVQDLREVNKRVQDIHPTVPNPYNLLSSLPPSHTWYSVLDLKDAFFCLKLHPNSQPLFAFEWRDPEKGNTGQLTWTRLPQGFKNSPTLFNEALHRDLASFRALNPQVVMLQYVDDLLVAAPTYRDCKEGTRRLLQELSKLGYRVSAKKAQLCREEVTYLGYLLKGGKRWLTPARKATVMKIPTPTTPRQVREFLGTAGFCRLWIPGFASLAAPLYPLTRPKVPFTWTEAHQEAFGRIKEALLSAPALALPDLTKPFALYVDEKEGVARGVLTQTLGPWRRPVAYLSKKLDPVASGWPTCLKAIAAVALLLKDADKLTLGQNVLVIAPHNLESIVRQPPDRWMTNARMTHYQSLLLNERVSFAPPAILNPATLLPVESDDTPIHICSEILAEETGTRPDLRDQPLPGVPAWYTDGSSFIMDGRRQAGAAIVDNKRTVWASNLPEGTSAQKAELIALTQALRLAEGKSINIYTDSRYAFATAHVHGAIYKQRGWLTSAGKDIKNKEEILALLEAIHLPKRVAIIHCPGHQRGTDPVATGNRKADEAAKQAAQSTRILTETTKNAGKRTADGSEFEKRTADGSEFESPKKKAKVE

SEQ ID NO: 6916 - protein, 2218 aa, synthetic construct
MPAAKRVKLDGGDKKYSIGLDIGTNSVGWAVITDEYKVPSKKFKVLGNTDRHSIKKNLIGALLFDSGETAEATRLKRTARRRYTRRKNRICYLQEIFSNEMAKVDDSFFHRLEESFLVEEDKKHERHPIFGNIVDEVAYHEKYPTIYHLRKKLVDSTDKADLRLIYLALAHMIKFRGHFLIEGDLNPDNSDVDKLFIQLVQTYNQLFEENPINASGVDAKAILSARLSKSRRLENLIAQLPGEKKNGLFGNLIALSLGLTPNFKSNFDLAEDAKLQLSKDTYDDDLDNLLAQIGDQYADLFLAAKNLSDAILLSDILRVNTEITKAPLSASMIKRYDEHHQDLTLLKALVRQQLPEKYKEIFFDQSKNGYAGYIDGGASQEEFYKFIKPILEKMDGTEELLVKLNREDLLRKQRTFDNGSIPHQIHLGELHAILRRQEDFYPFLKDNREKIEKILTFRIPYYVGPLARGNSRFAWMTRKSEETITPWNFEEVVDKGASAQSFIERMTNFDKNLPNEKVLPKHSLLYEYFTVYNELTKVKYVTEGMRKPAFLSGEQKKAIVDLLFKTNRKVTVKQLKEDYFKKIECFDSVEISGVEDRFNASLGTYHDLLKIIKDKDFLDNEENEDILEDIVLTLTLFEDREMIEERLKTYAHLFDDKVMKQLKRRRYTGWGRLSRKLINGIRDKQSGKTILDFLKSDGFANRNFMQLIHDDSLTFKEDIQKAQVSGQGDSLHEHIANLAGSPAIKKGILQTVKVVDELVKVMGRHKPENIVIEMARENQTTQKGQKNSRERMKRIEEGIKELGSQILKEHPVENTQLQNEKLYLYYLQNGRDMYVDQELDINRLSDYDVDHIVPQSFLKDDSIDNKVLTRSDKARGKSDNVPSEEVVKKMKNYWRQLLNAKLITQRKFDNLTKAERGGLSELDKAGFIKRQLVETRQITKHVAQILDSRMNTKYDENDKLIREVKVITLKSKLVSDFRKDFQFYKVREINNYHHAHDAYLNAVVGTALIKKYPKLESEFVYGDYKVYDVRKMIAKSEQEIGKATAKYFFYSNIMNFFKTEITLANGEIRKRPLIETNGETGEIVWDKGRDFATVRKVLSMPQVNIVKKTEVQTGGFSKESILPKRNSDKLIARKKDWDPKKYGGFDSPTVAYSVLVVAKVEKGKSKKLKSVKELLGITIMERSSFEKNPIDFLEAKGYKEVKKDLIIKLPKYSLFELENGRKRMLASAGELQKGNELALPSKYVNFLYLASHYEKLKGSPEDNEQKQLFVEQHKHYLDEIIEQISEFSKRVILADANLDKVLSAYNKHRDKPIREQAENIIHLFTLTNLGAPAAFKYFDTTIDRKRYTSTKEVLDATLIHQSITGLYETRIDLSQLGGDGGGGGGGSEAAAKGGTLGDQGSRGSDPLPEPRVTLTVEGIPTEFLVNTGAEHSVLTKPMGKMGSKRTVVAGATGSKVYPWTTKRLLKIGQKQVTHSFLVIPECPAPLLGRDLLTKLKAQIQFSTEGPQVTWEDRPAMCLVLNLEEEYRLHEKPVPPSIDPSWLQLFPMVWAEKAGMGLANQVPPVVVELKSDASPVAVRQYPMSKEAREGIRPHIQRFLDLGILVPCQSPWNTPLLPVKKPGTNDYRPVQDLREVNKRVQDIHPTVPNPYNLLSSLPPSHTWYSVLDLKDAFFCLKLHPNSQPLFAFEWRDPEKGNTGQLTWTRLPQGFKNSPTLFNEALHRDLASFRALNPQVVMLQYVDDLLVAAPTYRDCKEGTRRLLQELSKLGYRVSAKKAQLCREEVTYLGYLLKGGKRWLTPARKATVMKIPTPTTPRQVREFLGTAGFCRLWIPGFASLAAPLYPLTRPKVPFTWTEAHQEAFGRIKEALLSAPALALPDLTKPFALYVDEKEGVARGVLTQTLGPWRRPVAYLSKKLDPVASGWPTCLKAIAAVALLLKDADKLTLGQNVLVIAPHNLESIVRQPPDRWMTNARMTHYQSLLLNERVSFAPPAILNPATLLPVESDDTPIHICSEILAEETGTRPDLRDQPLPGVPAWYTDGSSFIMDGRRQAGAAIVDNKRTVWASNLPEGTSAQKAELIALTQALRLAEGKSINIYTDSRYAFATAHVHGAIYKQRGWLTSAGKDIKNKEEILALLEAIHLPKRVAIIHCPGHQRGTDPVATGNRKADEAAKQAAQSTRILTETTKNAGKRTADGSEFEKRTADGSEFESPKKKAKVE

SEQ ID NO: 6917 - protein, 2096 aa, synthetic construct
MPAAKRVKLDGGDKKYSIGLDIGTNSVGWAVITDEYKVPSKKFKVLGNTDRHSIKKNLIGALLFDSGETAEATRLKRTARRRYTRRKNRICYLQEIFSNEMAKVDDSFFHRLEESFLVEEDKKHERHPIFGNIVDEVAYHEKYPTIYHLRKKLVDSTDKADLRLIYLALAHMIKFRGHFLIEGDLNPDNSDVDKLFIQLVQTYNQLFEENPINASGVDAKAILSARLSKSRRLENLIAQLPGEKKNGLFGNLIALSLGLTPNFKSNFDLAEDAKLQLSKDTYDDDLDNLLAQIGDQYADLFLAAKNLSDAILLSDILRVNTEITKAPLSASMIKRYDEHHQDLTLLKALVRQQLPEKYKEIFFDQSKNGYAGYIDGGASQEEFYKFIKPILEKMDGTEELLVKLNREDLLRKQRTFDNGSIPHQIHLGELHAILRRQEDFYPFLKDNREKIEKILTFRIPYYVGPLARGNSRFAWMTRKSEETITPWNFEEVVDKGASAQSFIERMTNFDKNLPNEKVLPKHSLLYEYFTVYNELTKVKYVTEGMRKPAFLSGEQKKAIVDLLFKTNRKVTVKQLKEDYFKKIECFDSVEISGVEDRFNASLGTYHDLLKIIKDKDFLDNEENEDILEDIVLTLTLFEDREMIEERLKTYAHLFDDKVMKQLKRRRYTGWGRLSRKLINGIRDKQSGKTILDFLKSDGFANRNFMQLIHDDSLTFKEDIQKAQVSGQGDSLHEHIANLAGSPAIKKGILQTVKVVDELVKVMGRHKPENIVIEMARENQTTQKGQKNSRERMKRIEEGIKELGSQILKEHPVENTQLQNEKLYLYYLQNGRDMYVDQELDINRLSDYDVDHIVPQSFLKDDSIDNKVLTRSDKARGKSDNVPSEEVVKKMKNYWRQLLNAKLITQRKFDNLTKAERGGLSELDKAGFIKRQLVETRQITKHVAQILDSRMNTKYDENDKLIREVKVITLKSKLVSDFRKDFQFYKVREINNYHHAHDAYLNAVVGTALIKKYPKLESEFVYGDYKVYDVRKMIAKSEQEIGKATAKYFFYSNIMNFFKTEITLANGEIRKRPLIETNGETGEIVWDKGRDFATVRKVLSMPQVNIVKKTEVQTGGFSKESILPKRNSDKLIARKKDWDPKKYGGFDSPTVAYSVLVVAKVEKGKSKKLKSVKELLGITIMERSSFEKNPIDFLEAKGYKEVKKDLIIKLPKYSLFELENGRKRMLASAGELQKGNELALPSKYVNFLYLASHYEKLKGSPEDNEQKQLFVEQHKHYLDEIIEQISEFSKRVILADANLDKVLSAYNKHRDKPIREQAENIIHLFTLTNLGAPAAFKYFDTTIDRKRYTSTKEVLDATLIHQSITGLYETRIDLSQLGGDGGGGGGGSEAAAKGGTLNLEDEYRLYETSAEPEVSPGSTWLSDFPQAWAETGGMGLAVRQAPLIIPLKATSTPVSIKQYPMSQEAKLGIKPHIQRLLDQGILVPCQSPWNTPLLPVKKPGTNDYRPVQDLREVNKRVEDIHPTVPNPYNLLSGLPPSHRWYTVLDLKDAFFCLRLHPTSQPLFAFEWRDPGMGISGQLTWTRLPQGFKNSPTLFNEALHRDLADFRIQHPDLILLQYVDDILLAATSELDCQQGTRALLLTLGNLGYRASAKKAQLCQKQVKYLGYLLKEGQRWLTEARKETVMGQPTPKTPRQLREFLGTAGFCRLWIPGFAEMAAPLYPLTKPGTLFNWGPDQQKAYQEIKQALLTAPALGLPDLTKPFELFVDEKQGYAKGVLTQKLGPWRRPVAYLSKKLDPVAAGWPPCLRMVAAIAVLRKDAGKLTMGQPLVILAPHAVEALVKQPPDRWLSNARMTHYQAMLLDTDRVQFGPVVALNPATLLPLPEEGAPHDCLEILAETHGTRPDLTDQPIPDADHTWYTDGSSFLQEGQRKAGAAVTTETEVIWARALPAGTSAQRAELIALTQALKMAEGKRLNVYTDSRYAFATAHIHGEIYRRRGWLTSEGREIKNKSEILALLKALFLPKRLSIIHCLGHQKGDSAEARGNRLADQAAREAAIKTPPDTSTLLAGKRTADGSEFEKRTADGSEFESPKKKAKVE

SEQ ID NO: 6918 - protein, 2096 aa, synthetic construct
MPAAKRVKLDGGDKKYSIGLDIGTNSVGWAVITDEYKVPSKKFKVLGNTDRHSIKKNLIGALLFDSGETAEATRLKRTARRRYTRRKNRICYLQEIFSNEMAKVDDSFFHRLEESFLVEEDKKHERHPIFGNIVDEVAYHEKYPTIYHLRKKLVDSTDKADLRLIYLALAHMIKFRGHFLIEGDLNPDNSDVDKLFIQLVQTYNQLFEENPINASGVDAKAILSARLSKSRRLENLIAQLPGEKKNGLFGNLIALSLGLTPNFKSNFDLAEDAKLQLSKDTYDDDLDNLLAQIGDQYADLFLAAKNLSDAILLSDILRVNTEITKAPLSASMIKRYDEHHQDLTLLKALVRQQLPEKYKEIFFDQSKNGYAGYIDGGASQEEFYKFIKPILEKMDGTEELLVKLNREDLLRKQRTFDNGSIPHQIHLGELHAILRRQEDFYPFLKDNREKIEKILTFRIPYYVGPLARGNSRFAWMTRKSEETITPWNFEEVVDKGASAQSFIERMTNFDKNLPNEKVLPKHSLLYEYFTVYNELTKVKYVTEGMRKPAFLSGEQKKAIVDLLFKTNRKVTVKQLKEDYFKKIECFDSVEISGVEDRFNASLGTYHDLLKIIKDKDFLDNEENEDILEDIVLTLTLFEDREMIEERLKTYAHLFDDKVMKQLKRRRYTGWGRLSRKLINGIRDKQSGKTILDFLKSDGFANRNFMQLIHDDSLTFKEDIQKAQVSGQGDSLHEHIANLAGSPAIKKGILQTVKVVDELVKVMGRHKPENIVIEMARENQTTQKGQKNSRERMKRIEEGIKELGSQILKEHPVENTQLQNEKLYLYYLQNGRDMYVDQELDINRLSDYDVDHIVPQSFLKDDSIDNKVLTRSDKARGKSDNVPSEEVVKKMKNYWRQLLNAKLITQRKFDNLTKAERGGLSELDKAGFIKRQLVETRQITKHVAQILDSRMNTKYDENDKLIREVKVITLKSKLVSDFRKDFQFYKVREINNYHHAHDAYLNAVVGTALIKKYPKLESEFVYGDYKVYDVRKMIAKSEQEIGKATAKYFFYSNIMNFFKTEITLANGEIRKRPLIETNGETGEIVWDKGRDFATVRKVLSMPQVNIVKKTEVQTGGFSKESILPKRNSDKLIARKKDWDPKKYGGFDSPTVAYSVLVVAKVEKGKSKKLKSVKELLGITIMERSSFEKNPIDFLEAKGYKEVKKDLIIKLPKYSLFELENGRKRMLASAGELQKGNELALPSKYVNFLYLASHYEKLKGSPEDNEQKQLFVEQHKHYLDEIIEQISEFSKRVILADANLDKVLSAYNKHRDKPIREQAENIIHLFTLTNLGAPAAFKYFDTTIDRKRYTSTKEVLDATLIHQSITGLYETRIDLSQLGGDGGGGGGGSEAAAKGGTLNIEDEYRLHETSKGPDVPLGSTWLSDFPQAWAETGGMGLAFRQAPLIISLKATSTPVSIKQYPMSQEARLGIKPHIQRLLDQGILVPCQSPWNTPLLPVKKPGTNDYRPVQDLREVNKRVEDIHPTVPNPYNLLSGLPPSHQWYTVLDLKDAFFCLRLHPTSQSLFAFEWKDPEMGISGQLTWTRLPQGFKNSPTLFDEALHRDLADFRIQHPDLILLQYVDDLLLAATSELDCQQGTRALLQTLGDLGYRASAKKAQICQKQVKYLGYLLKEGQRWLTEARKETVMGQPTPKTPRQLREFLGTAGLCRLWIPGFAEMAAPLYPLTKTGTLFKWGPDQQKAYQEIKQALLTAPALGLPDLTKPFELFVDEKQGYAKGVLTQKLGPWRRPVAYLSKKLDPVAAGWPPCLRMVAAIAVLTKDVGKLTMGQPLVILAPHAVEALVKQPPDRWLSNARMTHYQALLLDTDRVQFGPIVALNPATLLPLPEEGLQHDCLDILAEAHGTRPDLTDQPLPDADHTWYTDGSSFLQEGQRRAGAAVTTETEVIWAKALPAGTSAQRAELIALTQALKMAAGKKLNVYTDSRYAFATAHIHGEIYRRRGLLTSEGKEIKNKDEILALLKALFLPKRLSIIHCPGHQKGNHAEARGNRMADQAAREVATRETPETSTLLAGKRTADGSEFEKRTADGSEFESPKKKAKVE

SEQ ID NO: 6919 - protein, 2096 aa, synthetic construct
MPAAKRVKLDGGDKKYSIGLDIGTNSVGWAVITDEYKVPSKKFKVLGNTDRHSIKKNLIGALLFDSGETAEATRLKRTARRRYTRRKNRICYLQEIFSNEMAKVDDSFFHRLEESFLVEEDKKHERHPIFGNIVDEVAYHEKYPTIYHLRKKLVDSTDKADLRLIYLALAHMIKFRGHFLIEGDLNPDNSDVDKLFIQLVQTYNQLFEENPINASGVDAKAILSARLSKSRRLENLIAQLPGEKKNGLFGNLIALSLGLTPNFKSNFDLAEDAKLQLSKDTYDDDLDNLLAQIGDQYADLFLAAKNLSDAILLSDILRVNTEITKAPLSASMIKRYDEHHQDLTLLKALVRQQLPEKYKEIFFDQSKNGYAGYIDGGASQEEFYKFIKPILEKMDGTEELLVKLNREDLLRKQRTFDNGSIPHQIHLGELHAILRRQEDFYPFLKDNREKIEKILTFRIPYYVGPLARGNSRFAWMTRKSEETITPWNFEEVVDKGASAQSFIERMTNFDKNLPNEKVLPKHSLLYEYFTVYNELTKVKYVTEGMRKPAFLSGEQKKAIVDLLFKTNRKVTVKQLKEDYFKKIECFDSVEISGVEDRFNASLGTYHDLLKIIKDKDFLDNEENEDILEDIVLTLTLFEDREMIEERLKTYAHLFDDKVMKQLKRRRYTGWGRLSRKLINGIRDKQSGKTILDFLKSDGFANRNFMQLIHDDSLTFKEDIQKAQVSGQGDSLHEHIANLAGSPAIKKGILQTVKVVDELVKVMGRHKPENIVIEMARENQTTQKGQKNSRERMKRIEEGIKELGSQILKEHPVENTQLQNEKLYLYYLQNGRDMYVDQELDINRLSDYDVDHIVPQSFLKDDSIDNKVLTRSDKARGKSDNVPSEEVVKKMKNYWRQLLNAKLITQRKFDNLTKAERGGLSELDKAGFIKRQLVETRQITKHVAQILDSRMNTKYDENDKLIREVKVITLKSKLVSDFRKDFQFYKVREINNYHHAHDAYLNAVVGTALIKKYPKLESEFVYGDYKVYDVRKMIAKSEQEIGKATAKYFFYSNIMNFFKTEITLANGEIRKRPLIETNGETGEIVWDKGRDFATVRKVLSMPQVNIVKKTEVQTGGFSKESILPKRNSDKLIARKKDWDPKKYGGFDSPTVAYSVLVVAKVEKGKSKKLKSVKELLGITIMERSSFEKNPIDFLEAKGYKEVKKDLIIKLPKYSLFELENGRKRMLASAGELQKGNELALPSKYVNFLYLASHYEKLKGSPEDNEQKQLFVEQHKHYLDEIIEQISEFSKRVILADANLDKVLSAYNKHRDKPIREQAENIIHLFTLTNLGAPAAFKYFDTTIDRKRYTSTKEVLDATLIHQSITGLYETRIDLSQLGGDGGGGGGGSEAAAKGGTLNIEDEYRLHETSKGPDVPLGSTWLSDFPQAWAETGGMGLAVRQAPLIIPLKATSTPVSIKQYPMSQEARLGIKPHIQRLLDQGILVPCQSPWNTPLLPVKKPGTNDYRPVQDLREVNKRVEDIHPTVPNPYNLLSGLPPSHQWYTVLDLKDAFFCLRLHPTSQSLFAFEWRDPEMGISGQLTWTRLPQGFKNSPTLFNEALHRDLADFRIQHPDLILLQYVDDLLLAATSELDCQQGTRALLQTLGDLGYRASAKKAQICQKQVKYLGYLLKEGQRWLTEARKETVMGQPTPKTPRQLREFLGTAGFCRLWIPGFAEMAAPLYPLTKPGTLFEWGPDQQKAYQEIKQALLTAPALGLPDLTKPFELFVDEKQGYAKGVLTQKLGPWRRPVAYLSKKLDPVAAGWPPCLRMVAAIAVLTKDAGKLTMGQPLVILAPHAVEALVKQPPDRWLSNARMTHYQALLLDTDRVQFGPIVALNPATLLPLPEEGLQHDCLDILAEAHGTRPDLTDQPLPDADHTWYTDGSSFLQEGQRKAGAAVTTETEVVWAKALPAGTSAQRAELIALTQALKMAEGKKLNVYTDSRYAFATAHIHGEIYRRRGWLTSEGKEIKNKDEILALLKALFLPKRLSIIHCPGHQKGNRAEARGNRMADQAAREVATRETPETSTLLAGKRTADGSEFEKRTADGSEFESPKKKAKVE

SEQ ID NO: 6920 - protein, 2090 aa, synthetic construct
MPAAKRVKLDGGDKKYSIGLDIGTNSVGWAVITDEYKVPSKKFKVLGNTDRHSIKKNLIGALLFDSGETAEATRLKRTARRRYTRRKNRICYLQEIFSNEMAKVDDSFFHRLEESFLVEEDKKHERHPIFGNIVDEVAYHEKYPTIYHLRKKLVDSTDKADLRLIYLALAHMIKFRGHFLIEGDLNPDNSDVDKLFIQLVQTYNQLFEENPINASGVDAKAILSARLSKSRRLENLIAQLPGEKKNGLFGNLIALSLGLTPNFKSNFDLAEDAKLQLSKDTYDDDLDNLLAQIGDQYADLFLAAKNLSDAILLSDILRVNTEITKAPLSASMIKRYDEHHQDLTLLKALVRQQLPEKYKEIFFDQSKNGYAGYIDGGASQEEFYKFIKPILEKMDGTEELLVKLNREDLLRKQRTFDNGSIPHQIHLGELHAILRRQEDFYPFLKDNREKIEKILTFRIPYYVGPLARGNSRFAWMTRKSEETITPWNFEEVVDKGASAQSFIERMTNFDKNLPNEKVLPKHSLLYEYFTVYNELTKVKYVTEGMRKPAFLSGEQKKAIVDLLFKTNRKVTVKQLKEDYFKKIECFDSVEISGVEDRFNASLGTYHDLLKIIKDKDFLDNEENEDILEDIVLTLTLFEDREMIEERLKTYAHLFDDKVMKQLKRRRYTGWGRLSRKLINGIRDKQSGKTILDFLKSDGFANRNFMQLIHDDSLTFKEDIQKAQVSGQGDSLHEHIANLAGSPAIKKGILQTVKVVDELVKVMGRHKPENIVIEMARENQTTQKGQKNSRERMKRIEEGIKELGSQILKEHPVENTQLQNEKLYLYYLQNGRDMYVDQELDINRLSDYDVDHIVPQSFLKDDSIDNKVLTRSDKARGKSDNVPSEEVVKKMKNYWRQLLNAKLITQRKFDNLTKAERGGLSELDKAGFIKRQLVETRQITKHVAQILDSRMNTKYDENDKLIREVKVITLKSKLVSDFRKDFQFYKVREINNYHHAHDAYLNAVVGTALIKKYPKLESEFVYGDYKVYDVRKMIAKSEQEIGKATAKYFFYSNIMNFFKTEITLANGEIRKRPLIETNGETGEIVWDKGRDFATVRKVLSMPQVNIVKKTEVQTGGFSKESILPKRNSDKLIARKKDWDPKKYGGFDSPTVAYSVLVVAKVEKGKSKKLKSVKELLGITIMERSSFEKNPIDFLEAKGYKEVKKDLIIKLPKYSLFELENGRKRMLASAGELQKGNELALPSKYVNFLYLASHYEKLKGSPEDNEQKQLFVEQHKHYLDEIIEQISEFSKRVILADANLDKVLSAYNKHRDKPIREQAENIIHLFTLTNLGAPAAFKYFDTTIDRKRYTSTKEVLDATLIHQSITGLYETRIDLSQLGGDGGGGGGGSEAAAKGGTLQLDDEYRLYSPLVKPDQNIQFWLEQFPQAWAETAGMGLAKQVPPQVIQLKASATPVSVRQYPLSKEAQEGIRPHVQRLIQQGILVPVQSPWNTPLLPVRKPGTNDYRPVQDLREVNKRVQDIHPTVPNPYNLLCALPPQRSWYTVLDLKDAFFCLRLHPTSQPLFAFEWRDPGTGRTGQLTWTRLPQGFKNSPTIFDEALHRDLANFRIQHPQVTLLQYVDDLLLAGATKQDCLEGTKALLLELSDLGYRASAKKAQICRREVTYLGYSLRDGQRWLTEARKKTVVQIPAPTTAKQVREFLGTAGFCRLWIPGFATLAAPLYPLTKEKGEFSWAPEHQKAFDAIKKALLSAPALALPDVTKPFTLYVDERKGVARGVLTQTLGPWRRPVAYLSKKLDPVASGWPVCLKAIAAVAILVKDADKLTLGQNITVIAPHALENIVRQPPDRWMTNARMTHYQSLLLTERVTFAPPAALNPATLLPEETDEPVTHDCHQLLIEETGVRKDLTDIPLTGEVLTWFTDGSSYVVEGKRMAGAAVVDGTRTIWASSLPEGTSAQKAELMALTQALRLAEGKSINIYTDSRYAFATAHVHGAIYKQRGLLTSAGREIKNKEEILSLLEALHLPKRLAIIHCPGHQKAKDPISRGNQMADRVAKQAAQGVNLLAGKRTADGSEFEKRTADGSEFESPKKKAKVE

SEQ ID NO: 6921 - protein, 2087 aa, synthetic construct
MPAAKRVKLDGGDKKYSIGLDIGTNSVGWAVITDEYKVPSKKFKVLGNTDRHSIKKNLIGALLFDSGETAEATRLKRTARRRYTRRKNRICYLQEIFSNEMAKVDDSFFHRLEESFLVEEDKKHERHPIFGNIVDEVAYHEKYPTIYHLRKKLVDSTDKADLRLIYLALAHMIKFRGHFLIEGDLNPDNSDVDKLFIQLVQTYNQLFEENPINASGVDAKAILSARLSKSRRLENLIAQLPGEKKNGLFGNLIALSLGLTPNFKSNFDLAEDAKLQLSKDTYDDDLDNLLAQIGDQYADLFLAAKNLSDAILLSDILRVNTEITKAPLSASMIKRYDEHHQDLTLLKALVRQQLPEKYKEIFFDQSKNGYAGYIDGGASQEEFYKFIKPILEKMDGTEELLVKLNREDLLRKQRTFDNGSIPHQIHLGELHAILRRQEDFYPFLKDNREKIEKILTFRIPYYVGPLARGNSRFAWMTRKSEETITPWNFEEVVDKGASAQSFIERMTNFDKNLPNEKVLPKHSLLYEYFTVYNELTKVKYVTEGMRKPAFLSGEQKKAIVDLLFKTNRKVTVKQLKEDYFKKIECFDSVEISGVEDRFNASLGTYHDLLKIIKDKDFLDNEENEDILEDIVLTLTLFEDREMIEERLKTYAHLFDDKVMKQLKRRRYTGWGRLSRKLINGIRDKQSGKTILDFLKSDGFANRNFMQLIHDDSLTFKEDIQKAQVSGQGDSLHEHIANLAGSPAIKKGILQTVKVVDELVKVMGRHKPENIVIEMARENQTTQKGQKNSRERMKRIEEGIKELGSQILKEHPVENTQLQNEKLYLYYLQNGRDMYVDQELDINRLSDYDVDHIVPQSFLKDDSIDNKVLTRSDKARGKSDNVPSEEVVKKMKNYWRQLLNAKLITQRKFDNLTKAERGGLSELDKAGFIKRQLVETRQITKHVAQILDSRMNTKYDENDKLIREVKVITLKSKLVSDFRKDFQFYKVREINNYHHAHDAYLNAVVGTALIKKYPKLESEFVYGDYKVYDVRKMIAKSEQEIGKATAKYFFYSNIMNFFKTEITLANGEIRKRPLIETNGETGEIVWDKGRDFATVRKVLSMPQVNIVKKTEVQTGGFSKESILPKRNSDKLIARKKDWDPKKYGGFDSPTVAYSVLVVAKVEKGKSKKLKSVKELLGITIMERSSFEKNPIDFLEAKGYKEVKKDLIIKLPKYSLFELENGRKRMLASAGELQKGNELALPSKYVNFLYLASHYEKLKGSPEDNEQKQLFVEQHKHYLDEIIEQISEFSKRVILADANLDKVLSAYNKHRDKPIREQAENIIHLFTLTNLGAPAAFKYFDTTIDRKRYTSTKEVLDATLIHQSITGLYETRIDLSQLGGDGGGGGGGSEAAAKGGVPWLMKKPLQLTVLVPLHEYQERLLQQTALPKEQKELLQKLFLKYDALWQHWENQVGHRRIKPHNIATGTLAPRPQKQYPINPKAKPSIQIVIDDLLKQGVLIQQNSTMNTPVYPVPKPDGKWRMVLDYREVNKTIPLIAAQNQHSAGILSSIYRGKYKTTLDLTNGFWAHPITPESYWLTAFTWQGKQYCWTRLPQGFLNSPALFTADVVDLLKEIPNVQAYVDDIYISHDDPQEHLEQLEKIFSILLNAGYVVSLKKSEIAQREVEFLGFNITKEGRGLTDTFKQKLLNITPPKDLKQLQSILGLLNFARNFIPNYSELVKPLYTIVANANGKFISWTEDNSNQLQHIISVLNQADNLEERNPETRLIIKVNSSPSAGYIRYYNEGSKRPIMYVNYIFSKAEAKFTQTEKLLTTMHKGLIKAMDLAMGQEILVYSPIVSMTKIQRTPLPERKALPVRWITWMTYLEDPRIQFHYDKSLPELQQIPNVTEDVIAKTKHPSEFAMVFYTDGSAIKHPDVNKSHSAGMGIAQVQFIPEYKIVHQWSIPLGDHTAQLAEIAAVEFACKKALKISGPVLIVTDSFYVAESANKELPYWKSNGFLNNKKKPLRHVSKWKSIAECLQLKPDIIIMHEKGHQQPMTTLHTEGNNLADKLATQGSYVVHAGKRTADGSEFEKRTADGSEFESPKKKAKVE

SEQ ID NO: 6922 - protein, 2087 aa, synthetic construct
MPAAKRVKLDGGDKKYSIGLDIGTNSVGWAVITDEYKVPSKKFKVLGNTDRHSIKKNLIGALLFDSGETAEATRLKRTARRRYTRRKNRICYLQEIFSNEMAKVDDSFFHRLEESFLVEEDKKHERHPIFGNIVDEVAYHEKYPTIYHLRKKLVDSTDKADLRLIYLALAHMIKFRGHFLIEGDLNPDNSDVDKLFIQLVQTYNQLFEENPINASGVDAKAILSARLSKSRRLENLIAQLPGEKKNGLFGNLIALSLGLTPNFKSNFDLAEDAKLQLSKDTYDDDLDNLLAQIGDQYADLFLAAKNLSDAILLSDILRVNTEITKAPLSASMIKRYDEHHQDLTLLKALVRQQLPEKYKEIFFDQSKNGYAGYIDGGASQEEFYKFIKPILEKMDGTEELLVKLNREDLLRKQRTFDNGSIPHQIHLGELHAILRRQEDFYPFLKDNREKIEKILTFRIPYYVGPLARGNSRFAWMTRKSEETITPWNFEEVVDKGASAQSFIERMTNFDKNLPNEKVLPKHSLLYEYFTVYNELTKVKYVTEGMRKPAFLSGEQKKAIVDLLFKTNRKVTVKQLKEDYFKKIECFDSVEISGVEDRFNASLGTYHDLLKIIKDKDFLDNEENEDILEDIVLTLTLFEDREMIEERLKTYAHLFDDKVMKQLKRRRYTGWGRLSRKLINGIRDKQSGKTILDFLKSDGFANRNFMQLIHDDSLTFKEDIQKAQVSGQGDSLHEHIANLAGSPAIKKGILQTVKVVDELVKVMGRHKPENIVIEMARENQTTQKGQKNSRERMKRIEEGIKELGSQILKEHPVENTQLQNEKLYLYYLQNGRDMYVDQELDINRLSDYDVDHIVPQSFLKDDSIDNKVLTRSDKARGKSDNVPSEEVVKKMKNYWRQLLNAKLITQRKFDNLTKAERGGLSELDKAGFIKRQLVETRQITKHVAQILDSRMNTKYDENDKLIREVKVITLKSKLVSDFRKDFQFYKVREINNYHHAHDAYLNAVVGTALIKKYPKLESEFVYGDYKVYDVRKMIAKSEQEIGKATAKYFFYSNIMNFFKTEITLANGEIRKRPLIETNGETGEIVWDKGRDFATVRKVLSMPQVNIVKKTEVQTGGFSKESILPKRNSDKLIARKKDWDPKKYGGFDSPTVAYSVLVVAKVEKGKSKKLKSVKELLGITIMERSSFEKNPIDFLEAKGYKEVKKDLIIKLPKYSLFELENGRKRMLASAGELQKGNELALPSKYVNFLYLASHYEKLKGSPEDNEQKQLFVEQHKHYLDEIIEQISEFSKRVILADANLDKVLSAYNKHRDKPIREQAENIIHLFTLTNLGAPAAFKYFDTTIDRKRYTSTKEVLDATLIHQSITGLYETRIDLSQLGGDGGGGGGGSEAAAKGGVPWLMKKPLQLTVLVPLHEYQERLLQQTALPKEQKELLQKLFLKYDALWQHWENQVGHRRIKPHNIATGTLAPRPQKQYPINPKAKPSIQIVIDDLLKQGVLIQQNSTMNTPVYPVPKPDGKWRMVLDYREVNKTIPLIAAQNQHSAGILSSIYRGKYKTTLDLTNGFWAHPITPESYWLTAFTWQGKQYCWTRLPQGFLNSPALFNADVVDLLKEIPNVQAYVDDIYISHDDPQEHLEQLEKIFSILLNAGYVVSLKKSEIAQREVEFLGFNITKEGRGLTDTFKQKLLNITPPKDLKQLQSILGLLNFARNFIPNYSELVKPLYTIVAPANGKFISWTEDNSNQLQHIISVLNQADNLEERNPETRLIIKVNSSPSAGYIRYYNEGSKRPIMYVNYIFSKAEAKFTQTEKLLTTMHKGLIKAMDLAMGQEILVYSPIVSMTKIQRTPLPERKALPVRWITWMTYLEDPRIQFHYDKSLPELQQIPNVTEDVIAKTKHPSEFAMVFYTDGSAIKHPDVNKSHSAGMGIAQVQFIPEYKIVHQWSIPLGDHTAQLAEIAAVEFACKKALKISGPVLIVTDSFYVAESANKELPYWKSNGFLNNKKKPLRHVSKWKSIAECLQLKPDIIIMHEKGHQQPMTTLHTEGNNLADKLATQGSYVVHAGKRTADGSEFEKRTADGSEFESPKKKAKVE

SEQ ID NO: 6923 - protein, 2087 aa, synthetic construct
MPAAKRVKLDGGDKKYSIGLDIGTNSVGWAVITDEYKVPSKKFKVLGNTDRHSIKKNLIGALLFDSGETAEATRLKRTARRRYTRRKNRICYLQEIFSNEMAKVDDSFFHRLEESFLVEEDKKHERHPIFGNIVDEVAYHEKYPTIYHLRKKLVDSTDKADLRLIYLALAHMIKFRGHFLIEGDLNPDNSDVDKLFIQLVQTYNQLFEENPINASGVDAKAILSARLSKSRRLENLIAQLPGEKKNGLFGNLIALSLGLTPNFKSNFDLAEDAKLQLSKDTYDDDLDNLLAQIGDQYADLFLAAKNLSDAILLSDILRVNTEITKAPLSASMIKRYDEHHQDLTLLKALVRQQLPEKYKEIFFDQSKNGYAGYIDGGASQEEFYKFIKPILEKMDGTEELLVKLNREDLLRKQRTFDNGSIPHQIHLGELHAILRRQEDFYPFLKDNREKIEKILTFRIPYYVGPLARGNSRFAWMTRKSEETITPWNFEEVVDKGASAQSFIERMTNFDKNLPNEKVLPKHSLLYEYFTVYNELTKVKYVTEGMRKPAFLSGEQKKAIVDLLFKTNRKVTVKQLKEDYFKKIECFDSVEISGVEDRFNASLGTYHDLLKIIKDKDFLDNEENEDILEDIVLTLTLFEDREMIEERLKTYAHLFDDKVMKQLKRRRYTGWGRLSRKLINGIRDKQSGKTILDFLKSDGFANRNFMQLIHDDSLTFKEDIQKAQVSGQGDSLHEHIANLAGSPAIKKGILQTVKVVDELVKVMGRHKPENIVIEMARENQTTQKGQKNSRERMKRIEEGIKELGSQILKEHPVENTQLQNEKLYLYYLQNGRDMYVDQELDINRLSDYDVDHIVPQSFLKDDSIDNKVLTRSDKARGKSDNVPSEEVVKKMKNYWRQLLNAKLITQRKFDNLTKAERGGLSELDKAGFIKRQLVETRQITKHVAQILDSRMNTKYDENDKLIREVKVITLKSKLVSDFRKDFQFYKVREINNYHHAHDAYLNAVVGTALIKKYPKLESEFVYGDYKVYDVRKMIAKSEQEIGKATAKYFFYSNIMNFFKTEITLANGEIRKRPLIETNGETGEIVWDKGRDFATVRKVLSMPQVNIVKKTEVQTGGFSKESILPKRNSDKLIARKKDWDPKKYGGFDSPTVAYSVLVVAKVEKGKSKKLKSVKELLGITIMERSSFEKNPIDFLEAKGYKEVKKDLIIKLPKYSLFELENGRKRMLASAGELQKGNELALPSKYVNFLYLASHYEKLKGSPEDNEQKQLFVEQHKHYLDEIIEQISEFSKRVILADANLDKVLSAYNKHRDKPIREQAENIIHLFTLTNLGAPAAFKYFDTTIDRKRYTSTKEVLDATLIHQSITGLYETRIDLSQLGGDGGGGGGGSEAAAKGGIPWLMKKPLQLTTLVPLQEYEERLLKQTMLTGSYKEKLQSLFLKYDALWQHWENQVGHRRIKPHHIATGTVNPRPQKQYPINPKAKASIQTVINDLLKQGVLIQQNSIMNTPVYPVPKPDGKWRMVLDYREVNKTIPLIAAQNQHSAGILSSIFRGKYKTTLDLSNGFWAHSITPESYWLTAFTWLGQQYCWTRLPQGFLNSPALFNADVVDLLKEVPNVQVYVDDIYISHDDPREHLEQLEKVFSLLLNAGYVVSLKKSEIAQHEVEFLGFNITKEGRGLTETFKQKLLNITPPRDLKQLQSILGKLNFARNFIPNFSELVKPLYNIIATAPGKYITWTTDNSQQLQNIISMLNSAENLEERNPEVRLIMKVNTSPSAGYIRFYNEFAKRPIMYLNYVYTKAEVKFTNTEKLLTTIHKGLIKALDLGMGQEILVYSPIVSMTKIQKTPLPERKALPIRWITWMSYLEDPRIQFHYDKTLPELQQVPTVTDDIIAKIKHPSEFSMVFYTDGSAIKHPNVNKSHNAGMGIAQVQFKPEFTVINTWSIPLGDHTAQLAEVAAVEFACKKALKIDGPVLIVTDSFYVAESVNKELPYWQSNGFFNNKKKPLKHVSKWKSIADCIQLKPDIIIIHEKGHQPTASTFHTEGNNLADKLATQGSYVVNAGKRTADGSEFEKRTADGSEFESPKKKAKVE

SEQ ID NO: 6924 - protein, 2094 aa, synthetic construct
MPAAKRVKLDGGDKKYSIGLDIGTNSVGWAVITDEYKVPSKKFKVLGNTDRHSIKKNLIGALLFDSGETAEATRLKRTARRRYTRRKNRICYLQEIFSNEMAKVDDSFFHRLEESFLVEEDKKHERHPIFGNIVDEVAYHEKYPTIYHLRKKLVDSTDKADLRLIYLALAHMIKFRGHFLIEGDLNPDNSDVDKLFIQLVQTYNQLFEENPINASGVDAKAILSARLSKSRRLENLIAQLPGEKKNGLFGNLIALSLGLTPNFKSNFDLAEDAKLQLSKDTYDDDLDNLLAQIGDQYADLFLAAKNLSDAILLSDILRVNTEITKAPLSASMIKRYDEHHQDLTLLKALVRQQLPEKYKEIFFDQSKNGYAGYIDGGASQEEFYKFIKPILEKMDGTEELLVKLNREDLLRKQRTFDNGSIPHQIHLGELHAILRRQEDFYPFLKDNREKIEKILTFRIPYYVGPLARGNSRFAWMTRKSEETITPWNFEEVVDKGASAQSFIERMTNFDKNLPNEKVLPKHSLLYEYFTVYNELTKVKYVTEGMRKPAFLSGEQKKAIVDLLFKTNRKVTVKQLKEDYFKKIECFDSVEISGVEDRFNASLGTYHDLLKIIKDKDFLDNEENEDILEDIVLTLTLFEDREMIEERLKTYAHLFDDKVMKQLKRRRYTGWGRLSRKLINGIRDKQSGKTILDFLKSDGFANRNFMQLIHDDSLTFKEDIQKAQVSGQGDSLHEHIANLAGSPAIKKGILQTVKVVDELVKVMGRHKPENIVIEMARENQTTQKGQKNSRERMKRIEEGIKELGSQILKEHPVENTQLQNEKLYLYYLQNGRDMYVDQELDINRLSDYDVDHIVPQSFLKDDSIDNKVLTRSDKARGKSDNVPSEEVVKKMKNYWRQLLNAKLITQRKFDNLTKAERGGLSELDKAGFIKRQLVETRQITKHVAQILDSRMNTKYDENDKLIREVKVITLKSKLVSDFRKDFQFYKVREINNYHHAHDAYLNAVVGTALIKKYPKLESEFVYGDYKVYDVRKMIAKSEQEIGKATAKYFFYSNIMNFFKTEITLANGEIRKRPLIETNGETGEIVWDKGRDFATVRKVLSMPQVNIVKKTEVQTGGFSKESILPKRNSDKLIARKKDWDPKKYGGFDSPTVAYSVLVVAKVEKGKSKKLKSVKELLGITIMERSSFEKNPIDFLEAKGYKEVKKDLIIKLPKYSLFELENGRKRMLASAGELQKGNELALPSKYVNFLYLASHYEKLKGSPEDNEQKQLFVEQHKHYLDEIIEQISEFSKRVILADANLDKVLSAYNKHRDKPIREQAENIIHLFTLTNLGAPAAFKYFDTTIDRKRYTSTKEVLDATLIHQSITGLYETRIDLSQLGGDGGGGGGGSEAAAKGGVLNLEEEYRLHEKPVPSSIDPSWLQLFPTVWAERAGMGLANQVPPVVVELRSGASPVAVRQYPMSKEAREGIRPHIQRFLDLGVLVPCQSPWNTPLLPVKKPGTNDYRPVQDLREINKRVQDIHPTVPNPYNLLSSLPPSHTWYSVLDLKDAFFCLKLHPNSQPLFAFEWRDPEKGNTGQLTWTRLPQGFKNSPTLFNEALHRDLAPFRALNPQVVLLQYVDDLLVAAPTYRDCKEGTQKLLQELSKLGYRVSAKKAQLCQKEVTYLGYLLKEGKRWLTPARKATVMKIPPPTTPRQVREFLGKAGFCRLFIPGFASLAAPLYPLTKPSIPFIWTEEHQKAFDRIKEALLSAPALALPDLTKPFTLYVDERAGVARGVLTQTLGPWRRPVAYLSKKLDPVASGWPTCLKAVAAVALLLKDADKLTLGQNVTVIASHSLESIVRQPPDRWMTNARMTHYQSLLLNERVSFAPPAVLNPATLLPVESEATPVHRCSEILAEETGTRRDLKDQPLPGVPAWYTDGSSFIAEGKRRAGAAIVDGKRTVWASSLPEGTSAQKAELVALTQALRLAEGKDINIYTDSRYAFATAHIHGAIYKQRGWLTSAGKDIKNKEEILALLEAIHLPKRVAIIHCPGHQKGNDPVATGNRRADEAAKQAALSTRVLAETTKPAGKRTADGSEFEKRTADGSEFESPKKKAKVE

SEQ ID NO: 6925 - protein, 2096 aa, synthetic construct; identical to SEQ ID NO: 4519

SEQ ID NO: 6926 - protein, 2095 aa, synthetic construct
MPAAKRVKLDGGDKKYSIGLDIGTNSVGWAVITDEYKVPSKKFKVLGNTDRHSIKKNLIGALLFDSGETAEATRLKRTARRRYTRRKNRICYLQEIFSNEMAKVDDSFFHRLEESFLVEEDKKHERHPIFGNIVDEVAYHEKYPTIYHLRKKLVDSTDKADLRLIYLALAHMIKFRGHFLIEGDLNPDNSDVDKLFIQLVQTYNQLFEENPINASGVDAKAILSARLSKSRRLENLIAQLPGEKKNGLFGNLIALSLGLTPNFKSNFDLAEDAKLQLSKDTYDDDLDNLLAQIGDQYADLFLAAKNLSDAILLSDILRVNTEITKAPLSASMIKRYDEHHQDLTLLKALVRQQLPEKYKEIFFDQSKNGYAGYIDGGASQEEFYKFIKPILEKMDGTEELLVKLNREDLLRKQRTFDNGSIPHQIHLGELHAILRRQEDFYPFLKDNREKIEKILTFRIPYYVGPLARGNSRFAWMTRKSEETITPWNFEEVVDKGASAQSFIERMTNFDKNLPNEKVLPKHSLLYEYFTVYNELTKVKYVTEGMRKPAFLSGEQKKAIVDLLFKTNRKVTVKQLKEDYFKKIECFDSVEISGVEDRFNASLGTYHDLLKIIKDKDFLDNEENEDILEDIVLTLTLFEDREMIEERLKTYAHLFDDKVMKQLKRRRYTGWGRLSRKLINGIRDKQSGKTILDFLKSDGFANRNFMQLIHDDSLTFKEDIQKAQVSGQGDSLHEHIANLAGSPAIKKGILQTVKVVDELVKVMGRHKPENIVIEMARENQTTQKGQKNSRERMKRIEEGIKELGSQILKEHPVENTQLQNEKLYLYYLQNGRDMYVDQELDINRLSDYDVDHIVPQSFLKDDSIDNKVLTRSDKARGKSDNVPSEEVVKKMKNYWRQLLNAKLITQRKFDNLTKAERGGLSELDKAGFIKRQLVETRQITKHVAQILDSRMNTKYDENDKLIREVKVITLKSKLVSDFRKDFQFYKVREINNYHHAHDAYLNAVVGTALIKKYPKLESEFVYGDYKVYDVRKMIAKSEQEIGKATAKYFFYSNIMNFFKTEITLANGEIRKRPLIETNGETGEIVWDKGRDFATVRKVLSMPQVNIVKKTEVQTGGFSKESILPKRNSDKLIARKKDWDPKKYGGFDSPTVAYSVLVVAKVEKGKSKKLKSVKELLGITIMERSSFEKNPIDFLEAKGYKEVKKDLIIKLPKYSLFELENGRKRMLASAGELQKGNELALPSKYVNFLYLASHYEKLKGSPEDNEQKQLFVEQHKHYLDEIIEQISEFSKRVILADANLDKVLSAYNKHRDKPIREQAENIIHLFTLTNLGAPAAFKYFDTTIDRKRYTSTKEVLDATLIHQSITGLYETRIDLSQLGGDGGGGGEAAAKGGSGGTLQLEEEYRLFEPESTQKQEMDIWLKNFPQAWAETGGMGTAHCQAPVLIQLKATATPISIRQYPMPHEAYQGIKPHIRRMLDQGILKPCQSPWNTPLLPVKKPGTEDYRPVQDLREVNKRVEDIHPTVPNPYNLLSTLPPSHPWYTVLDLKDAFFCLRLHSESQLLFAFEWRDPEIGLSGQLTWTRLPQGFKNSPTLFNEALHSDLADFRVRYPALVLLQYVDDLLLAAATRTECLEGTKALLETLGNKGYRASAKKAQICLQEVTYLGYSLKDGQRWLTKARKEAILSIPVPKNSRQVREFLGTAGYCRLWIPGFAELAAPLYPLTRPGTLFQWGTEQQLAFEDIKKALLSSPALGLPDITKPFELFIDENSGFAKGVLVQKLGPWKRPVAYLSKKLDTVASGWPPCLRMVAAIAILVKDAGKLTLGQPLTILTSHPVEALVRQPPNKWLSNARMTHYQAMLLDAERVHFGPTVSLNPATLLPLPSGGNHHDCLQILAETHGTRPDLTDQPLPDADLTWYTDGSSFIRNGEREAGAAVTTESEVIWAAPLPPGTSAQRAELIALTQALKMAEGKKLTVYTDSRYAFATTHVHGEIYRRRGWLTSEGKEIKNKNEILALLEALFLPKRLSIIHCPGHQKGDSPQAKGNRLADDTAKKAATETHSSLTVLPAGKRTADGSEFEKRTADGSEFESPKKKAKVE

SEQ ID NO: 6927 - protein, 2094 aa, synthetic construct
MPAAKRVKLDGGDKKYSIGLDIGTNSVGWAVITDEYKVPSKKFKVLGNTDRHSIKKNLIGALLFDSGETAEATRLKRTARRRYTRRKNRICYLQEIFSNEMAKVDDSFFHRLEESFLVEEDKKHERHPIFGNIVDEVAYHEKYPTIYHLRKKLVDSTDKADLRLIYLALAHMIKFRGHFLIEGDLNPDNSDVDKLFIQLVQTYNQLFEENPINASGVDAKAILSARLSKSRRLENLIAQLPGEKKNGLFGNLIALSLGLTPNFKSNFDLAEDAKLQLSKDTYDDDLDNLLAQIGDQYADLFLAAKNLSDAILLSDILRVNTEITKAPLSASMIKRYDEHHQDLTLLKALVRQQLPEKYKEIFFDQSKNGYAGYIDGGASQEEFYKFIKPILEKMDGTEELLVKLNREDLLRKQRTFDNGSIPHQIHLGELHAILRRQEDFYPFLKDNREKIEKILTFRIPYYVGPLARGNSRFAWMTRKSEETITPWNFEEVVDKGASAQSFIERMTNFDKNLPNEKVLPKHSLLYEYFTVYNELTKVKYVTEGMRKPAFLSGEQKKAIVDLLFKTNRKVTVKQLKEDYFKKIECFDSVEISGVEDRFNASLGTYHDLLKIIKDKDFLDNEENEDILEDIVLTLTLFEDREMIEERLKTYAHLFDDKVMKQLKRRRYTGWGRLSRKLINGIRDKQSGKTILDFLKSDGFANRNFMQLIHDDSLTFKEDIQKAQVSGQGDSLHEHIANLAGSPAIKKGILQTVKVVDELVKVMGRHKPENIVIEMARENQTTQKGQKNSRERMKRIEEGIKELGSQILKEHPVENTQLQNEKLYLYYLQNGRDMYVDQELDINRLSDYDVDHIVPQSFLKDDSIDNKVLTRSDKARGKSDNVPSEEVVKKMKNYWRQLLNAKLITQRKFDNLTKAERGGLSELDKAGFIKRQLVETRQITKHVAQILDSRMNTKYDENDKLIREVKVITLKSKLVSDFRKDFQFYKVREINNYHHAHDAYLNAVVGTALIKKYPKLESEFVYGDYKVYDVRKMIAKSEQEIGKATAKYFFYSNIMNFFKTEITLANGEIRKRPLIETNGETGEIVWDKGRDFATVRKVLSMPQVNIVKKTEVQTGGFSKESILPKRNSDKLIARKKDWDPKKYGGFDSPTVAYSVLVVAKVEKGKSKKLKSVKELLGITIMERSSFEKNPIDFLEAKGYKEVKKDLIIKLPKYSLFELENGRKRMLASAGELQKGNELALPSKYVNFLYLASHYEKLKGSPEDNEQKQLFVEQHKHYLDEIIEQISEFSKRVILADANLDKVLSAYNKHRDKPIREQAENIIHLFTLTNLGAPAAFKYFDTTIDRKRYTSTKEVLDATLIHQSITGLYETRIDLSQLGGDGGGGGEAAAKGGSGGVLNLEEEYRLHEKPVPSSIDPSWLQLFPTVWAERAGMGLANQVPPVVVELRSGASPVAVRQYPMSKEAREGIRPHIQKFLDLGVLVPCRSPWNTPLLPVKKPGTNDYRPVQDLREINKRVQDIHPTVPNPYNLLSSLPPSYTWYSVLDLKDAFFCLRLHPNSQPLFAFEWKDPEKGNTGQLTWTRLPQGFKNSPTLFNEALHRDLAPFRALNPQVVLLQYVDDLLVAAPTYEDCKKGTQKLLQELSKLGYRVSAKKAQLCQREVTYLGYLLKEGKRWLTPARKATVMKIPVPTTPRQVREFLGKAGFCRLFIPGFASLAAPLYPLTKPSIPFIWTEEHQQAFDHIKKALLSAPALALPDLTKPFTLYIDERAGVARGVLTQTLGPWRRPVAYLSKKLDPVASGWPTCLKAVAAVALLLKDADKLTLGQNVTVIASHSLESIVRQPPDRWMTNARMTHYQSLLLNERVSFAPPAVLNPATLLPVESEATPVHRCSEILAEETGTRRDLEDQPLPGVPTWYTDGSSFITEGKRRAGAPIVDGKRTVWASSLPEGTSAQKAELVALTQALRLAEGKNINIYTDSRYAFATAHIHGAIYKQRGWLTSAGKDIKNKEEILALLEAIHLPRRVAIIHCPGHQRGSNPVATGNRRADEAAKQAALSTRVLAGTTKPAGKRTADGSEFEKRTADGSEFESPKKKAKVE

SEQ ID NO: 6928 - protein, 2218 aa, synthetic construct
MPAAKRVKLDGGDKKYSIGLDIGTNSVGWAVITDEYKVPSKKFKVLGNTDRHSIKKNLIGALLFDSGETAEATRLKRTARRRYTRRKNRICYLQEIFSNEMAKVDDSFFHRLEESFLVEEDKKHERHPIFGNIVDEVAYHEKYPTIYHLRKKLVDSTDKADLRLIYLALAHMIKFRGHFLIEGDLNPDNSDVDKLFIQLVQTYNQLFEENPINASGVDAKAILSARLSKSRRLENLIAQLPGEKKNGLFGNLIALSLGLTPNFKSNFDLAEDAKLQLSKDTYDDDLDNLLAQIGDQYADLFLAAKNLSDAILLSDILRVNTEITKAPLSASMIKRYDEHHQDLTLLKALVRQQLPEKYKEIFFDQSKNGYAGYIDGGASQEEFYKFIKPILEKMDGTEELLVKLNREDLLRKQRTFDNGSIPHQIHLGELHAILRRQEDFYPFLKDNREKIEKILTFRIPYYVGPLARGNSRFAWMTRKSEETITPWNFEEVVDKGASAQSFIERMTNFDKNLPNEKVLPKHSLLYEYFTVYNELTKVKYVTEGMRKPAFLSGEQKKAIVDLLFKTNRKVTVKQLKEDYFKKIECFDSVEISGVEDRFNASLGTYHDLLKIIKDKDFLDNEENEDILEDIVLTLTLFEDREMIEERLKTYAHLFDDKVMKQLKRRRYTGWGRLSRKLINGIRDKQSGKTILDFLKSDGFANRNFMQLIHDDSLTFKEDIQKAQVSGQGDSLHEHIANLAGSPAIKKGILQTVKVVDELVKVMGRHKPENIVIEMARENQTTQKGQKNSRERMKRIEEGIKELGSQILKEHPVENTQLQNEKLYLYYLQNGRDMYVDQELDINRLSDYDVDHIVPQSFLKDDSIDNKVLTRSDKARGKSDNVPSEEVVKKMKNYWRQLLNAKLITQRKFDNLTKAERGGLSELDKAGFIKRQLVETRQITKHVAQILDSRMNTKYDENDKLIREVKVITLKSKLVSDFRKDFQFYKVREINNYHHAHDAYLNAVVGTALIKKYPKLESEFVYGDYKVYDVRKMIAKSEQEIGKATAKYFFYSNIMNFFKTEITLANGEIRKRPLIETNGETGEIVWDKGRDFATVRKVLSMPQVNIVKKTEVQTGGFSKESILPKRNSDKLIARKKDWDPKKYGGFDSPTVAYSVLVVAKVEKGKSKKLKSVKELLGITIMERSSFEKNPIDFLEAKGYKEVKKDLIIKLPKYSLFELENGRKRMLASAGELQKGNELALPSKYVNFLYLASHYEKLKGSPEDNEQKQLFVEQHKHYLDEIIEQISEFSKRVILADANLDKVLSAYNKHRDKPIREQAENIIHLFTLTNLGAPAAFKYFDTTIDRKRYTSTKEVLDATLIHQSITGLYETRIDLSQLGGDGGGGGEAAAKGGSGGTLGDQGSRGSDPLPEPRVTLTVEGIPTEFLVNTGAEHSVLTKPMGKMGSKRTVVAGATGSKVYPWTTKRLLKIGQKQVTHSFLVIPECPAPLLGRDLLTKLKAQIQFSTEGPQVTWEDRPAMCLVLNLEEEYRLHEKPVPPSIDPSWLQLFPMVWAEKAGMGLANQVPPVVVELKSDASPVAVRQYPMSKEAREGIRPHIQRFLDLGILVPCQSPWNTPLLPVKKPGTNDYRPVQDLREVNKRVQDIHPTVPNPYNLLSSLPPSHTWYSVLDLKDAFFCLKLHPNSQPLFAFEWRDPEKGNTGQLTWTRLPQGFKNSPTLFNEALHRDLASFRALNPQVVMLQYVDDLLVAAPTYRDCKEGTRRLLQELSKLGYRVSAKKAQLCREEVTYLGYLLKGGKRWLTPARKATVMKIPTPTTPRQVREFLGTAGFCRLWIPGFASLAAPLYPLTRPKVPFTWTEAHQEAFGRIKEALLSAPALALPDLTKPFALYVDEKEGVARGVLTQTLGPWRRPVAYLSKKLDPVASGWPTCLKAIAAVALLLKDADKLTLGQNVLVIAPHNLESIVRQPPDRWMTNARMTHYQSLLLNERVSFAPPAILNPATLLPVESDDTPIHICSEILAEETGTRPDLRDQPLPGVPAWYTDGSSFIMDGRRQAGAAIVDNKRTVWASNLPEGTSAQKAELIALTQALRLAEGKSINIYTDSRYAFATAHVHGAIYKQRGWLTSAGKDIKNKEEILALLEAIHLPKRVAIIHCPGHQRGTDPVATGNRKADEAAKQAAQSTRILTETTKNAGKRTADGSEFEKRTADGSEFESPKKKAKVE

SEQ ID NO: 6929 - protein, 2096 aa, synthetic construct
MPAAKRVKLDGGDKKYSIGLDIGTNSVGWAVITDEYKVPSKKFKVLGNTDRHSIKKNLIGALLFDSGETAEATRLKRTARRRYTRRKNRICYLQEIFSNEMAKVDDSFFHRLEESFLVEEDKKHERHPIFGNIVDEVAYHEKYPTIYHLRKKLVDSTDKADLRLIYLALAHMIKFRGHFLIEGDLNPDNSDVDKLFIQLVQTYNQLFEENPINASGVDAKAILSARLSKSRRLENLIAQLPGEKKNGLFGNLIALSLGLTPNFKSNFDLAEDAKLQLSKDTYDDDLDNLLAQIGDQYADLFLAAKNLSDAILLSDILRVNTEITKAPLSASMIKRYDEHHQDLTLLKALVRQQLPEKYKEIFFDQSKNGYAGYIDGGASQEEFYKFIKPILEKMDGTEELLVKLNREDLLRKQRTFDNGSIPHQIHLGELHAILRRQEDFYPFLKDNREKIEKILTFRIPYYVGPLARGNSRFAWMTRKSEETITPWNFEEVVDKGASAQSFIERMTNFDKNLPNEKVLPKHSLLYEYFTVYNELTKVKYVTEGMRKPAFLSGEQKKAIVDLLFKTNRKVTVKQLKEDYFKKIECFDSVEISGVEDRFNASLGTYHDLLKIIKDKDFLDNEENEDILEDIVLTLTLFEDREMIEERLKTYAHLFDDKVMKQLKRRRYTGWGRLSRKLINGIRDKQSGKTILDFLKSDGFANRNFMQLIHDDSLTFKEDIQKAQVSGQGDSLHEHIANLAGSPAIKKGILQTVKVVDELVKVMGRHKPENIVIEMARENQTTQKGQKNSRERMKRIEEGIKELGSQILKEHPVENTQLQNEKLYLYYLQNGRDMYVDQELDINRLSDYDVDHIVPQSFLKDDSIDNKVLTRSDKARGKSDNVPSEEVVKKMKNYWRQLLNAKLITQRKFDNLTKAERGGLSELDKAGFIKRQLVETRQITKHVAQILDSRMNTKYDENDKLIREVKVITLKSKLVSDFRKDFQFYKVREINNYHHAHDAYLNAVVGTALIKKYPKLESEFVYGDYKVYDVRKMIAKSEQEIGKATAKYFFYSNIMNFFKTEITLANGEIRKRPLIETNGETGEIVWDKGRDFATVRKVLSMPQVNIVKKTEVQTGGFSKESILPKRNSDKLIARKKDWDPKKYGGFDSPTVAYSVLVVAKVEKGKSKKLKSVKELLGITIMERSSFEKNPIDFLEAKGYKEVKKDLIIKLPKYSLFELENGRKRMLASAGELQKGNELALPSKYVNFLYLASHYEKLKGSPEDNEQKQLFVEQHKHYLDEIIEQISEFSKRVILADANLDKVLSAYNKHRDKPIREQAENIIHLFTLTNLGAPAAFKYFDTTIDRKRYTSTKEVLDATLIHQSITGLYETRIDLSQLGGDGGGGGEAAAKGGSGGTLNIEDEYRLHETSKGPDVPLGSTWLSDFPQAWAETGGMGLAFRQAPLIISLKATSTPVSIKQYPMSQEARLGIKPHIQRLLDQGILVPCQSPWNTPLLPVKKPGTNDYRPVQDLREVNKRVEDIHPTVPNPYNLLSGLPPSHQWYTVLDLKDAFFCLRLHPTSQSLFAFEWKDPEMGISGQLTWTRLPQGFKNSPTLFNEALHRDLADFRIQHPDLILLQYVDDLLLAATSELDCQQGTRALLQTLGDLGYRASAKKAQICQKQVKYLGYLLKEGQRWLTEARKETVMGQPTPKTPRQLREFLGKAGLCRLFIPGFAEMAAPLYPLTKPGTLFKWGPDQQKAYQEIKQALLTAPALGLPDLTKPFELFVDEKQGYAKGVLTQKLGPWRRPVAYLSKKLDPVAAGWPPCLRMVAAIAVLTKDVGKLTMGQPLVILAPHAVEALVKQPPDRWLSNARMTHYQALLLDTDRVQFGPIVALNPATLLPLPEEGLQHDCLDILAEAHGTRPDLTDQPLPDADHTWYTDGSSFLQEGQRRAGAAVTTETEVIWAKALPAGTSAQRAELIALTQALKMAAGKKLNVYTDSRYAFATAHIHGEIYRRRGWLTSEGKEIKNKDEILALLKALFLPKRLSIIHCPGHQKGNHAEARGNRMADQAAREVATRETPETSTLLAGKRTADGSEFEKRTADGSEFESPKKKAKVE

SEQ ID NO: 6930 - protein, 2096 aa, synthetic construct
MPAAKRVKLDGGDKKYSIGLDIGTNSVGWAVITDEYKVPSKKFKVLGNTDRHSIKKNLIGALLFDSGETAEATRLKRTARRRYTRRKNRICYLQEIFSNEMAKVDDSFFHRLEESFLVEEDKKHERHPIFGNIVDEVAYHEKYPTIYHLRKKLVDSTDKADLRLIYLALAHMIKFRGHFLIEGDLNPDNSDVDKLFIQLVQTYNQLFEENPINASGVDAKAILSARLSKSRRLENLIAQLPGEKKNGLFGNLIALSLGLTPNFKSNFDLAEDAKLQLSKDTYDDDLDNLLAQIGDQYADLFLAAKNLSDAILLSDILRVNTEITKAPLSASMIKRYDEHHQDLTLLKALVRQQLPEKYKEIFFDQSKNGYAGYIDGGASQEEFYKFIKPILEKMDGTEELLVKLNREDLLRKQRTFDNGSIPHQIHLGELHAILRRQEDFYPFLKDNREKIEKILTFRIPYYVGPLARGNSRFAWMTRKSEETITPWNFEEVVDKGASAQSFIERMTNFDKNLPNEKVLPKHSLLYEYFTVYNELTKVKYVTEGMRKPAFLSGEQKKAIVDLLFKTNRKVTVKQLKEDYFKKIECFDSVEISGVEDRFNASLGTYHDLLKIIKDKDFLDNEENEDILEDIVLTLTLFEDREMIEERLKTYAHLFDDKVMKQLKRRRYTGWGRLSRKLINGIRDKQSGKTILDFLKSDGFANRNFMQLIHDDSLTFKEDIQKAQVSGQGDSLHEHIANLAGSPAIKKGILQTVKVVDELVKVMGRHKPENIVIEMARENQTTQKGQKNSRERMKRIEEGIKELGSQILKEHPVENTQLQNEKLYLYYLQNGRDMYVDQELDINRLSDYDVDHIVPQSFLKDDSIDNKVLTRSDKARGKSDNVPSEEVVKKMKNYWRQLLNAKLITQRKFDNLTKAERGGLSELDKAGFIKRQLVETRQITKHVAQILDSRMNTKYDENDKLIREVKVITLKSKLVSDFRKDFQFYKVREINNYHHAHDAYLNAVVGTALIKKYPKLESEFVYGDYKVYDVRKMIAKSEQEIGKATAKYFFYSNIMNFFKTEITLANGEIRKRPLIETNGETGEIVWDKGRDFATVRKVLSMPQVNIVKKTEVQTGGFSKESILPKRNSDKLIARKKDWDPKKYGGFDSPTVAYSVLVVAKVEKGKSKKLKSVKELLGITIMERSSFEKNPIDFLEAKGYKEVKKDLIIKLPKYSLFELENGRKRMLASAGELQKGNELALPSKYVNFLYLASHYEKLKGSPEDNEQKQLFVEQHKHYLDEIIEQISEFSKRVILADANLDKVLSAYNKHRDKPIREQAENIIHLFTLTNLGAPAAFKYFDTTIDRKRYTSTKEVLDATLIHQSITGLYETRIDLSQLGGDGGGGGEAAAKGGSGGTLNIEDEYRLHETSKGPDVPLGSTWLSDFPQAWAETGGMGLAVRQAPLIIPLKATSTPVSIKQYPMSQEARLGIKPHIQRLLDQGILVPCQSPWNTPLLPVKKPGTNDYRPVQDLREVNKRVEDIHPTVPNPYNLLSGLPPSHQWYTVLDLKDAFFCLRLHPTSQSLFAFEWRDPEMGISGQLTWTRLPQGFKNSPTLFNEALHRDLADFRIQHPDLILLQYVDDLLLAATSELDCQQGTRALLQTLGDLGYRASAKKAQICQKQVKYLGYLLKEGQRWLTEARKETVMGQPTPKTPRQLREFLGTAGFCRLWIPGFAEMAAPLYPLTKPGTLFEWGPDQQKAYQEIKQALLTAPALGLPDLTKPFELFVDEKQGYAKGVLTQKLGPWRRPVAYLSKKLDPVAAGWPPCLRMVAAIAVLTKDAGKLTMGQPLVILAPHAVEALVKQPPDRWLSNARMTHYQALLLDTDRVQFGPIVALNPATLLPLPEEGLQHDCLDILAEAHGTRPDLTDQPLPDADHTWYTDGSSFLQEGQRKAGAAVTTETEVVWAKALPAGTSAQRAELIALTQALKMAEGKKLNVYTDSRYAFATAHIHGEIYRRRGWLTSEGKEIKNKDEILALLKALFLPKRLSIIHCPGHQKGNRAEARGNRMADQAAREVATRETPETSTLLAGKRTADGSEFEKRTADGSEFESPKKKAKVE

SEQ ID NO: 6931 - protein, 2090 aa, synthetic construct
MPAAKRVKLDGGDKKYSIGLDIGTNSVGWAVITDEYKVPSKKFKVLGNTDRHSIKKNLIGALLFDSGETAEATRLKRTARRRYTRRKNRICYLQEIFSNEMAKVDDSFFHRLEESFLVEEDKKHERHPIFGNIVDEVAYHEKYPTIYHLRKKLVDSTDKADLRLIYLALAHMIKFRGHFLIEGDLNPDNSDVDKLFIQLVQTYNQLFEENPINASGVDAKAILSARLSKSRRLENLIAQLPGEKKNGLFGNLIALSLGLTPNFKSNFDLAEDAKLQLSKDTYDDDLDNLLAQIGDQYADLFLAAKNLSDAILLSDILRVNTEITKAPLSASMIKRYDEHHQDLTLLKALVRQQLPEKYKEIFFDQSKNGYAGYIDGGASQEEFYKFIKPILEKMDGTEELLVKLNREDLLRKQRTFDNGSIPHQIHLGELHAILRRQEDFYPFLKDNREKIEKILTFRIPYYVGPLARGNSRFAWMTRKSEETITPWNFEEVVDKGASAQSFIERMTNFDKNLPNEKVLPKHSLLYEYFTVYNELTKVKYVTEGMRKPAFLSGEQKKAIVDLLFKTNRKVTVKQLKEDYFKKIECFDSVEISGVEDRFNASLGTYHDLLKIIKDKDFLDNEENEDILEDIVLTLTLFEDREMIEERLKTYAHLFDDKVMKQLKRRRYTGWGRLSRKLINGIRDKQSGKTILDFLKSDGFANRNFMQLIHDDSLTFKEDIQKAQVSGQGDSLHEHIANLAGSPAIKKGILQTVKVVDELVKVMGRHKPENIVIEMARENQTTQKGQKNSRERMKRIEEGIKELGSQILKEHPVENTQLQNEKLYLYYLQNGRDMYVDQELDINRLSDYDVDHIVPQSFLKDDSIDNKVLTRSDKARGKSDNVPSEEVVKKMKNYWRQLLNAKLITQRKFDNLTKAERGGLSELDKAGFIKRQLVETRQITKHVAQILDSRMNTKYDENDKLIREVKVITLKSKLVSDFRKDFQFYKVREINNYHHAHDAYLNAVVGTALIKKYPKLESEFVYGDYKVYDVRKMIAKSEQEIGKATAKYFFYSNIMNFFKTEITLANGEIRKRPLIETNGETGEIVWDKGRDFATVRKVLSMPQVNIVKKTEVQTGGFSKESILPKRNSDKLIARKKDWDPKKYGGFDSPTVAYSVLVVAKVEKGKSKKLKSVKELLGITIMERSSFEKNPIDFLEAKGYKEVKKDLIIKLPKYSLFELENGRKRMLASAGELQKGNELALPSKYVNFLYLASHYEKLKGSPEDNEQKQLFVEQHKHYLDEIIEQISEFSKRVILADANLDKVLSAYNKHRDKPIREQAENIIHLFTLTNLGAPAAFKYFDTTIDRKRYTSTKEVLDATLIHQSITGLYETRIDLSQLGGDGGGGGEAAAKGGSGGTLQLDDEYRLYSPLVKPDQNIQFWLEQFPQAWAETAGMGLAKQVPPQVIQLKASATPVSVRQYPLSKEAQEGIRPHVQRLIQQGILVPVQSPWNTPLLPVRKPGTNDYRPVQDLREVNKRVQDIHPTVPNPYNLLCALPPQRSWYTVLDLKDAFFCLRLHPTSQPLFAFEWRDPGTGRTGQLTWTRLPQGFKNSPTIFDEALHRDLANFRIQHPQVTLLQYVDDLLLAGATKQDCLEGTKALLLELSDLGYRASAKKAQICRREVTYLGYSLRDGQRWLTEARKKTVVQIPAPTTAKQVREFLGTAGFCRLWIPGFATLAAPLYPLTKEKGEFSWAPEHQKAFDAIKKALLSAPALALPDVTKPFTLYVDERKGVARGVLTQTLGPWRRPVAYLSKKLDPVASGWPVCLKAIAAVAILVKDADKLTLGQNITVIAPHALENIVRQPPDRWMTNARMTHYQSLLLTERVTFAPPAALNPATLLPEETDEPVTHDCHQLLIEETGVRKDLTDIPLTGEVLTWFTDGSSYVVEGKRMAGAAVVDGTRTIWASSLPEGTSAQKAELMALTQALRLAEGKSINIYTDSRYAFATAHVHGAIYKQRGLLTSAGREIKNKEEILSLLEALHLPKRLAIIHCPGHQKAKDPISRGNQMADRVAKQAAQGVNLLAGKRTADGSEFEKRTADGSEFESPKKKAKVE

SEQ ID NO: 6932 - protein, 2087 aa, synthetic construct
MPAAKRVKLDGGDKKYSIGLDIGTNSVGWAVITDEYKVPSKKFKVLGNTDRHSIKKNLIGALLFDSGETAEATRLKRTARRRYTRRKNRICYLQEIFSNEMAKVDDSFFHRLEESFLVEEDKKHERHPIFGNIVDEVAYHEKYPTIYHLRKKLVDSTDKADLRLIYLALAHMIKFRGHFLIEGDLNPDNSDVDKLFIQLVQTYNQLFEENPINASGVDAKAILSARLSKSRRLENLIAQLPGEKKNGLFGNLIALSLGLTPNFKSNFDLAEDAKLQLSKDTYDDDLDNLLAQIGDQYADLFLAAKNLSDAILLSDILRVNTEITKAPLSASMIKRYDEHHQDLTLLKALVRQQLPEKYKEIFFDQSKNGYAGYIDGGASQEEFYKFIKPILEKMDGTEELLVKLNREDLLRKQRTFDNGSIPHQIHLGELHAILRRQEDFYPFLKDNREKIEKILTFRIPYYVGPLARGNSRFAWMTRKSEETITPWNFEEVVDKGASAQSFIERMTNFDKNLPNEKVLPKHSLLYEYFTVYNELTKVKYVTEGMRKPAFLSGEQKKAIVDLLFKTNRKVTVKQLKEDYFKKIECFDSVEISGVEDRFNASLGTYHDLLKIIKDKDFLDNEENEDILEDIVLTLTLFEDREMIEERLKTYAHLFDDKVMKQLKRRRYTGWGRLSRKLINGIRDKQSGKTILDFLKSDGFANRNFMQLIHDDSLTFKEDIQKAQVSGQGDSLHEHIANLAGSPAIKKGILQTVKVVDELVKVMGRHKPENIVIEMARENQTTQKGQKNSRERMKRIEEGIKELGSQILKEHPVENTQLQNEKLYLYYLQNGRDMYVDQELDINRLSDYDVDHIVPQSFLKDDSIDNKVLTRSDKARGKSDNVPSEEVVKKMKNYWRQLLNAKLITQRKFDNLTKAERGGLSELDKAGFIKRQLVETRQITKHVAQILDSRMNTKYDENDKLIREVKVITLKSKLVSDFRKDFQFYKVREINNYHHAHDAYLNAVVGTALIKKYPKLESEFVYGDYKVYDVRKMIAKSEQEIGKATAKYFFYSNIMNFFKTEITLANGEIRKRPLIETNGETGEIVWDKGRDFATVRKVLSMPQVNIVKKTEVQTGGFSKESILPKRNSDKLIARKKDWDPKKYGGFDSPTVAYSVLVVAKVEKGKSKKLKSVKELLGITIMERSSFEKNPIDFLEAKGYKEVKKDLIIKLPKYSLFELENGRKRMLASAGELQKGNELALPSKYVNFLYLASHYEKLKGSPEDNEQKQLFVEQHKHYLDEIIEQISEFSKRVILADANLDKVLSAYNKHRDKPIREQAENIIHLFTLTNLGAPAAFKYFDTTIDRKRYTSTKEVLDATLIHQSITGLYETRIDLSQLGGDGGGGGEAAAKGGSGGIPWLMKKPLQLTTLVPLQEYEERLLKQTMLTGSYKEKLQSLFLKYDALWQHWENQVGHRRIKPHHIATGTVNPRPQKQYPINPKAKASIQTVINDLLKQGVLIQQNSIMNTPVYPVPKPDGKWRMVLDYREVNKTIPLIAAQNQHSAGILSSIFRGKYKTTLDLSNGFWAHSITPESYWLTAFTWLGQQYCWTRLPQGFLNSPALFNADVVDLLKEVPNVQVYVDDIYISHDDPREHLEQLEKVFSLLLNAGYVVSLKKSEIAQHEVEFLGFNITKEGRGLTETFKQKLLNITPPRDLKQLQSILGLLNFARNFIPNFSELVKPLYNIIATAPGKYITWTTDNSQQLQNIISMLNSAENLEERNPEVRLIMKVNTSPSAGYIRFYNEFAKRPIMYLNYVYTKAEVKFTNTEKLLTTIHKGLIKALDLGMGQEILVYSPIVSMTKIQKTPLPERKALPIRWITWMSYLEDPRIQFHYDKTLPELQQVPTVTDDIIAKIKHPSEFSMVFYTDGSAIKHPNVNKSHNAGMGIAQVQFKPEFTVINTWSIPLGDHTAQLAEVAAVEFACKKALKIDGPVLIVTDSFYVAESVNKELPYWQSNGFFNNKKKPLKHVSKWKSIADCIQLKPDIIIIHEKGHQPTASTFHTEGNNLADKLATQGSYVVNAGKRTADGSEFEKRTADGSEFESPKKKAKVE

SEQ ID NO: 6933 - protein, 2098 aa, synthetic construct
MPAAKRVKLDGGDKKYSIGLDIGTNSVGWAVITDEYKVPSKKFKVLGNTDRHSIKKNLIGALLFDSGETAEATRLKRTARRRYTRRKNRICYLQEIFSNEMAKVDDSFFHRLEESFLVEEDKKHERHPIFGNIVDEVAYHEKYPTIYHLRKKLVDSTDKADLRLIYLALAHMIKFRGHFLIEGDLNPDNSDVDKLFIQLVQTYNQLFEENPINASGVDAKAILSARLSKSRRLENLIAQLPGEKKNGLFGNLIALSLGLTPNFKSNFDLAEDAKLQLSKDTYDDDLDNLLAQIGDQYADLFLAAKNLSDAILLSDILRVNTEITKAPLSASMIKRYDEHHQDLTLLKALVRQQLPEKYKEIFFDQSKNGYAGYIDGGASQEEFYKFIKPILEKMDGTEELLVKLNREDLLRKQRTFDNGSIPHQIHLGELHAILRRQEDFYPFLKDNREKIEKILTFRIPYYVGPLARGNSRFAWMTRKSEETITPWNFEEVVDKGASAQSFIERMTNFDKNLPNEKVLPKHSLLYEYFTVYNELTKVKYVTEGMRKPAFLSGEQKKAIVDLLFKTNRKVTVKQLKEDYFKKIECFDSVEISGVEDRFNASLGTYHDLLKIIKDKDFLDNEENEDILEDIVLTLTLFEDREMIEERLKTYAHLFDDKVMKQLKRRRYTGWGRLSRKLINGIRDKQSGKTILDFLKSDGFANRNFMQLIHDDSLTFKEDIQKAQVSGQGDSLHEHIANLAGSPAIKKGILQTVKVVDELVKVMGRHKPENIVIEMARENQTTQKGQKNSRERMKRIEEGIKELGSQILKEHPVENTQLQNEKLYLYYLQNGRDMYVDQELDINRLSDYDVDHIVPQSFLKDDSIDNKVLTRSDKARGKSDNVPSEEVVKKMKNYWRQLLNAKLITQRKFDNLTKAERGGLSELDKAGFIKRQLVETRQITKHVAQILDSRMNTKYDENDKLIREVKVITLKSKLVSDFRKDFQFYKVREINNYHHAHDAYLNAVVGTALIKKYPKLESEFVYGDYKVYDVRKMIAKSEQEIGKATAKYFFYSNIMNFFKTEITLANGEIRKRPLIETNGETGEIVWDKGRDFATVRKVLSMPQVNIVKKTEVQTGGFSKESILPKRNSDKLIARKKDWDPKKYGGFDSPTVAYSVLVVAKVEKGKSKKLKSVKELLGITIMERSSFEKNPIDFLEAKGYKEVKKDLIIKLPKYSLFELENGRKRMLASAGELQKGNELALPSKYVNFLYLASHYEKLKGSPEDNEQKQLFVEQHKHYLDEIIEQISEFSKRVILADANLDKVLSAYNKHRDKPIREQAENIIHLFTLTNLGAPAAFKYFDTTIDRKRYTSTKEVLDATLIHQSITGLYETRIDLSQLGGDGGEAAAKGGSGGGGGTAPLEEEYRLFLEAPIQNVTLLEQWKREIPKVWAEINPPGLASTQAPIHVQLLSTALPVRVRQYPITLEAKRSLRETIRKFRAAGILRPVHSPWNTPLLPVRKSGTSEYRMVQDLREVNKRVETIHPTVPNPYTLLSLLPPDRIWYSVLDLKDAFFCIPLAPESQLIFAFEWADAEEGESGQLTWTRLPQGFKNSPTLFNEALNRDLQGFRLDHPSVSLLQYVDDLLIAADTQAACLSATRDLLMTLAELGYRVSGKKAQLCQEEVTYLGFKIHKGSRSLSNSRTQAILQIPVPKTKRQVREFLGTIGYCRLWIPGFAELAQPLYAATRPGNDPLVWGEKEEEAFQSLKLALTQPPALALPSLDKPFQLFVEETSGAAKGVLTQALGPWKRPVAYLSKRLDPVAAGWPRCLRAIAAAALLTREASKLTFGQDIEITSSHNLESLLRSPPDKWLTNARITQYQVLLLDPPRVRFKQTAALNPATLLPETDDTLPIHHCLDTLDSLTSTRPDLTDQPLAQAEATLFTDGSSYIRDGKRYAGAAVVTLDSVIWAEPLPIGTSAQKAELIALTKALEWSKDKSVNIYTDSRYAFATLHVHGMIYRERGWLTAGGKAIKNAPEILALLTAVWLPKRVAVMHCKGHQKDDAPTSTGNRRADEVAREVAIRPLSTQATISAGKRTADGSEFEKRTADGSEFESPKKKAKVE

SEQ ID NO: 6934 - protein, 2102 aa, synthetic construct
MPAAKRVKLDGGDKKYSIGLDIGTNSVGWAVITDEYKVPSKKFKVLGNTDRHSIKKNLIGALLFDSGETAEATRLKRTARRRYTRRKNRICYLQEIFSNEMAKVDDSFFHRLEESFLVEEDKKHERHPIFGNIVDEVAYHEKYPTIYHLRKKLVDSTDKADLRLIYLALAHMIKFRGHFLIEGDLNPDNSDVDKLFIQLVQTYNQLFEENPINASGVDAKAILSARLSKSRRLENLIAQLPGEKKNGLFGNLIALSLGLTPNFKSNFDLAEDAKLQLSKDTYDDDLDNLLAQIGDQYADLFLAAKNLSDAILLSDILRVNTEITKAPLSASMIKRYDEHHQDLTLLKALVRQQLPEKYKEIFFDQSKNGYAGYIDGGASQEEFYKFIKPILEKMDGTEELLVKLNREDLLRKQRTFDNGSIPHQIHLGELHAILRRQEDFYPFLKDNREKIEKILTFRIPYYVGPLARGNSRFAWMTRKSEETITPWNFEEVVDKGASAQSFIERMTNFDKNLPNEKVLPKHSLLYEYFTVYNELTKVKYVTEGMRKPAFLSGEQKKAIVDLLFKTNRKVTVKQLKEDYFKKIECFDSVEISGVEDRFNASLGTYHDLLKIIKDKDFLDNEENEDILEDIVLTLTLFEDREMIEERLKTYAHLFDDKVMKQLKRRRYTGWGRLSRKLINGIRDKQSGKTILDFLKSDGFANRNFMQLIHDDSLTFKEDIQKAQVSGQGDSLHEHIANLAGSPAIKKGILQTVKVVDELVKVMGRHKPENIVIEMARENQTTQKGQKNSRERMKRIEEGIKELGSQILKEHPVENTQLQNEKLYLYYLQNGRDMYVDQELDINRLSDYDVDHIVPQSFLKDDSIDNKVLTRSDKARGKSDNVPSEEVVKKMKNYWRQLLNAKLITQRKFDNLTKAERGGLSELDKAGFIKRQLVETRQITKHVAQILDSRMNTKYDENDKLIREVKVITLKSKLVSDFRKDFQFYKVREINNYHHAHDAYLNAVVGTALIKKYPKLESEFVYGDYKVYDVRKMIAKSEQEIGKATAKYFFYSNIMNFFKTEITLANGEIRKRPLIETNGETGEIVWDKGRDFATVRKVLSMPQVNIVKKTEVQTGGFSKESILPKRNSDKLIARKKDWDPKKYGGFDSPTVAYSVLVVAKVEKGKSKKLKSVKELLGITIMERSSFEKNPIDFLEAKGYKEVKKDLIIKLPKYSLFELENGRKRMLASAGELQKGNELALPSKYVNFLYLASHYEKLKGSPEDNEQKQLFVEQHKHYLDEIIEQISEFSKRVILADANLDKVLSAYNKHRDKPIREQAENIIHLFTLTNLGAPAAFKYFDTTIDRKRYTSTKEVLDATLIHQSITGLYETRIDLSQLGGDGGEAAAKGGSGGGGGTVSLQDEHRLFDIPVTTSLPDVWLQDFPQAWAETGGLGRAKCQAPIIIDLKPTAVPVSIKQYPMSLEAHMGIRQHIIKFLELGVLRPCRSPWNTPLLPVKKPGTQDYRPVQDLREINKRTVDIHPTVPNPYNLLSTLKPDYSWYTVLDLKDAFFCLPLAPQSQELFAFEWKDPERGISGQLTWTRLPQGFKNSPTLFDEALHRDLTDFRTQHPEVTLLQYVDDLLLAAPTKKACTQGTRHLLQELGEKGYRASAKKAQICQTKVTYLGYILSEGKRWLTPGRIETVARIPPPRNPREVREFLGTAGFCRLWIPGFAELAAPLYALTKESTPFTWQTEHQLAFEALKKALLSAPALGLPDTSKPFTLFLDERQGIAKGVLTQKLGPWKRPVAYLSKKLDPVAAGWPPCLRIMAATAMLVKDSAKLTLGQPLTVITPHTLEAIVRQPPDRWITNARLTHYQALLLDTDRVQFGPPVTLNPATLLPVPENQPSPHDCRQVLAETHGTREDLKDQELPDADHTWYTDGSSYLDSGTRRAGAAVVDGHNTIWAQSLPPGTSAQKAELIALTKALELSKGKKANIYTDSRYAFATAHTHGSIYERRGLLTSEGKEIKNKAEIIALLKALFLPQEVAIIHCPGHQKGQDPVAVGNRQADRVARQAAMAEVLTLATEPDNTSHITAGKRTADGSEFEKRTADGSEFESPKKKAKVE

SEQ ID NO: 6935 - protein, 2102 aa, synthetic construct
MPAAKRVKLDGGDKKYSIGLDIGTNSVGWAVITDEYKVPSKKFKVLGNTDRHSIKKNLIGALLFDSGETAEATRLKRTARRRYTRRKNRICYLQEIFSNEMAKVDDSFFHRLEESFLVEEDKKHERHPIFGNIVDEVAYHEKYPTIYHLRKKLVDSTDKADLRLIYLALAHMIKFRGHFLIEGDLNPDNSDVDKLFIQLVQTYNQLFEENPINASGVDAKAILSARLSKSRRLENLIAQLPGEKKNGLFGNLIALSLGLTPNFKSNFDLAEDAKLQLSKDTYDDDLDNLLAQIGDQYADLFLAAKNLSDAILLSDILRVNTEITKAPLSASMIKRYDEHHQDLTLLKALVRQQLPEKYKEIFFDQSKNGYAGYIDGGASQEEFYKFIKPILEKMDGTEELLVKLNREDLLRKQRTFDNGSIPHQIHLGELHAILRRQEDFYPFLKDNREKIEKILTFRIPYYVGPLARGNSRFAWMTRKSEETITPWNFEEVVDKGASAQSFIERMTNFDKNLPNEKVLPKHSLLYEYFTVYNELTKVKYVTEGMRKPAFLSGEQKKAIVDLLFKTNRKVTVKQLKEDYFKKIECFDSVEISGVEDRFNASLGTYHDLLKIIKDKDFLDNEENEDILEDIVLTLTLFEDREMIEERLKTYAHLFDDKVMKQLKRRRYTGWGRLSRKLINGIRDKQSGKTILDFLKSDGFANRNFMQLIHDDSLTFKEDIQKAQVSGQGDSLHEHIANLAGSPAIKKGILQTVKVVDELVKVMGRHKPENIVIEMARENQTTQKGQKNSRERMKRIEEGIKELGSQILKEHPVENTQLQNEKLYLYYLQNGRDMYVDQELDINRLSDYDVDHIVPQSFLKDDSIDNKVLTRSDKARGKSDNVPSEEVVKKMKNYWRQLLNAKLITQRKFDNLTKAERGGLSELDKAGFIKRQLVETRQITKHVAQILDSRMNTKYDENDKLIREVKVITLKSKLVSDFRKDFQFYKVREINNYHHAHDAYLNAVVGTALIKKYPKLESEFVYGDYKVYDVRKMIAKSEQEIGKATAKYFFYSNIMNFFKTEITLANGEIRKRPLIETNGETGEIVWDKGRDFATVRKVLSMPQVNIVKKTEVQTGGFSKESILPKRNSDKLIARKKDWDPKKYGGFDSPTVAYSVLVVAKVEKGKSKKLKSVKELLGITIMERSSFEKNPIDFLEAKGYKEVKKDLIIKLPKYSLFELENGRKRMLASAGELQKGNELALPSKYVNFLYLASHYEKLKGSPEDNEQKQLFVEQHKHYLDEIIEQISEFSKRVILADANLDKVLSAYNKHRDKPIREQAENIIHLFTLTNLGAPAAFKYFDTTIDRKRYTSTKEVLDATLIHQSITGLYETRIDLSQLGGDGGEAAAKGGSGGGGGTVSLQDEHRLFDIPVTTSLPDVWLQDFPQAWAETGGLGRAKCQAPIIIDLKPTAVPVSIKQYPMSLEAHMGIRQHIIKFLELGVLRPCRSPWNTPLLPVKKPGTQDYRPVQDLREINKRTVDIHPTVPNPYNLLSTLKPDYSWYTVLDLKDAFFCLPLAPQSQELFAFEWKDPERGISGQLTWTRLPQGFKNSPTLFNEALHRDLTDFRTQHPEVTLLQYVDDLLLAAPTKKACTQGTRHLLQELGEKGYRASAKKAQICQTKVTYLGYILSEGKRWLTPGRIETVARIPPPRNPREVREFLGTAGFCRLWIPGFAELAAPLYALTKPSTPFTWQTEHQLAFEALKKALLSAPALGLPDTSKPFTLFLDERQGIAKGVLTQKLGPWKRPVAYLSKKLDPVAAGWPPCLRIMAATAMLVKDSAKLTLGQPLTVITPHTLEAIVRQPPDRWITNARLTHYQALLLDTDRVQFGPPVTLNPATLLPVPENQPSPHDCRQVLAETHGTREDLKDQELPDADHTWYTDGSSYLDSGTRRAGAAVVDGHNTIWAQSLPPGTSAQKAELIALTKALELSKGKKANIYTDSRYAFATAHTHGSIYERRGWLTSEGKEIKNKAEIIALLKALFLPQEVAIIHCPGHQKGQDPVAVGNRQADRVARQAAMAEVLTLATEPDNTSHITAGKRTADGSEFEKRTADGSEFESPKKKAKVE

SEQ ID NO: 6936 - protein, 2087 aa, synthetic construct
MPAAKRVKLDGGDKKYSIGLDIGTNSVGWAVITDEYKVPSKKFKVLGNTDRHSIKKNLIGALLFDSGETAEATRLKRTARRRYTRRKNRICYLQEIFSNEMAKVDDSFFHRLEESFLVEEDKKHERHPIFGNIVDEVAYHEKYPTIYHLRKKLVDSTDKADLRLIYLALAHMIKFRGHFLIEGDLNPDNSDVDKLFIQLVQTYNQLFEENPINASGVDAKAILSARLSKSRRLENLIAQLPGEKKNGLFGNLIALSLGLTPNFKSNFDLAEDAKLQLSKDTYDDDLDNLLAQIGDQYADLFLAAKNLSDAILLSDILRVNTEITKAPLSASMIKRYDEHHQDLTLLKALVRQQLPEKYKEIFFDQSKNGYAGYIDGGASQEEFYKFIKPILEKMDGTEELLVKLNREDLLRKQRTFDNGSIPHQIHLGELHAILRRQEDFYPFLKDNREKIEKILTFRIPYYVGPLARGNSRFAWMTRKSEETITPWNFEEVVDKGASAQSFIERMTNFDKNLPNEKVLPKHSLLYEYFTVYNELTKVKYVTEGMRKPAFLSGEQKKAIVDLLFKTNRKVTVKQLKEDYFKKIECFDSVEISGVEDRFNASLGTYHDLLKIIKDKDFLDNEENEDILEDIVLTLTLFEDREMIEERLKTYAHLFDDKVMKQLKRRRYTGWGRLSRKLINGIRDKQSGKTILDFLKSDGFANRNFMQLIHDDSLTFKEDIQKAQVSGQGDSLHEHIANLAGSPAIKKGILQTVKVVDELVKVMGRHKPENIVIEMARENQTTQKGQKNSRERMKRIEEGIKELGSQILKEHPVENTQLQNEKLYLYYLQNGRDMYVDQELDINRLSDYDVDHIVPQSFLKDDSIDNKVLTRSDKARGKSDNVPSEEVVKKMKNYWRQLLNAKLITQRKFDNLTKAERGGLSELDKAGFIKRQLVETRQITKHVAQILDSRMNTKYDENDKLIREVKVITLKSKLVSDFRKDFQFYKVREINNYHHAHDAYLNAVVGTALIKKYPKLESEFVYGDYKVYDVRKMIAKSEQEIGKATAKYFFYSNIMNFFKTEITLANGEIRKRPLIETNGETGEIVWDKGRDFATVRKVLSMPQVNIVKKTEVQTGGFSKESILPKRNSDKLIARKKDWDPKKYGGFDSPTVAYSVLVVAKVEKGKSKKLKSVKELLGITIMERSSFEKNPIDFLEAKGYKEVKKDLIIKLPKYSLFELENGRKRMLASAGELQKGNELALPSKYVNFLYLASHYEKLKGSPEDNEQKQLFVEQHKHYLDEIIEQISEFSKRVILADANLDKVLSAYNKHRDKPIREQAENIIHLFTLTNLGAPAAFKYFDTTIDRKRYTSTKEVLDATLIHQSITGLYETRIDLSQLGGDGGEAAAKGGSGGGGGVPWILKKPLELTIKLDLEEQQGTLLNNSILSKKGKEELKQLFEKYSALWQSWENQVGHRRIRPHKIATGTVKPTPQKQYHINPKAKPDIQIVINDLLKQGVLIQKESTMNTPVYPVPKPNGRWRMVLDYRAVNKVTPLIAVQNQHSYGILGSLFKGRYKTTIDLSNGFWAHPIVPEDYWITAFTWQGKQYCWTVLPQGFLNSPGLFTGDVVDLLQGIPNVEVYVDDVYISHDSEKEHLEYLDILFNRLKEAGYIISLKKSNIANSIVDFLGFQITNEGRGLTDTFKEKLENITAPTTLKQLQSILGLLNFARNFIPDFTELIAPLYALIPKSTKNYVPWQIEHSTTLETLITKLNGAEYLQGRKGDKTLIMKVNASYTTGYIRYYNEGEKKPISYVSIVFSKTELKFTELEKLLTTVHKGLLKALDLSMGQNIHVYSPIVSMQNIQKTPQTAKKALASRWLSWLSYLEDPRIRFFYDPQMPALKDLPAVDTGKDNKKHPSNFQHIFYTDGSAITSPTKEGHLNAGMGIVYFINKDGNLQKQQEWSISLGNHTAQFAEIAAFEFALKKCLPLGGNILVVTDSNYVAKAYNEELDVWASNGFVNNRKKPLKHISKWKSVADLKRLRPDVVVTHEPGHQKLDSSPHAYGNNLADQLATQASFKVHAGKRTADGSEFEKRTADGSEFESPKKKAKVE

SEQ ID NO: 6937 - protein, 2173 aa, synthetic construct
MPAAKRVKLDGGDKKYSIGLDIGTNSVGWAVITDEYKVPSKKFKVLGNTDRHSIKKNLIGALLFDSGETAEATRLKRTARRRYTRRKNRICYLQEIFSNEMAKVDDSFFHRLEESFLVEEDKKHERHPIFGNIVDEVAYHEKYPTIYHLRKKLVDSTDKADLRLIYLALAHMIKFRGHFLIEGDLNPDNSDVDKLFIQLVQTYNQLFEENPINASGVDAKAILSARLSKSRRLENLIAQLPGEKKNGLFGNLIALSLGLTPNFKSNFDLAEDAKLQLSKDTYDDDLDNLLAQIGDQYADLFLAAKNLSDAILLSDILRVNTEITKAPLSASMIKRYDEHHQDLTLLKALVRQQLPEKYKEIFFDQSKNGYAGYIDGGASQEEFYKFIKPILEKMDGTEELLVKLNREDLLRKQRTFDNGSIPHQIHLGELHAILRRQEDFYPFLKDNREKIEKILTFRIPYYVGPLARGNSRFAWMTRKSEETITPWNFEEVVDKGASAQSFIERMTNFDKNLPNEKVLPKHSLLYEYFTVYNELTKVKYVTEGMRKPAFLSGEQKKAIVDLLFKTNRKVTVKQLKEDYFKKIECFDSVEISGVEDRFNASLGTYHDLLKIIKDKDFLDNEENEDILEDIVLTLTLFEDREMIEERLKTYAHLFDDKVMKQLKRRRYTGWGRLSRKLINGIRDKQSGKTILDFLKSDGFANRNFMQLIHDDSLTFKEDIQKAQVSGQGDSLHEHIANLAGSPAIKKGILQTVKVVDELVKVMGRHKPENIVIEMARENQTTQKGQKNSRERMKRIEEGIKELGSQILKEHPVENTQLQNEKLYLYYLQNGRDMYVDQELDINRLSDYDVDHIVPQSFLKDDSIDNKVLTRSDKARGKSDNVPSEEVVKKMKNYWRQLLNAKLITQRKFDNLTKAERGGLSELDKAGFIKRQLVETRQITKHVAQILDSRMNTKYDENDKLIREVKVITLKSKLVSDFRKDFQFYKVREINNYHHAHDAYLNAVVGTALIKKYPKLESEFVYGDYKVYDVRKMIAKSEQEIGKATAKYFFYSNIMNFFKTEITLANGEIRKRPLIETNGETGEIVWDKGRDFATVRKVLSMPQVNIVKKTEVQTGGFSKESILPKRNSDKLIARKKDWDPKKYGGFDSPTVAYSVLVVAKVEKGKSKKLKSVKELLGITIMERSSFEKNPIDFLEAKGYKEVKKDLIIKLPKYSLFELENGRKRMLASAGELQKGNELALPSKYVNFLYLASHYEKLKGSPEDNEQKQLFVEQHKHYLDEIIEQISEFSKRVILADANLDKVLSAYNKHRDKPIREQAENIIHLFTLTNLGAPAAFKYFDTTIDRKRYTSTKEVLDATLIHQSITGLYETRIDLSQLGGDGGEAAAKGGSGGGGGMDLLKPLTVERKGVKIKGYWNSQADITCVPKDLLQGEEPVRQQNVTTIHGTQEGDVYYVNLKIDGRRINTEVIGTTLDYAIITPGDVPWILKKPLELTIKLDLEEQQGTLLNNSILSKKGKEELKQLFEKYSALWQSWENQVGHRRIRPHKIATGTVKPTPQKQYHINPKAKPDIQIVINDLLKQGVLIQKESTMNTPVYPVPKPNGRWRMVLDYRAVNKVTPLIAVQNQHSYGILGSLFKGRYKTTIDLSNGFWAHPIVPEDYWITAFTWQGKQYCWTVLPQGFLNSPGLFNGDVVDLLQGIPNVEVYVDDVYISHDSEKEHLEYLDILFNRLKEAGYIISLKKSNIANSIVDFLGFQITNEGRGLTDTFKEKLENITAPTTLKQLQSILGKLNFARNFIPDFTELIAPLYALIPKSPKNYVPWQIEHSTTLETLITKLNGAEYLQGRKGDKTLIMKVNASYTTGYIRYYNEGEKKPISYVSIVFSKTELKFTELEKLLTTVHKGLLKALDLSMGQNIHVYSPIVSMQNIQKTPQTAKKALASRWLSWLSYLEDPRIRFFYDPQMPALKDLPAVDTGKDNKKHPSNFQHIFYTDGSAITSPTKEGHLNAGMGIVYFINKDGNLQKQQEWSISLGNHTAQFAEIAAFEFALKKCLPLGGNILVVTDSNYVAKAYNEELDVWASNGFVNNRKKPLKHISKWKSVADLKRLRPDVVVTHEPGHQKLDSSPHAYGNNLADQLATQASFKVHAGKRTADGSEFEKRTADGSEFESPKKKAKVE

SEQ ID NO: 6938 - protein, 2095 aa, synthetic construct
MPAAKRVKLDGGDKKYSIGLDIGTNSVGWAVITDEYKVPSKKFKVLGNTDRHSIKKNLIGALLFDSGETAEATRLKRTARRRYTRRKNRICYLQEIFSNEMAKVDDSFFHRLEESFLVEEDKKHERHPIFGNIVDEVAYHEKYPTIYHLRKKLVDSTDKADLRLIYLALAHMIKFRGHFLIEGDLNPDNSDVDKLFIQLVQTYNQLFEENPINASGVDAKAILSARLSKSRRLENLIAQLPGEKKNGLFGNLIALSLGLTPNFKSNFDLAEDAKLQLSKDTYDDDLDNLLAQIGDQYADLFLAAKNLSDAILLSDILRVNTEITKAPLSASMIKRYDEHHQDLTLLKALVRQQLPEKYKEIFFDQSKNGYAGYIDGGASQEEFYKFIKPILEKMDGTEELLVKLNREDLLRKQRTFDNGSIPHQIHLGELHAILRRQEDFYPFLKDNREKIEKILTFRIPYYVGPLARGNSRFAWMTRKSEETITPWNFEEVVDKGASAQSFIERMTNFDKNLPNEKVLPKHSLLYEYFTVYNELTKVKYVTEGMRKPAFLSGEQKKAIVDLLFKTNRKVTVKQLKEDYFKKIECFDSVEISGVEDRFNASLGTYHDLLKIIKDKDFLDNEENEDILEDIVLTLTLFEDREMIEERLKTYAHLFDDKVMKQLKRRRYTGWGRLSRKLINGIRDKQSGKTILDFLKSDGFANRNFMQLIHDDSLTFKEDIQKAQVSGQGDSLHEHIANLAGSPAIKKGILQTVKVVDELVKVMGRHKPENIVIEMARENQTTQKGQKNSRERMKRIEEGIKELGSQILKEHPVENTQLQNEKLYLYYLQNGRDMYVDQELDINRLSDYDVDHIVPQSFLKDDSIDNKVLTRSDKARGKSDNVPSEEVVKKMKNYWRQLLNAKLITQRKFDNLTKAERGGLSELDKAGFIKRQLVETRQITKHVAQILDSRMNTKYDENDKLIREVKVITLKSKLVSDFRKDFQFYKVREINNYHHAHDAYLNAVVGTALIKKYPKLESEFVYGDYKVYDVRKMIAKSEQEIGKATAKYFFYSNIMNFFKTEITLANGEIRKRPLIETNGETGEIVWDKGRDFATVRKVLSMPQVNIVKKTEVQTGGFSKESILPKRNSDKLIARKKDWDPKKYGGFDSPTVAYSVLVVAKVEKGKSKKLKSVKELLGITIMERSSFEKNPIDFLEAKGYKEVKKDLIIKLPKYSLFELENGRKRMLASAGELQKGNELALPSKYVNFLYLASHYEKLKGSPEDNEQKQLFVEQHKHYLDEIIEQISEFSKRVILADANLDKVLSAYNKHRDKPIREQAENIIHLFTLTNLGAPAAFKYFDTTIDRKRYTSTKEVLDATLIHQSITGLYETRIDLSQLGGDGGEAAAKGGSGGGGGTLQLEEEYRLFEPESTQKQEMDIWLKNFPQAWAETGGMGTAHCQAPVLIQLKATATPISIRQYPMPHEAYQGIKPHIRRMLDQGILKPCQSPWNTPLLPVKKPGTEDYRPVQDLREVNKRVEDIHPTVPNPYNLLSTLPPSHPWYTVLDLKDAFFCLRLHSESQLLFAFEWRDPEIGLSGQLTWTRLPQGFKNSPTLFNEALHSDLADFRVRYPALVLLQYVDDLLLAAATRTECLEGTKALLETLGNKGYRASAKKAQICLQEVTYLGYSLKDGQRWLTKARKEAILSIPVPKNSRQVREFLGTAGYCRLWIPGFAELAAPLYPLTRPGTLFQWGTEQQLAFEDIKKALLSSPALGLPDITKPFELFIDENSGFAKGVLVQKLGPWKRPVAYLSKKLDTVASGWPPCLRMVAAIAILVKDAGKLTLGQPLTILTSHPVEALVRQPPNKWLSNARMTHYQAMLLDAERVHFGPTVSLNPATLLPLPSGGNHHDCLQILAETHGTRPDLTDQPLPDADLTWYTDGSSFIRNGEREAGAAVTTESEVIWAAPLPPGTSAQRAELIALTQALKMAEGKKLTVYTDSRYAFATTHVHGEIYRRRGWLTSEGKEIKNKNEILALLEALFLPKRLSIIHCPGHQKGDSPQAKGNRLADDTAKKAATETHSSLTVLPAGKRTADGSEFEKRTADGSEFESPKKKAKVE

SEQ ID NO: 6939 - protein, 2176 aa, synthetic construct
MPAAKRVKLDGGDKKYSIGLDIGTNSVGWAVITDEYKVPSKKFKVLGNTDRHSIKKNLIGALLFDSGETAEATRLKRTARRRYTRRKNRICYLQEIFSNEMAKVDDSFFHRLEESFLVEEDKKHERHPIFGNIVDEVAYHEKYPTIYHLRKKLVDSTDKADLRLIYLALAHMIKFRGHFLIEGDLNPDNSDVDKLFIQLVQTYNQLFEENPINASGVDAKAILSARLSKSRRLENLIAQLPGEKKNGLFGNLIALSLGLTPNFKSNFDLAEDAKLQLSKDTYDDDLDNLLAQIGDQYADLFLAAKNLSDAILLSDILRVNTEITKAPLSASMIKRYDEHHQDLTLLKALVRQQLPEKYKEIFFDQSKNGYAGYIDGGASQEEFYKFIKPILEKMDGTEELLVKLNREDLLRKQRTFDNGSIPHQIHLGELHAILRRQEDFYPFLKDNREKIEKILTFRIPYYVGPLARGNSRFAWMTRKSEETITPWNFEEVVDKGASAQSFIERMTNFDKNLPNEKVLPKHSLLYEYFTVYNELTKVKYVTEGMRKPAFLSGEQKKAIVDLLFKTNRKVTVKQLKEDYFKKIECFDSVEISGVEDRFNASLGTYHDLLKIIKDKDFLDNEENEDILEDIVLTLTLFEDREMIEERLKTYAHLFDDKVMKQLKRRRYTGWGRLSRKLINGIRDKQSGKTILDFLKSDGFANRNFMQLIHDDSLTFKEDIQKAQVSGQGDSLHEHIANLAGSPAIKKGILQTVKVVDELVKVMGRHKPENIVIEMARENQTTQKGQKNSRERMKRIEEGIKELGSQILKEHPVENTQLQNEKLYLYYLQNGRDMYVDQELDINRLSDYDVDHIVPQSFLKDDSIDNKVLTRSDKARGKSDNVPSEEVVKKMKNYWRQLLNAKLITQRKFDNLTKAERGGLSELDKAGFIKRQLVETRQITKHVAQILDSRMNTKYDENDKLIREVKVITLKSKLVSDFRKDFQFYKVREINNYHHAHDAYLNAVVGTALIKKYPKLESEFVYGDYKVYDVRKMIAKSEQEIGKATAKYFFYSNIMNFFKTEITLANGEIRKRPLIETNGETGEIVWDKGRDFATVRKVLSMPQVNIVKKTEVQTGGFSKESILPKRNSDKLIARKKDWDPKKYGGFDSPTVAYSVLVVAKVEKGKSKKLKSVKELLGITIMERSSFEKNPIDFLEAKGYKEVKKDLIIKLPKYSLFELENGRKRMLASAGELQKGNELALPSKYVNFLYLASHYEKLKGSPEDNEQKQLFVEQHKHYLDEIIEQISEFSKRVILADANLDKVLSAYNKHRDKPIREQAENIIHLFTLTNLGAPAAFKYFDTTIDRKRYTSTKEVLDATLIHQSITGLYETRIDLSQLGGDGGEAAAKGGSGGGGGMNPLQLLQPLPAEIKGTKLLAHWNSGATITCIPESFLEDEQPIKKTLIKTIHGEKQQNVYYVTFKVKGRKVEAEVIASPYEYILLSPTDVPWLTQQPLQLTILVPLQEYQEKILSKTALPEDQKQQLKTLFVKYDNLWQHWENQVGHRKIRPHNIATGDYPPRPQKQYPINPKAKPSIQIVIDDLLKQGVLTPQNSTMNTPVYPVPKPDGRWRMVLDYREVNKTIPLTAAQNQHSAGILATIVRQKYKTTLDLANGFWAHPITPESYWLTAFTWQGKQYCWTRLPQGFLNSPALFNADVVDLLKEIPNVQVYVDDIYLSHDDPKEHVQQLEKVFQILLQAGYVVSLKKSEIGQKTVEFLGFNITKEGRGLTDTFKTKLLNITPPKDLKQLQSILGKLNFARNFIPNFAELVQPLYNLIAPAKGKYIEWSEENTKQLNMVIEALNTASNLEERLPEQRLVIKVNTSPSAGYVRYYNETGKKPIMYLNYVFSKAELKFSMLEKLLTTMHKALIKAMDLAMGQEILVYSPIVSMTKIQKTPLPERKALPIRWITWMTYLEDPRIQFHYDKTLPELKHIPDVYTSSQSPVKHPSQYEGVFYTDGSAIKSPDPTKSNNAGMGIVHATYKPEYQVLNQWSIPLGNHTAQMAEIAAVEFACKKALKIPGPVLVITDSFYVAESANKELPYWKSNGFVNNKKKPLKHISKWKSIAECLSMKPDITIQHEKGISLQIPVFILKGNALADKLATQGSYVVNAGKRTADGSEFEKRTADGSEFESPKKKAKVE

SEQ ID NO: 6940 - protein, 2094 aa, synthetic construct
MPAAKRVKLDGGDKKYSIGLDIGTNSVGWAVITDEYKVPSKKFKVLGNTDRHSIKKNLIGALLFDSGETAEATRLKRTARRRYTRRKNRICYLQEIFSNEMAKVDDSFFHRLEESFLVEEDKKHERHPIFGNIVDEVAYHEKYPTIYHLRKKLVDSTDKADLRLIYLALAHMIKFRGHFLIEGDLNPDNSDVDKLFIQLVQTYNQLFEENPINASGVDAKAILSARLSKSRRLENLIAQLPGEKKNGLFGNLIALSLGLTPNFKSNFDLAEDAKLQLSKDTYDDDLDNLLAQIGDQYADLFLAAKNLSDAILLSDILRVNTEITKAPLSASMIKRYDEHHQDLTLLKALVRQQLPEKYKEIFFDQSKNGYAGYIDGGASQEEFYKFIKPILEKMDGTEELLVKLNREDLLRKQRTFDNGSIPHQIHLGELHAILRRQEDFYPFLKDNREKIEKILTFRIPYYVGPLARGNSRFAWMTRKSEETITPWNFEEVVDKGASAQSFIERMTNFDKNLPNEKVLPKHSLLYEYFTVYNELTKVKYVTEGMRKPAFLSGEQKKAIVDLLFKTNRKVTVKQLKEDYFKKIECFDSVEISGVEDRFNASLGTYHDLLKIIKDKDFLDNEENEDILEDIVLTLTLFEDREMIEERLKTYAHLFDDKVMKQLKRRRYTGWGRLSRKLINGIRDKQSGKTILDFLKSDGFANRNFMQLIHDDSLTFKEDIQKAQVSGQGDSLHEHIANLAGSPAIKKGILQTVKVVDELVKVMGRHKPENIVIEMARENQTTQKGQKNSRERMKRIEEGIKELGSQILKEHPVENTQLQNEKLYLYYLQNGRDMYVDQELDINRLSDYDVDHIVPQSFLKDDSIDNKVLTRSDKARGKSDNVPSEEVVKKMKNYWRQLLNAKLITQRKFDNLTKAERGGLSELDKAGFIKRQLVETRQITKHVAQILDSRMNTKYDENDKLIREVKVITLKSKLVSDFRKDFQFYKVREINNYHHAHDAYLNAVVGTALIKKYPKLESEFVYGDYKVYDVRKMIAKSEQEIGKATAKYFFYSNIMNFFKTEITLANGEIRKRPLIETNGETGEIVWDKGRDFATVRKVLSMPQVNIVKKTEVQTGGFSKESILPKRNSDKLIARKKDWDPKKYGGFDSPTVAYSVLVVAKVEKGKSKKLKSVKELLGITIMERSSFEKNPIDFLEAKGYKEVKKDLIIKLPKYSLFELENGRKRMLASAGELQKGNELALPSKYVNFLYLASHYEKLKGSPEDNEQKQLFVEQHKHYLDEIIEQISEFSKRVILADANLDKVLSAYNKHRDKPIREQAENIIHLFTLTNLGAPAAFKYFDTTIDRKRYTSTKEVLDATLIHQSITGLYETRIDLSQLGGDGGEAAAKGGSGGGGGVLNLEEEYRLHEKPVPSSIDPSWLQLFPTVWAERAGMGLANQVPPVVVELRSGASPVAVRQYPMSKEAREGIRPHIQKFLDLGVLVPCRSPWNTPLLPVKKPGTNDYRPVQDLREINKRVQDIHPTVPNPYNLLSSLPPSYTWYSVLDLKDAFFCLRLHPNSQPLFAFEWKDPEKGNTGQLTWTRLPQGFKNSPTLFNEALHRDLAPFRALNPQVVLLQYVDDLLVAAPTYEDCKKGTQKLLQELSKLGYRVSAKKAQLCQREVTYLGYLLKEGKRWLTPARKATVMKIPVPTTPRQVREFLGKAGFCRLFIPGFASLAAPLYPLTKPSIPFIWTEEHQQAFDHIKKALLSAPALALPDLTKPFTLYIDERAGVARGVLTQTLGPWRRPVAYLSKKLDPVASGWPTCLKAVAAVALLLKDADKLTLGQNVTVIASHSLESIVRQPPDRWMTNARMTHYQSLLLNERVSFAPPAVLNPATLLPVESEATPVHRCSEILAEETGTRRDLEDQPLPGVPTWYTDGSSFITEGKRRAGAPIVDGKRTVWASSLPEGTSAQKAELVALTQALRLAEGKNINIYTDSRYAFATAHIHGAIYKQRGWLTSAGKDIKNKEEILALLEAIHLPRRVAIIHCPGHQRGSNPVATGNRRADEAAKQAALSTRVLAGTTKPAGKRTADGSEFEKRTADGSEFESPKKKAKVE

SEQ ID NO: 6941 - protein, 2218 aa, synthetic construct
MPAAKRVKLDGGDKKYSIGLDIGTNSVGWAVITDEYKVPSKKFKVLGNTDRHSIKKNLIGALLFDSGETAEATRLKRTARRRYTRRKNRICYLQEIFSNEMAKVDDSFFHRLEESFLVEEDKKHERHPIFGNIVDEVAYHEKYPTIYHLRKKLVDSTDKADLRLIYLALAHMIKFRGHFLIEGDLNPDNSDVDKLFIQLVQTYNQLFEENPINASGVDAKAILSARLSKSRRLENLIAQLPGEKKNGLFGNLIALSLGLTPNFKSNFDLAEDAKLQLSKDTYDDDLDNLLAQIGDQYADLFLAAKNLSDAILLSDILRVNTEITKAPLSASMIKRYDEHHQDLTLLKALVRQQLPEKYKEIFFDQSKNGYAGYIDGGASQEEFYKFIKPILEKMDGTEELLVKLNREDLLRKQRTFDNGSIPHQIHLGELHAILRRQEDFYPFLKDNREKIEKILTFRIPYYVGPLARGNSRFAWMTRKSEETITPWNFEEVVDKGASAQSFIERMTNFDKNLPNEKVLPKHSLLYEYFTVYNELTKVKYVTEGMRKPAFLSGEQKKAIVDLLFKTNRKVTVKQLKEDYFKKIECFDSVEISGVEDRFNASLGTYHDLLKIIKDKDFLDNEENEDILEDIVLTLTLFEDREMIEERLKTYAHLFDDKVMKQLKRRRYTGWGRLSRKLINGIRDKQSGKTILDFLKSDGFANRNFMQLIHDDSLTFKEDIQKAQVSGQGDSLHEHIANLAGSPAIKKGILQTVKVVDELVKVMGRHKPENIVIEMARENQTTQKGQKNSRERMKRIEEGIKELGSQILKEHPVENTQLQNEKLYLYYLQNGRDMYVDQELDINRLSDYDVDHIVPQSFLKDDSIDNKVLTRSDKARGKSDNVPSEEVVKKMKNYWRQLLNAKLITQRKFDNLTKAERGGLSELDKAGFIKRQLVETRQITKHVAQILDSRMNTKYDENDKLIREVKVITLKSKLVSDFRKDFQFYKVREINNYHHAHDAYLNAVVGTALIKKYPKLESEFVYGDYKVYDVRKMIAKSEQEIGKATAKYFFYSNIMNFFKTEITLANGEIRKRPLIETNGETGEIVWDKGRDFATVRKVLSMPQVNIVKKTEVQTGGFSKESILPKRNSDKLIARKKDWDPKKYGGFDSPTVAYSVLVVAKVEKGKSKKLKSVKELLGITIMERSSFEKNPIDFLEAKGYKEVKKDLIIKLPKYSLFELENGRKRMLASAGELQKGNELALPSKYVNFLYLASHYEKLKGSPEDNEQKQLFVEQHKHYLDEIIEQISEFSKRVILADANLDKVLSAYNKHRDKPIREQAENIIHLFTLTNLGAPAAFKYFDTTIDRKRYTSTKEVLDATLIHQSITGLYETRIDLSQLGGDGGEAAAKGGSGGGGGTLGDQGSRGSDPLPEPRVTLTVEGIPTEFLVNTGAEHSVLTKPMGKMGSKRTVVAGATGSKVYPWTTKRLLKIGQKQVTHSFLVIPECPAPLLGRDLLTKLKAQIQFSTEGPQVTWEDRPAMCLVLNLEEEYRLHEKPVPPSIDPSWLQLFPMVWAEKAGMGLANQVPPVVVELKSDASPVAVRQYPMSKEAREGIRPHIQRFLDLGILVPCQSPWNTPLLPVKKPGTNDYRPVQDLREVNKRVQDIHPTVPNPYNLLSSLPPSHTWYSVLDLKDAFFCLKLHPNSQPLFAFEWRDPEKGNTGQLTWTRLPQGFKNSPTLFDEALHRDLASFRALNPQVVMLQYVDDLLVAAPTYRDCKEGTRRLLQELSKLGYRVSAKKAQLCREEVTYLGYLLKGGKRWLTPARKATVMKIPTPTTPRQVREFLGTAGFCRLWIPGFASLAAPLYPLTREKVPFTWTEAHQEAFGRIKEALLSAPALALPDLTKPFALYVDEKEGVARGVLTQTLGPWRRPVAYLSKKLDPVASGWPTCLKAIAAVALLLKDADKLTLGQNVLVIAPHNLESIVRQPPDRWMTNARMTHYQSLLLNERVSFAPPAILNPATLLPVESDDTPIHICSEILAEETGTRPDLRDQPLPGVPAWYTDGSSFIMDGRRQAGAAIVDNKRTVWASNLPEGTSAQKAELIALTQALRLAEGKSINIYTDSRYAFATAHVHGAIYKQRGLLTSAGKDIKNKEEILALLEAIHLPKRVAIIHCPGHQRGTDPVATGNRKADEAAKQAAQSTRILTETTKNAGKRTADGSEFEKRTADGSEFESPKKKAKVE

SEQ ID NO: 6942 - protein, 2127 aa, synthetic construct
MPAAKRVKLDGGDKKYSIGLDIGTNSVGWAVITDEYKVPSKKFKVLGNTDRHSIKKNLIGALLFDSGETAEATRLKRTARRRYTRRKNRICYLQEIFSNEMAKVDDSFFHRLEESFLVEEDKKHERHPIFGNIVDEVAYHEKYPTIYHLRKKLVDSTDKADLRLIYLALAHMIKFRGHFLIEGDLNPDNSDVDKLFIQLVQTYNQLFEENPINASGVDAKAILSARLSKSRRLENLIAQLPGEKKNGLFGNLIALSLGLTPNFKSNFDLAEDAKLQLSKDTYDDDLDNLLAQIGDQYADLFLAAKNLSDAILLSDILRVNTEITKAPLSASMIKRYDEHHQDLTLLKALVRQQLPEKYKEIFFDQSKNGYAGYIDGGASQEEFYKFIKPILEKMDGTEELLVKLNREDLLRKQRTFDNGSIPHQIHLGELHAILRRQEDFYPFLKDNREKIEKILTFRIPYYVGPLARGNSRFAWMTRKSEETITPWNFEEVVDKGASAQSFIERMTNFDKNLPNEKVLPKHSLLYEYFTVYNELTKVKYVTEGMRKPAFLSGEQKKAIVDLLFKTNRKVTVKQLKEDYFKKIECFDSVEISGVEDRFNASLGTYHDLLKIIKDKDFLDNEENEDILEDIVLTLTLFEDREMIEERLKTYAHLFDDKVMKQLKRRRYTGWGRLSRKLINGIRDKQSGKTILDFLKSDGFANRNFMQLIHDDSLTFKEDIQKAQVSGQGDSLHEHIANLAGSPAIKKGILQTVKVVDELVKVMGRHKPENIVIEMARENQTTQKGQKNSRERMKRIEEGIKELGSQILKEHPVENTQLQNEKLYLYYLQNGRDMYVDQELDINRLSDYDVDHIVPQSFLKDDSIDNKVLTRSDKARGKSDNVPSEEVVKKMKNYWRQLLNAKLITQRKFDNLTKAERGGLSELDKAGFIKRQLVETRQITKHVAQILDSRMNTKYDENDKLIREVKVITLKSKLVSDFRKDFQFYKVREINNYHHAHDAYLNAVVGTALIKKYPKLESEFVYGDYKVYDVRKMIAKSEQEIGKATAKYFFYSNIMNFFKTEITLANGEIRKRPLIETNGETGEIVWDKGRDFATVRKVLSMPQVNIVKKTEVQTGGFSKESILPKRNSDKLIARKKDWDPKKYGGFDSPTVAYSVLVVAKVEKGKSKKLKSVKELLGITIMERSSFEKNPIDFLEAKGYKEVKKDLIIKLPKYSLFELENGRKRMLASAGELQKGNELALPSKYVNFLYLASHYEKLKGSPEDNEQKQLFVEQHKHYLDEIIEQISEFSKRVILADANLDKVLSAYNKHRDKPIREQAENIIHLFTLTNLGAPAAFKYFDTTIDRKRYTSTKEVLDATLIHQSITGLYETRIDLSQLGGDGGEAAAKGGSGGGGGLLGRDLLTKLKAQIQFSTEGPQVTWEDRPAMCLVLNLEEEYRLHEKPVPPSIDPSWLQLFPMVWAEKAGMGLANQVPPVVVELKSDASPVAVRQYPMSKEAREGIRPHIQRFLDLGILVPCQSPWNTPLLPVKKPGTNDYRPVQDLREVNKRVQDIHPTVPNPYNLLSSLPPSHTWYSVLDLKDAFFCLKLHPNSQPLFAFEWRDPEKGNTGQLTWTRLPQGFKNSPTLFNEALHRDLASFRALNPQVVMLQYVDDLLVAAPTYRDCKEGTRRLLQELSKLGYRVSAKKAQLCREEVTYLGYLLKGGKRWLTPARKATVMKIPTPTTPRQVREFLGTAGFCRLWIPGFASLAAPLYPLTRPKVPFTWTEAHQEAFGRIKEALLSAPALALPDLTKPFALYVDEKEGVARGVLTQTLGPWRRPVAYLSKKLDPVASGWPTCLKAIAAVALLLKDADKLTLGQNVLVIAPHNLESIVRQPPDRWMTNARMTHYQSLLLNERVSFAPPAILNPATLLPVESDDTPIHICSEILAEETGTRPDLRDQPLPGVPAWYTDGSSFIMDGRRQAGAAIVDNKRTVWASNLPEGTSAQKAELIALTQALRLAEGKSINIYTDSRYAFATAHVHGAIYKQRGWLTSAGKDIKNKEEILALLEAIHLPKRVAIIHCPGHQRGTDPVATGNRKADEAAKQAAQSTRILTETTKNAGKRTADGSEFEKRTADGSEFESPKKKAKVE

SEQ ID NO: 6943 - protein, 2127 aa, synthetic construct
MPAAKRVKLDGGDKKYSIGLDIGTNSVGWAVITDEYKVPSKKFKVLGNTDRHSIKKNLIGALLFDSGETAEATRLKRTARRRYTRRKNRICYLQEIFSNEMAKVDDSFFHRLEESFLVEEDKKHERHPIFGNIVDEVAYHEKYPTIYHLRKKLVDSTDKADLRLIYLALAHMIKFRGHFLIEGDLNPDNSDVDKLFIQLVQTYNQLFEENPINASGVDAKAILSARLSKSRRLENLIAQLPGEKKNGLFGNLIALSLGLTPNFKSNFDLAEDAKLQLSKDTYDDDLDNLLAQIGDQYADLFLAAKNLSDAILLSDILRVNTEITKAPLSASMIKRYDEHHQDLTLLKALVRQQLPEKYKEIFFDQSKNGYAGYIDGGASQEEFYKFIKPILEKMDGTEELLVKLNREDLLRKQRTFDNGSIPHQIHLGELHAILRRQEDFYPFLKDNREKIEKILTFRIPYYVGPLARGNSRFAWMTRKSEETITPWNFEEVVDKGASAQSFIERMTNFDKNLPNEKVLPKHSLLYEYFTVYNELTKVKYVTEGMRKPAFLSGEQKKAIVDLLFKTNRKVTVKQLKEDYFKKIECFDSVEISGVEDRFNASLGTYHDLLKIIKDKDFLDNEENEDILEDIVLTLTLFEDREMIEERLKTYAHLFDDKVMKQLKRRRYTGWGRLSRKLINGIRDKQSGKTILDFLKSDGFANRNFMQLIHDDSLTFKEDIQKAQVSGQGDSLHEHIANLAGSPAIKKGILQTVKVVDELVKVMGRHKPENIVIEMARENQTTQKGQKNSRERMKRIEEGIKELGSQILKEHPVENTQLQNEKLYLYYLQNGRDMYVDQELDINRLSDYDVDHIVPQSFLKDDSIDNKVLTRSDKARGKSDNVPSEEVVKKMKNYWRQLLNAKLITQRKFDNLTKAERGGLSELDKAGFIKRQLVETRQITKHVAQILDSRMNTKYDENDKLIREVKVITLKSKLVSDFRKDFQFYKVREINNYHHAHDAYLNAVVGTALIKKYPKLESEFVYGDYKVYDVRKMIAKSEQEIGKATAKYFFYSNIMNFFKTEITLANGEIRKRPLIETNGETGEIVWDKGRDFATVRKVLSMPQVNIVKKTEVQTGGFSKESILPKRNSDKLIARKKDWDPKKYGGFDSPTVAYSVLVVAKVEKGKSKKLKSVKELLGITIMERSSFEKNPIDFLEAKGYKEVKKDLIIKLPKYSLFELENGRKRMLASAGELQKGNELALPSKYVNFLYLASHYEKLKGSPEDNEQKQLFVEQHKHYLDEIIEQISEFSKRVILADANLDKVLSAYNKHRDKPIREQAENIIHLFTLTNLGAPAAFKYFDTTIDRKRYTSTKEVLDATLIHQSITGLYETRIDLSQLGGDGGEAAAKGGSGGGGGLLGRDLLTKLKAQIQFSTEGPQVTWEDRPAMCLVLNLEEEYRLHEKPVPPSIDPSWLQLFPMVWAEKAGMGLANQVPPVVVELKSDASPVAVRQYPMSKEAREGIRPHIQRFLDLGILVPCQSPWNTPLLPVKKPGTNDYRPVQDLREVNKRVQDIHPTVPNPYNLLSSLPPSHTWYSVLDLKDAFFCLKLHPNSQPLFAFEWRDPEKGNTGQLTWTRLPQGFKNSPTLFNEALHRDLASFRALNPQVVMLQYVDDLLVAAPTYRDCKEGTRRLLQELSKLGYRVSAKKAQLCREEVTYLGYLLKGGKRWLTPARKATVMKIPTPTTPRQVREFLGKAGFCRLFIPGFASLAAPLYPLTRPKVPFTWTEAHQEAFGRIKEALLSAPALALPDLTKPFALYVDEKEGVARGVLTQTLGPWRRPVAYLSKKLDPVASGWPTCLKAIAAVALLLKDADKLTLGQNVLVIAPHNLESIVRQPPDRWMTNARMTHYQSLLLNERVSFAPPAILNPATLLPVESDDTPIHICSEILAEETGTRPDLRDQPLPGVPAWYTDGSSFIMDGRRQAGAAIVDNKRTVWASNLPEGTSAQKAELIALTQALRLAEGKSINIYTDSRYAFATAHVHGAIYKQRGWLTSAGKDIKNKEEILALLEAIHLPKRVAIIHCPGHQRGTDPVATGNRKADEAAKQAAQSTRILTETTKNAGKRTADGSEFEKRTADGSEFESPKKKAKVE

SEQ ID NO: 6944 - protein, 2218 aa, synthetic construct
MPAAKRVKLDGGDKKYSIGLDIGTNSVGWAVITDEYKVPSKKFKVLGNTDRHSIKKNLIGALLFDSGETAEATRLKRTARRRYTRRKNRICYLQEIFSNEMAKVDDSFFHRLEESFLVEEDKKHERHPIFGNIVDEVAYHEKYPTIYHLRKKLVDSTDKADLRLIYLALAHMIKFRGHFLIEGDLNPDNSDVDKLFIQLVQTYNQLFEENPINASGVDAKAILSARLSKSRRLENLIAQLPGEKKNGLFGNLIALSLGLTPNFKSNFDLAEDAKLQLSKDTYDDDLDNLLAQIGDQYADLFLAAKNLSDAILLSDILRVNTEITKAPLSASMIKRYDEHHQDLTLLKALVRQQLPEKYKEIFFDQSKNGYAGYIDGGASQEEFYKFIKPILEKMDGTEELLVKLNREDLLRKQRTFDNGSIPHQIHLGELHAILRRQEDFYPFLKDNREKIEKILTFRIPYYVGPLARGNSRFAWMTRKSEETITPWNFEEVVDKGASAQSFIERMTNFDKNLPNEKVLPKHSLLYEYFTVYNELTKVKYVTEGMRKPAFLSGEQKKAIVDLLFKTNRKVTVKQLKEDYFKKIECFDSVEISGVEDRFNASLGTYHDLLKIIKDKDFLDNEENEDILEDIVLTLTLFEDREMIEERLKTYAHLFDDKVMKQLKRRRYTGWGRLSRKLINGIRDKQSGKTILDFLKSDGFANRNFMQLIHDDSLTFKEDIQKAQVSGQGDSLHEHIANLAGSPAIKKGILQTVKVVDELVKVMGRHKPENIVIEMARENQTTQKGQKNSRERMKRIEEGIKELGSQILKEHPVENTQLQNEKLYLYYLQNGRDMYVDQELDINRLSDYDVDHIVPQSFLKDDSIDNKVLTRSDKARGKSDNVPSEEVVKKMKNYWRQLLNAKLITQRKFDNLTKAERGGLSELDKAGFIKRQLVETRQITKHVAQILDSRMNTKYDENDKLIREVKVITLKSKLVSDFRKDFQFYKVREINNYHHAHDAYLNAVVGTALIKKYPKLESEFVYGDYKVYDVRKMIAKSEQEIGKATAKYFFYSNIMNFFKTEITLANGEIRKRPLIETNGETGEIVWDKGRDFATVRKVLSMPQVNIVKKTEVQTGGFSKESILPKRNSDKLIARKKDWDPKKYGGFDSPTVAYSVLVVAKVEKGKSKKLKSVKELLGITIMERSSFEKNPIDFLEAKGYKEVKKDLIIKLPKYSLFELENGRKRMLASAGELQKGNELALPSKYVNFLYLASHYEKLKGSPEDNEQKQLFVEQHKHYLDEIIEQISEFSKRVILADANLDKVLSAYNKHRDKPIREQAENIIHLFTLTNLGAPAAFKYFDTTIDRKRYTSTKEVLDATLIHQSITGLYETRIDLSQLGGDGGEAAAKGGSGGGGGTLGDQGSRGSDPLPEPRVTLTVEGIPTEFLVNTGAEHSVLTKPMGKMGSKRTVVAGATGSKVYPWTTKRLLKIGQKQVTHSFLVIPECPAPLLGRDLLTKLKAQIQFSTEGPQVTWEDRPAMCLVLNLEEEYRLHEKPVPPSIDPSWLQLFPMVWAEKAGMGLANQVPPVVVELKSDASPVAVRQYPMSKEAREGIRPHIQRFLDLGILVPCQSPWNTPLLPVKKPGTNDYRPVQDLREVNKRVQDIHPTVPNPYNLLSSLPPSHTWYSVLDLKDAFFCLKLHPNSQPLFAFEWRDPEKGNTGQLTWTRLPQGFKNSPTLFNEALHRDLASFRALNPQVVMLQYVDDLLVAAPTYRDCKEGTRRLLQELSKLGYRVSAKKAQLCREEVTYLGYLLKGGKRWLTPARKATVMKIPTPTTPRQVREFLGTAGFCRLWIPGFASLAAPLYPLTRPKVPFTWTEAHQEAFGRIKEALLSAPALALPDLTKPFALYVDEKEGVARGVLTQTLGPWRRPVAYLSKKLDPVASGWPTCLKAIAAVALLLKDADKLTLGQNVLVIAPHNLESIVRQPPDRWMTNARMTHYQSLLLNERVSFAPPAILNPATLLPVESDDTPIHICSEILAEETGTRPDLRDQPLPGVPAWYTDGSSFIMDGRRQAGAAIVDNKRTVWASNLPEGTSAQKAELIALTQALRLAEGKSINIYTDSRYAFATAHVHGAIYKQRGWLTSAGKDIKNKEEILALLEAIHLPKRVAIIHCPGHQRGTDPVATGNRKADEAAKQAAQSTRILTETTKNAGKRTADGSEFEKRTADGSEFESPKKKAKVE

SEQ ID NO: 6945 - protein, 2218 aa, synthetic construct
MPAAKRVKLDGGDKKYSIGLDIGTNSVGWAVITDEYKVPSKKFKVLGNTDRHSIKKNLIGALLFDSGETAEATRLKRTARRRYTRRKNRICYLQEIFSNEMAKVDDSFFHRLEESFLVEEDKKHERHPIFGNIVDEVAYHEKYPTIYHLRKKLVDSTDKADLRLIYLALAHMIKFRGHFLIEGDLNPDNSDVDKLFIQLVQTYNQLFEENPINASGVDAKAILSARLSKSRRLENLIAQLPGEKKNGLFGNLIALSLGLTPNFKSNFDLAEDAKLQLSKDTYDDDLDNLLAQIGDQYADLFLAAKNLSDAILLSDILRVNTEITKAPLSASMIKRYDEHHQDLTLLKALVRQQLPEKYKEIFFDQSKNGYAGYIDGGASQEEFYKFIKPILEKMDGTEELLVKLNREDLLRKQRTFDNGSIPHQIHLGELHAILRRQEDFYPFLKDNREKIEKILTFRIPYYVGPLARGNSRFAWMTRKSEETITPWNFEEVVDKGASAQSFIERMTNFDKNLPNEKVLPKHSLLYEYFTVYNELTKVKYVTEGMRKPAFLSGEQKKAIVDLLFKTNRKVTVKQLKEDYFKKIECFDSVEISGVEDRFNASLGTYHDLLKIIKDKDFLDNEENEDILEDIVLTLTLFEDREMIEERLKTYAHLFDDKVMKQLKRRRYTGWGRLSRKLINGIRDKQSGKTILDFLKSDGFANRNFMQLIHDDSLTFKEDIQKAQVSGQGDSLHEHIANLAGSPAIKKGILQTVKVVDELVKVMGRHKPENIVIEMARENQTTQKGQKNSRERMKRIEEGIKELGSQILKEHPVENTQLQNEKLYLYYLQNGRDMYVDQELDINRLSDYDVDHIVPQSFLKDDSIDNKVLTRSDKARGKSDNVPSEEVVKKMKNYWRQLLNAKLITQRKFDNLTKAERGGLSELDKAGFIKRQLVETRQITKHVAQILDSRMNTKYDENDKLIREVKVITLKSKLVSDFRKDFQFYKVREINNYHHAHDAYLNAVVGTALIKKYPKLESEFVYGDYKVYDVRKMIAKSEQEIGKATAKYFFYSNIMNFFKTEITLANGEIRKRPLIETNGETGEIVWDKGRDFATVRKVLSMPQVNIVKKTEVQTGGFSKESILPKRNSDKLIARKKDWDPKKYGGFDSPTVAYSVLVVAKVEKGKSKKLKSVKELLGITIMERSSFEKNPIDFLEAKGYKEVKKDLIIKLPKYSLFELENGRKRMLASAGELQKGNELALPSKYVNFLYLASHYEKLKGSPEDNEQKQLFVEQHKHYLDEIIEQISEFSKRVILADANLDKVLSAYNKHRDKPIREQAENIIHLFTLTNLGAPAAFKYFDTTIDRKRYTSTKEVLDATLIHQSITGLYETRIDLSQLGGDGGEAAAKGGSGGGGGTLGDQGSRGSDPLPEPRVTLTVEGIPTEFLVNTGAEHSVLTKPMGKMGSKRTVVAGATGSKVYPWTTKRLLKIGQKQVTHSFLVIPECPAPLLGRDLLTKLKAQIQFSTEGPQVTWEDRPAMCLVLNLEEEYRLHEKPVPPSIDPSWLQLFPMVWAEKAGMGLANQVPPVVVELKSDASPVAVRQYPMSKEAREGIRPHIQRFLDLGILVPCQSPWNTPLLPVKKPGTNDYRPVQDLREVNKRVQDIHPTVPNPYNLLSSLPPSHTWYSVLDLKDAFFCLKLHPNSQPLFAFEWRDPEKGNTGQLTWTRLPQGFKNSPTLFNEALHRDLASFRALNPQVVMLQYVDDLLVAAPTYRDCKEGTRRLLQELSKLGYRVSAKKAQLCREEVTYLGYLLKGGKRWLTPARKATVMKIPTPTTPRQVREFLGKAGFCRLFIPGFASLAAPLYPLTRPKVPFTWTEAHQEAFGRIKEALLSAPALALPDLTKPFALYVDEKEGVARGVLTQTLGPWRRPVAYLSKKLDPVASGWPTCLKAIAAVALLLKDADKLTLGQNVLVIAPHNLESIVRQPPDRWMTNARMTHYQSLLLNERVSFAPPAILNPATLLPVESDDTPIHICSEILAEETGTRPDLRDQPLPGVPAWYTDGSSFIMDGRRQAGAAIVDNKRTVWASNLPEGTSAQKAELIALTQALRLAEGKSINIYTDSRYAFATAHVHGAIYKQRGWLTSAGKDIKNKEEILALLEAIHLPKRVAIIHCPGHQRGTDPVATGNRKADEAAKQAAQSTRILTETTKNAGKRTADGSEFEKRTADGSEFESPKKKAKVE

SEQ ID NO: 6946 - protein, 2096 aa, synthetic construct
MPAAKRVKLDGGDKKYSIGLDIGTNSVGWAVITDEYKVPSKKFKVLGNTDRHSIKKNLIGALLFDSGETAEATRLKRTARRRYTRRKNRICYLQEIFSNEMAKVDDSFFHRLEESFLVEEDKKHERHPIFGNIVDEVAYHEKYPTIYHLRKKLVDSTDKADLRLIYLALAHMIKFRGHFLIEGDLNPDNSDVDKLFIQLVQTYNQLFEENPINASGVDAKAILSARLSKSRRLENLIAQLPGEKKNGLFGNLIALSLGLTPNFKSNFDLAEDAKLQLSKDTYDDDLDNLLAQIGDQYADLFLAAKNLSDAILLSDILRVNTEITKAPLSASMIKRYDEHHQDLTLLKALVRQQLPEKYKEIFFDQSKNGYAGYIDGGASQEEFYKFIKPILEKMDGTEELLVKLNREDLLRKQRTFDNGSIPHQIHLGELHAILRRQEDFYPFLKDNREKIEKILTFRIPYYVGPLARGNSRFAWMTRKSEETITPWNFEEVVDKGASAQSFIERMTNFDKNLPNEKVLPKHSLLYEYFTVYNELTKVKYVTEGMRKPAFLSGEQKKAIVDLLFKTNRKVTVKQLKEDYFKKIECFDSVEISGVEDRFNASLGTYHDLLKIIKDKDFLDNEENEDILEDIVLTLTLFEDREMIEERLKTYAHLFDDKVMKQLKRRRYTGWGRLSRKLINGIRDKQSGKTILDFLKSDGFANRNFMQLIHDDSLTFKEDIQKAQVSGQGDSLHEHIANLAGSPAIKKGILQTVKVVDELVKVMGRHKPENIVIEMARENQTTQKGQKNSRERMKRIEEGIKELGSQILKEHPVENTQLQNEKLYLYYLQNGRDMYVDQELDINRLSDYDVDHIVPQSFLKDDSIDNKVLTRSDKARGKSDNVPSEEVVKKMKNYWRQLLNAKLITQRKFDNLTKAERGGLSELDKAGFIKRQLVETRQITKHVAQILDSRMNTKYDENDKLIREVKVITLKSKLVSDFRKDFQFYKVREINNYHHAHDAYLNAVVGTALIKKYPKLESEFVYGDYKVYDVRKMIAKSEQEIGKATAKYFFYSNIMNFFKTEITLANGEIRKRPLIETNGETGEIVWDKGRDFATVRKVLSMPQVNIVKKTEVQTGGFSKESILPKRNSDKLIARKKDWDPKKYGGFDSPTVAYSVLVVAKVEKGKSKKLKSVKELLGITIMERSSFEKNPIDFLEAKGYKEVKKDLIIKLPKYSLFELENGRKRMLASAGELQKGNELALPSKYVNFLYLASHYEKLKGSPEDNEQKQLFVEQHKHYLDEIIEQISEFSKRVILADANLDKVLSAYNKHRDKPIREQAENIIHLFTLTNLGAPAAFKYFDTTIDRKRYTSTKEVLDATLIHQSITGLYETRIDLSQLGGDGGEAAAKGGSGGGGGTLNLEDEYRLYETSAEPEVSPGSTWLSDFPQAWAETGGMGLAVRQAPLIIPLKATSTPVSIKQYPMSQEAKLGIKPHIQRLLDQGILVPCQSPWNTPLLPVKKPGTNDYRPVQDLREVNKRVEDIHPTVPNPYNLLSGLPPSHRWYTVLDLKDAFFCLRLHPTSQPLFAFEWRDPGMGISGQLTWTRLPQGFKNSPTLFNEALHRDLADFRIQHPDLILLQYVDDILLAATSELDCQQGTRALLLTLGNLGYRASAKKAQLCQKQVKYLGYLLKEGQRWLTEARKETVMGQPTPKTPRQLREFLGTAGFCRLWIPGFAEMAAPLYPLTKPGTLFNWGPDQQKAYQEIKQALLTAPALGLPDLTKPFELFVDEKQGYAKGVLTQKLGPWRRPVAYLSKKLDPVAAGWPPCLRMVAAIAVLRKDAGKLTMGQPLVILAPHAVEALVKQPPDRWLSNARMTHYQAMLLDTDRVQFGPVVALNPATLLPLPEEGAPHDCLEILAETHGTRPDLTDQPIPDADHTWYTDGSSFLQEGQRKAGAAVTTETEVIWARALPAGTSAQRAELIALTQALKMAEGKRLNVYTDSRYAFATAHIHGEIYRRRGWLTSEGREIKNKSEILALLKALFLPKRLSIIHCLGHQKGDSAEARGNRLADQAAREAAIKTPPDTSTLLAGKRTADGSEFEKRTADGSEFESPKKKAKVE

SEQ ID NO: 6947 - protein, 2096 aa, synthetic construct
MPAAKRVKLDGGDKKYSIGLDIGTNSVGWAVITDEYKVPSKKFKVLGNTDRHSIKKNLIGALLFDSGETAEATRLKRTARRRYTRRKNRICYLQEIFSNEMAKVDDSFFHRLEESFLVEEDKKHERHPIFGNIVDEVAYHEKYPTIYHLRKKLVDSTDKADLRLIYLALAHMIKFRGHFLIEGDLNPDNSDVDKLFIQLVQTYNQLFEENPINASGVDAKAILSARLSKSRRLENLIAQLPGEKKNGLFGNLIALSLGLTPNFKSNFDLAEDAKLQLSKDTYDDDLDNLLAQIGDQYADLFLAAKNLSDAILLSDILRVNTEITKAPLSASMIKRYDEHHQDLTLLKALVRQQLPEKYKEIFFDQSKNGYAGYIDGGASQEEFYKFIKPILEKMDGTEELLVKLNREDLLRKQRTFDNGSIPHQIHLGELHAILRRQEDFYPFLKDNREKIEKILTFRIPYYVGPLARGNSRFAWMTRKSEETITPWNFEEVVDKGASAQSFIERMTNFDKNLPNEKVLPKHSLLYEYFTVYNELTKVKYVTEGMRKPAFLSGEQKKAIVDLLFKTNRKVTVKQLKEDYFKKIECFDSVEISGVEDRFNASLGTYHDLLKIIKDKDFLDNEENEDILEDIVLTLTLFEDREMIEERLKTYAHLFDDKVMKQLKRRRYTGWGRLSRKLINGIRDKQSGKTILDFLKSDGFANRNFMQLIHDDSLTFKEDIQKAQVSGQGDSLHEHIANLAGSPAIKKGILQTVKVVDELVKVMGRHKPENIVIEMARENQTTQKGQKNSRERMKRIEEGIKELGSQILKEHPVENTQLQNEKLYLYYLQNGRDMYVDQELDINRLSDYDVDHIVPQSFLKDDSIDNKVLTRSDKARGKSDNVPSEEVVKKMKNYWRQLLNAKLITQRKFDNLTKAERGGLSELDKAGFIKRQLVETRQITKHVAQILDSRMNTKYDENDKLIREVKVITLKSKLVSDFRKDFQFYKVREINNYHHAHDAYLNAVVGTALIKKYPKLESEFVYGDYKVYDVRKMIAKSEQEIGKATAKYFFYSNIMNFFKTEITLANGEIRKRPLIETNGETGEIVWDKGRDFATVRKVLSMPQVNIVKKTEVQTGGFSKESILPKRNSDKLIARKKDWDPKKYGGFDSPTVAYSVLVVAKVEKGKSKKLKSVKELLGITIMERSSFEKNPIDFLEAKGYKEVKKDLIIKLPKYSLFELENGRKRMLASAGELQKGNELALPSKYVNFLYLASHYEKLKGSPEDNEQKQLFVEQHKHYLDEIIEQISEFSKRVILADANLDKVLSAYNKHRDKPIREQAENIIHLFTLTNLGAPAAFKYFDTTIDRKRYTSTKEVLDATLIHQSITGLYETRIDLSQLGGDGGEAAAKGGSGGGGGLGIEDEYRLHETSTEPDVSLGSTWLSDFPQAWAETGGMGLAVRQAPLIIPLKATSTPVSIQQYPMSHEARLGIKPHIQRLLDQGILVPCQSPWNTPLLPVKKPGTNDYRPVQDLREVNKRVEDIHPTVPNPYNLLSGLPPSHQWYTVLDLKDAFFCLRLHPTSQPLFAFEWRDPGMGISGQLTWTRLPQGFKNSPTLFNEALHRDLADFRIQHPDLILLQYVDDILLAATSELDCQQGTRALLQTLGDLGYRASAKKAQICQKQVKYLGYLLREGQRWLTEARKETVMGQPVPKTPRQLREFLGKAGFCRLFIPGFAEMAAPLYPLTKPGTLFSWGPDQQKAYQEIKQALLTAPALGLPDLTKPFELFVDEKQGYAKGVLTQKLGPWRRPVAYLSKKLDPVAAGWPPCLRMVAAIAVLTKDAGKLTMGQPLVILAPHAVEALVKQPPDRWLSNARMTHYQAMLLDTDRVQFGPVVALNPATLLPLPEEGAPHDCLEILAETHGTRPDLTDQPIPDADHTWYTDGSSFLQEGQRKAGAAVTTETEVIWAGALPAGTSAQRAELIALTQALKMAEGKRLNVYTDSRYAFATAHIHGEIYRRRGWLTSEGREIKNKSEILALLKALFLPKRLSIIHCLGHQKGDSAEARGNRLADQAAREAAIKTPPDTSTLLIAGKRTADGSEFEKRTADGSEFESPKKKAKVE

SEQ ID NO: 6948 - protein, 2096 aa, synthetic construct; identical to SEQ ID NO: 6947

SEQ ID NO: 6949 - protein, 2096 aa, synthetic construct
MPAAKRVKLDGGDKKYSIGLDIGTNSVGWAVITDEYKVPSKKFKVLGNTDRHSIKKNLIGALLFDSGETAEATRLKRTARRRYTRRKNRICYLQEIFSNEMAKVDDSFFHRLEESFLVEEDKKHERHPIFGNIVDEVAYHEKYPTIYHLRKKLVDSTDKADLRLIYLALAHMIKFRGHFLIEGDLNPDNSDVDKLFIQLVQTYNQLFEENPINASGVDAKAILSARLSKSRRLENLIAQLPGEKKNGLFGNLIALSLGLTPNFKSNFDLAEDAKLQLSKDTYDDDLDNLLAQIGDQYADLFLAAKNLSDAILLSDILRVNTEITKAPLSASMIKRYDEHHQDLTLLKALVRQQLPEKYKEIFFDQSKNGYAGYIDGGASQEEFYKFIKPILEKMDGTEELLVKLNREDLLRKQRTFDNGSIPHQIHLGELHAILRRQEDFYPFLKDNREKIEKILTFRIPYYVGPLARGNSRFAWMTRKSEETITPWNFEEVVDKGASAQSFIERMTNFDKNLPNEKVLPKHSLLYEYFTVYNELTKVKYVTEGMRKPAFLSGEQKKAIVDLLFKTNRKVTVKQLKEDYFKKIECFDSVEISGVEDRFNASLGTYHDLLKIIKDKDFLDNEENEDILEDIVLTLTLFEDREMIEERLKTYAHLFDDKVMKQLKRRRYTGWGRLSRKLINGIRDKQSGKTILDFLKSDGFANRNFMQLIHDDSLTFKEDIQKAQVSGQGDSLHEHIANLAGSPAIKKGILQTVKVVDELVKVMGRHKPENIVIEMARENQTTQKGQKNSRERMKRIEEGIKELGSQILKEHPVENTQLQNEKLYLYYLQNGRDMYVDQELDINRLSDYDVDHIVPQSFLKDDSIDNKVLTRSDKARGKSDNVPSEEVVKKMKNYWRQLLNAKLITQRKFDNLTKAERGGLSELDKAGFIKRQLVETRQITKHVAQILDSRMNTKYDENDKLIREVKVITLKSKLVSDFRKDFQFYKVREINNYHHAHDAYLNAVVGTALIKKYPKLESEFVYGDYKVYDVRKMIAKSEQEIGKATAKYFFYSNIMNFFKTEITLANGEIRKRPLIETNGETGEIVWDKGRDFATVRKVLSMPQVNIVKKTEVQTGGFSKESILPKRNSDKLIARKKDWDPKKYGGFDSPTVAYSVLVVAKVEKGKSKKLKSVKELLGITIMERSSFEKNPIDFLEAKGYKEVKKDLIIKLPKYSLFELENGRKRMLASAGELQKGNELALPSKYVNFLYLASHYEKLKGSPEDNEQKQLFVEQHKHYLDEIIEQISEFSKRVILADANLDKVLSAYNKHRDKPIREQAENIIHLFTLTNLGAPAAFKYFDTTIDRKRYTSTKEVLDATLIHQSITGLYETRIDLSQLGGDGGEAAAKGGSGGGGGTLNIEDEYRLHETSKEPDVSLGSTWLSDFPQAWAETGGMGLAVRQAPLIIPLKATSTPVSIKQYPMSQEARLGIKPHIQRLLDQGILVPCQSPWNTPLLPVKKPGTNDYRPVQDLREVNKRVEDIHPTVPNPYNLLSGLPPSHQWYTVLDLKDAFFCLRLHPTSQPLFAFEWRDPEMGISGQLTWTRLPQGFKNSPTLFNEALHRDLAGFRIQHPDLILLQYVDDLLLAATSELDCQQGTRALLQTLGDLGYRASAKKAQICQKQVKYLGYLLKEGQRWLTEARKETVMGQPIPKTPRQLREFLGTAGFCRLWIPGFAEMAAPLYPLTKPGTLFNWGPDQQKAFQEIKQALLTAPALGLPDLTKPFELFVDEKQGYAKGVLTQKLGPWRRPVAYLSKKLDPVAAGWPPCLRMVAAIAVLTKDAGKLTMGQPLVILAPHAVEALVKQPPDRWLSNARMTHYQALLLDTDRVQFGPVVALNPATLLPLPEEGLQHDCLDILAEAHGTRSDLMDQPLPDADHTWYTDGSSFLQEGQRKAGAAVTTETEVIWARALPAGTSAQRAELIALTQALKMAEGKKLNVYTDSRYAFATAHIHGEIYRRRGWLTSEGKEIKNKDEILALLKALFLPKRLSIIHCPGHQKGNSAEARGNRMADQAAREVATRETPETSTLLAGKRTADGSEFEKRTADGSEFESPKKKAKVE

SEQ ID NO: 6950 - protein, 2090 aa, synthetic construct
MPAAKRVKLDGGDKKYSIGLDIGTNSVGWAVITDEYKVPSKKFKVLGNTDRHSIKKNLIGALLFDSGETAEATRLKRTARRRYTRRKNRICYLQEIFSNEMAKVDDSFFHRLEESFLVEEDKKHERHPIFGNIVDEVAYHEKYPTIYHLRKKLVDSTDKADLRLIYLALAHMIKFRGHFLIEGDLNPDNSDVDKLFIQLVQTYNQLFEENPINASGVDAKAILSARLSKSRRLENLIAQLPGEKKNGLFGNLIALSLGLTPNFKSNFDLAEDAKLQLSKDTYDDDLDNLLAQIGDQYADLFLAAKNLSDAILLSDILRVNTEITKAPLSASMIKRYDEHHQDLTLLKALVRQQLPEKYKEIFFDQSKNGYAGYIDGGASQEEFYKFIKPILEKMDGTEELLVKLNREDLLRKQRTFDNGSIPHQIHLGELHAILRRQEDFYPFLKDNREKIEKILTFRIPYYVGPLARGNSRFAWMTRKSEETITPWNFEEVVDKGASAQSFIERMTNFDKNLPNEKVLPKHSLLYEYFTVYNELTKVKYVTEGMRKPAFLSGEQKKAIVDLLFKTNRKVTVKQLKEDYFKKIECFDSVEISGVEDRFNASLGTYHDLLKIIKDKDFLDNEENEDILEDIVLTLTLFEDREMIEERLKTYAHLFDDKVMKQLKRRRYTGWGRLSRKLINGIRDKQSGKTILDFLKSDGFANRNFMQLIHDDSLTFKEDIQKAQVSGQGDSLHEHIANLAGSPAIKKGILQTVKVVDELVKVMGRHKPENIVIEMARENQTTQKGQKNSRERMKRIEEGIKELGSQILKEHPVENTQLQNEKLYLYYLQNGRDMYVDQELDINRLSDYDVDHIVPQSFLKDDSIDNKVLTRSDKARGKSDNVPSEEVVKKMKNYWRQLLNAKLITQRKFDNLTKAERGGLSELDKAGFIKRQLVETRQITKHVAQILDSRMNTKYDENDKLIREVKVITLKSKLVSDFRKDFQFYKVREINNYHHAHDAYLNAVVGTALIKKYPKLESEFVYGDYKVYDVRKMIAKSEQEIGKATAKYFFYSNIMNFFKTEITLANGEIRKRPLIETNGETGEIVWDKGRDFATVRKVLSMPQVNIVKKTEVQTGGFSKESILPKRNSDKLIARKKDWDPKKYGGFDSPTVAYSVLVVAKVEKGKSKKLKSVKELLGITIMERSSFEKNPIDFLEAKGYKEVKKDLIIKLPKYSLFELENGRKRMLASAGELQKGNELALPSKYVNFLYLASHYEKLKGSPEDNEQKQLFVEQHKHYLDEIIEQISEFSKRVILADANLDKVLSAYNKHRDKPIREQAENIIHLFTLTNLGAPAAFKYFDTTIDRKRYTSTKEVLDATLIHQSITGLYETRIDLSQLGGDGGEAAAKGGSGGGGGTLQLDDEYRLYSPLVKPDQNIQFWLEQFPQAWAETAGMGLAKQVPPQVIQLKASATPVSVRQYPLSKEAQEGIRPHVQRLIQQGILVPVQSPWNTPLLPVRKPGTNDYRPVQDLREVNKRVQDIHPTVPNPYNLLCALPPQRSWYTVLDLKDAFFCLRLHPTSQPLFAFEWRDPGTGRTGQLTWTRLPQGFKNSPTIFDEALHRDLANFRIQHPQVTLLQYVDDLLLAGATKQDCLEGTKALLLELSDLGYRASAKKAQICRREVTYLGYSLRDGQRWLTEARKKTVVQIPAPTTAKQVREFLGTAGFCRLWIPGFATLAAPLYPLTKEKGEFSWAPEHQKAFDAIKKALLSAPALALPDVTKPFTLYVDERKGVARGVLTQTLGPWRRPVAYLSKKLDPVASGWPVCLKAIAAVAILVKDADKLTLGQNITVIAPHALENIVRQPPDRWMTNARMTHYQSLLLTERVTFAPPAALNPATLLPEETDEPVTHDCHQLLIEETGVRKDLTDIPLTGEVLTWFTDGSSYVVEGKRMAGAAVVDGTRTIWASSLPEGTSAQKAELMALTQALRLAEGKSINIYTDSRYAFATAHVHGAIYKQRGLLTSAGREIKNKEEILSLLEALHLPKRLAIIHCPGHQKAKDPISRGNQMADRVAKQAAQGVNLLAGKRTADGSEFEKRTADGSEFESPKKKAKVE

SEQ ID NO: 6951 - protein, 2087 aa, synthetic construct
MPAAKRVKLDGGDKKYSIGLDIGTNSVGWAVITDEYKVPSKKFKVLGNTDRHSIKKNLIGALLFDSGETAEATRLKRTARRRYTRRKNRICYLQEIFSNEMAKVDDSFFHRLEESFLVEEDKKHERHPIFGNIVDEVAYHEKYPTIYHLRKKLVDSTDKADLRLIYLALAHMIKFRGHFLIEGDLNPDNSDVDKLFIQLVQTYNQLFEENPINASGVDAKAILSARLSKSRRLENLIAQLPGEKKNGLFGNLIALSLGLTPNFKSNFDLAEDAKLQLSKDTYDDDLDNLLAQIGDQYADLFLAAKNLSDAILLSDILRVNTEITKAPLSASMIKRYDEHHQDLTLLKALVRQQLPEKYKEIFFDQSKNGYAGYIDGGASQEEFYKFIKPILEKMDGTEELLVKLNREDLLRKQRTFDNGSIPHQIHLGELHAILRRQEDFYPFLKDNREKIEKILTFRIPYYVGPLARGNSRFAWMTRKSEETITPWNFEEVVDKGASAQSFIERMTNFDKNLPNEKVLPKHSLLYEYFTVYNELTKVKYVTEGMRKPAFLSGEQKKAIVDLLFKTNRKVTVKQLKEDYFKKIECFDSVEISGVEDRFNASLGTYHDLLKIIKDKDFLDNEENEDILEDIVLTLTLFEDREMIEERLKTYAHLFDDKVMKQLKRRRYTGWGRLSRKLINGIRDKQSGKTILDFLKSDGFANRNFMQLIHDDSLTFKEDIQKAQVSGQGDSLHEHIANLAGSPAIKKGILQTVKVVDELVKVMGRHKPENIVIEMARENQTTQKGQKNSRERMKRIEEGIKELGSQILKEHPVENTQLQNEKLYLYYLQNGRDMYVDQELDINRLSDYDVDHIVPQSFLKDDSIDNKVLTRSDKARGKSDNVPSEEVVKKMKNYWRQLLNAKLITQRKFDNLTKAERGGLSELDKAGFIKRQLVETRQITKHVAQILDSRMNTKYDENDKLIREVKVITLKSKLVSDFRKDFQFYKVREINNYHHAHDAYLNAVVGTALIKKYPKLESEFVYGDYKVYDVRKMIAKSEQEIGKATAKYFFYSNIMNFFKTEITLANGEIRKRPLIETNGETGEIVWDKGRDFATVRKVLSMPQVNIVKKTEVQTGGFSKESILPKRNSDKLIARKKDWDPKKYGGFDSPTVAYSVLVVAKVEKGKSKKLKSVKELLGITIMERSSFEKNPIDFLEAKGYKEVKKDLIIKLPKYSLFELENGRKRMLASAGELQKGNELALPSKYVNFLYLASHYEKLKGSPEDNEQKQLFVEQHKHYLDEIIEQISEFSKRVILADANLDKVLSAYNKHRDKPIREQAENIIHLFTLTNLGAPAAFKYFDTTIDRKRYTSTKEVLDATLIHQSITGLYETRIDLSQLGGDGGEAAAKGGSGGGGGIPWLMKKPLQLTTLVPLQEYEERLLKQTMLTGSYKEKLQSLFLKYDALWQHWENQVGHRRIKPHHIATGTVNPRPQKQYPINPKAKASIQTVINDLLKQGVLIQQNSIMNTPVYPVPKPDGKWRMVLDYREVNKTIPLIAAQNQHSAGILSSIFRGKYKTTLDLSNGFWAHSITPESYWLTAFTWLGQQYCWTRLPQGFLNSPALFTADVVDLLKEVPNVQVYVDDIYISHDDPREHLEQLEKVFSLLLNAGYVVSLKKSEIAQHEVEFLGFNITKEGRGLTETFKQKLLNITPPRDLKQLQSILGLLNFARNFIPNFSELVKPLYNIIATANGKYITWTTDNSQQLQNIISMLNSAENLEERNPEVRLIMKVNTSPSAGYIRFYNEFAKRPIMYLNYVYTKAEVKFTNTEKLLTTIHKGLIKALDLGMGQEILVYSPIVSMTKIQKTPLPERKALPIRWITWMSYLEDPRIQFHYDKTLPELQQVPTVTDDIIAKIKHPSEFSMVFYTDGSAIKHPNVNKSHNAGMGIAQVQFKPEFTVINTWSIPLGDHTAQLAEVAAVEFACKKALKIDGPVLIVTDSFYVAESVNKELPYWQSNGFFNNKKKPLKHVSKWKSIADCIQLKPDIIIIHEKGHQPTASTFHTEGNNLADKLATQGSYVVNAGKRTADGSEFEKRTADGSEFESPKKKAKVE

SEQ ID NO: 6952 - protein, 2176 aa, synthetic construct
MPAAKRVKLDGGDKKYSIGLDIGTNSVGWAVITDEYKVPSKKFKVLGNTDRHSIKKNLIGALLFDSGETAEATRLKRTARRRYTRRKNRICYLQEIFSNEMAKVDDSFFHRLEESFLVEEDKKHERHPIFGNIVDEVAYHEKYPTIYHLRKKLVDSTDKADLRLIYLALAHMIKFRGHFLIEGDLNPDNSDVDKLFIQLVQTYNQLFEENPINASGVDAKAILSARLSKSRRLENLIAQLPGEKKNGLFGNLIALSLGLTPNFKSNFDLAEDAKLQLSKDTYDDDLDNLLAQIGDQYADLFLAAKNLSDAILLSDILRVNTEITKAPLSASMIKRYDEHHQDLTLLKALVRQQLPEKYKEIFFDQSKNGYAGYIDGGASQEEFYKFIKPILEKMDGTEELLVKLNREDLLRKQRTFDNGSIPHQIHLGELHAILRRQEDFYPFLKDNREKIEKILTFRIPYYVGPLARGNSRFAWMTRKSEETITPWNFEEVVDKGASAQSFIERMTNFDKNLPNEKVLPKHSLLYEYFTVYNELTKVKYVTEGMRKPAFLSGEQKKAIVDLLFKTNRKVTVKQLKEDYFKKIECFDSVEISGVEDRFNASLGTYHDLLKIIKDKDFLDNEENEDILEDIVLTLTLFEDREMIEERLKTYAHLFDDKVMKQLKRRRYTGWGRLSRKLINGIRDKQSGKTILDFLKSDGFANRNFMQLIHDDSLTFKEDIQKAQVSGQGDSLHEHIANLAGSPAIKKGILQTVKVVDELVKVMGRHKPENIVIEMARENQTTQKGQKNSRERMKRIEEGIKELGSQILKEHPVENTQLQNEKLYLYYLQNGRDMYVDQELDINRLSDYDVDHIVPQSFLKDDSIDNKVLTRSDKARGKSDNVPSEEVVKKMKNYWRQLLNAKLITQRKFDNLTKAERGGLSELDKAGFIKRQLVETRQITKHVAQILDSRMNTKYDENDKLIREVKVITLKSKLVSDFRKDFQFYKVREINNYHHAHDAYLNAVVGTALIKKYPKLESEFVYGDYKVYDVRKMIAKSEQEIGKATAKYFFYSNIMNFFKTEITLANGEIRKRPLIETNGETGEIVWDKGRDFATVRKVLSMPQVNIVKKTEVQTGGFSKESILPKRNSDKLIARKKDWDPKKYGGFDSPTVAYSVLVVAKVEKGKSKKLKSVKELLGITIMERSSFEKNPIDFLEAKGYKEVKKDLIIKLPKYSLFELENGRKRMLASAGELQKGNELALPSKYVNFLYLASHYEKLKGSPEDNEQKQLFVEQHKHYLDEIIEQISEFSKRVILADANLDKVLSAYNKHRDKPIREQAENIIHLFTLTNLGAPAAFKYFDTTIDRKRYTSTKEVLDATLIHQSITGLYETRIDLSQLGGDGGEAAAKGGSGGGGGMDPLQLLQPLEAEIKGTKLKAHWNSGATITCVPQAFLEEEVPIKNIWIKTIHGEKEQPVYYLTFKIQGRKVEAEVISSPYDYILVSPSDIPWLMKKPLQLTTLVPLQEYEERLLKQTMLTGSYKEKLQSLFLKYDALWQHWENQVGHRRIKPHHIATGTVNPRPQKQYPINPKAKASIQTVINDLLKQGVLIQQNSIMNTPVYPVPKPDGKWRMVLDYREVNKTIPLIAAQNQHSAGILSSIFRGKYKTTLDLSNGFWAHSITPESYWLTAFTWLGQQYCWTRLPQGFLNSPALFNADVVDLLKEVPNVQVYVDDIYISHDDPREHLEQLEKVFSLLLNAGYVVSLKKSEIAQHEVEFLGFNITKEGRGLTETFKQKLLNITPPRDLKQLQSILGKLNFARNFIPNFSELVKPLYNIIATAPGKYITWTTDNSQQLQNIISMLNSAENLEERNPEVRLIMKVNTSPSAGYIRFYNEFAKRPIMYLNYVYTKAEVKFTNTEKLLTTIHKGLIKALDLGMGQEILVYSPIVSMTKIQKTPLPERKALPIRWITWMSYLEDPRIQFHYDKTLPELQQVPTVTDDIIAKIKHPSEFSMVFYTDGSAIKHPNVNKSHNAGMGIAQVQFKPEFTVINTWSIPLGDHTAQLAEVAAVEFACKKALKIDGPVLIVTDSFYVAESVNKELPYWQSNGFFNNKKKPLKHVSKWKSIADCIQLKPDIIIIHEKGHQPTASTFHTEGNNLADKLATQGSYVVNAGKRTADGSEFEKRTADGSEFESPKKKAKVE

SEQ ID NO: 6953 - protein, 2094 aa, synthetic construct
MPAAKRVKLDGGDKKYSIGLDIGTNSVGWAVITDEYKVPSKKFKVLGNTDRHSIKKNLIGALLFDSGETAEATRLKRTARRRYTRRKNRICYLQEIFSNEMAKVDDSFFHRLEESFLVEEDKKHERHPIFGNIVDEVAYHEKYPTIYHLRKKLVDSTDKADLRLIYLALAHMIKFRGHFLIEGDLNPDNSDVDKLFIQLVQTYNQLFEENPINASGVDAKAILSARLSKSRRLENLIAQLPGEKKNGLFGNLIALSLGLTPNFKSNFDLAEDAKLQLSKDTYDDDLDNLLAQIGDQYADLFLAAKNLSDAILLSDILRVNTEITKAPLSASMIKRYDEHHQDLTLLKALVRQQLPEKYKEIFFDQSKNGYAGYIDGGASQEEFYKFIKPILEKMDGTEELLVKLNREDLLRKQRTFDNGSIPHQIHLGELHAILRRQEDFYPFLKDNREKIEKILTFRIPYYVGPLARGNSRFAWMTRKSEETITPWNFEEVVDKGASAQSFIERMTNFDKNLPNEKVLPKHSLLYEYFTVYNELTKVKYVTEGMRKPAFLSGEQKKAIVDLLFKTNRKVTVKQLKEDYFKKIECFDSVEISGVEDRFNASLGTYHDLLKIIKDKDFLDNEENEDILEDIVLTLTLFEDREMIEERLKTYAHLFDDKVMKQLKRRRYTGWGRLSRKLINGIRDKQSGKTILDFLKSDGFANRNFMQLIHDDSLTFKEDIQKAQVSGQGDSLHEHIANLAGSPAIKKGILQTVKVVDELVKVMGRHKPENIVIEMARENQTTQKGQKNSRERMKRIEEGIKELGSQILKEHPVENTQLQNEKLYLYYLQNGRDMYVDQELDINRLSDYDVDHIVPQSFLKDDSIDNKVLTRSDKARGKSDNVPSEEVVKKMKNYWRQLLNAKLITQRKFDNLTKAERGGLSELDKAGFIKRQLVETRQITKHVAQILDSRMNTKYDENDKLIREVKVITLKSKLVSDFRKDFQFYKVREINNYHHAHDAYLNAVVGTALIKKYPKLESEFVYGDYKVYDVRKMIAKSEQEIGKATAKYFFYSNIMNFFKTEITLANGEIRKRPLIETNGETGEIVWDKGRDFATVRKVLSMPQVNIVKKTEVQTGGFSKESILPKRNSDKLIARKKDWDPKKYGGFDSPTVAYSVLVVAKVEKGKSKKLKSVKELLGITIMERSSFEKNPIDFLEAKGYKEVKKDLIIKLPKYSLFELENGRKRMLASAGELQKGNELALPSKYVNFLYLASHYEKLKGSPEDNEQKQLFVEQHKHYLDEIIEQISEFSKRVILADANLDKVLSAYNKHRDKPIREQAENIIHLFTLTNLGAPAAFKYFDTTIDRKRYTSTKEVLDATLIHQSITGLYETRIDLSQLGGDGGEAAAKGGSGGGGGVLNLEEEYRLHEKPVPSSIDPSWLQLFPTVWAERAGMGLANQVPPVVVELRSGASPVAVRQYPMSKEAREGIRPHIQRFLDLGVLVPCQSPWNTPLLPVKKPGTNDYRPVQDLREINKRVQDIHPTVPNPYNLLSSLPPSHTWYSVLDLKDAFFCLKLHPNSQPLFAFEWRDPEKGNTGQLTWTRLPQGFKNSPTLFNEALHRDLAPFRALNPQVVLLQYVDDLLVAAPTYRDCKEGTQKLLQELSKLGYRVSAKKAQLCQKEVTYLGYLLKEGKRWLTPARKATVMKIPPPTTPRQVREFLGTAGFCRLWIPGFASLAAPLYPLTKPSIPFIWTEEHQKAFDRIKEALLSAPALALPDLTKPFTLYVDERAGVARGVLTQTLGPWRRPVAYLSKKLDPVASGWPTCLKAVAAVALLLKDADKLTLGQNVTVIASHSLESIVRQPPDRWMTNARMTHYQSLLLNERVSFAPPAVLNPATLLPVESEATPVHRCSEILAEETGTRRDLKDQPLPGVPAWYTDGSSFIAEGKRRAGAAIVDGKRTVWASSLPEGTSAQKAELVALTQALRLAEGKDINIYTDSRYAFATAHIHGAIYKQRGWLTSAGKDIKNKEEILALLEAIHLPKRVAIIHCPGHQKGNDPVATGNRRADEAAKQAALSTRVLAETTKPAGKRTADGSEFEKRTADGSEFESPKKKAKVE

SEQ ID NO: 6954 - protein, 2094 aa, synthetic construct
MPAAKRVKLDGGDKKYSIGLDIGTNSVGWAVITDEYKVPSKKFKVLGNTDRHSIKKNLIGALLFDSGETAEATRLKRTARRRYTRRKNRICYLQEIFSNEMAKVDDSFFHRLEESFLVEEDKKHERHPIFGNIVDEVAYHEKYPTIYHLRKKLVDSTDKADLRLIYLALAHMIKFRGHFLIEGDLNPDNSDVDKLFIQLVQTYNQLFEENPINASGVDAKAILSARLSKSRRLENLIAQLPGEKKNGLFGNLIALSLGLTPNFKSNFDLAEDAKLQLSKDTYDDDLDNLLAQIGDQYADLFLAAKNLSDAILLSDILRVNTEITKAPLSASMIKRYDEHHQDLTLLKALVRQQLPEKYKEIFFDQSKNGYAGYIDGGASQEEFYKFIKPILEKMDGTEELLVKLNREDLLRKQRTFDNGSIPHQIHLGELHAILRRQEDFYPFLKDNREKIEKILTFRIPYYVGPLARGNSRFAWMTRKSEETITPWNFEEVVDKGASAQSFIERMTNFDKNLPNEKVLPKHSLLYEYFTVYNELTKVKYVTEGMRKPAFLSGEQKKAIVDLLFKTNRKVTVKQLKEDYFKKIECFDSVEISGVEDRFNASLGTYHDLLKIIKDKDFLDNEENEDILEDIVLTLTLFEDREMIEERLKTYAHLFDDKVMKQLKRRRYTGWGRLSRKLINGIRDKQSGKTILDFLKSDGFANRNFMQLIHDDSLTFKEDIQKAQVSGQGDSLHEHIANLAGSPAIKKGILQTVKVVDELVKVMGRHKPENIVIEMARENQTTQKGQKNSRERMKRIEEGIKELGSQILKEHPVENTQLQNEKLYLYYLQNGRDMYVDQELDINRLSDYDVDHIVPQSFLKDDSIDNKVLTRSDKARGKSDNVPSEEVVKKMKNYWRQLLNAKLITQRKFDNLTKAERGGLSELDKAGFIKRQLVETRQITKHVAQILDSRMNTKYDENDKLIREVKVITLKSKLVSDFRKDFQFYKVREINNYHHAHDAYLNAVVGTALIKKYPKLESEFVYGDYKVYDVRKMIAKSEQEIGKATAKYFFYSNIMNFFKTEITLANGEIRKRPLIETNGETGEIVWDKGRDFATVRKVLSMPQVNIVKKTEVQTGGFSKESILPKRNSDKLIARKKDWDPKKYGGFDSPTVAYSVLVVAKVEKGKSKKLKSVKELLGITIMERSSFEKNPIDFLEAKGYKEVKKDLIIKLPKYSLFELENGRKRMLASAGELQKGNELALPSKYVNFLYLASHYEKLKGSPEDNEQKQLFVEQHKHYLDEIIEQISEFSKRVILADANLDKVLSAYNKHRDKPIREQAENIIHLFTLTNLGAPAAFKYFDTTIDRKRYTSTKEVLDATLIHQSITGLYETRIDLSQLGGDGGEAAAKGGSGGGGGVLNLEEEYRLHEKPVPSSIDPSWLQLFPTVWAERAGMGLANQVPPVVVELRSGASPVAVRQYPMSKEAREGIRPHIQRFLDLGVLVPCQSPWNTPLLPVKKPGTNDYRPVQDLREINKRVQDIHPTVPNPYNLLSSLPPSHTWYSVLDLKDAFFCLKLHPNSQPLFAFEWRDPEKGNTGQLTWTRLPQGFKNSPTLFNEALHRDLAPFRALNPQVVLLQYVDDLLVAAPTYRDCKEGTQKLLQELSKLGYRVSAKKAQLCQKEVTYLGYLLKEGKRWLTPARKATVMKIPPPTTPRQVREFLGKAGFCRLFIPGFASLAAPLYPLTKPSIPFIWTEEHQKAFDRIKEALLSAPALALPDLTKPFTLYVDERAGVARGVLTQTLGPWRRPVAYLSKKLDPVASGWPTCLKAVAAVALLLKDADKLTLGQNVTVIASHSLESIVRQPPDRWMTNARMTHYQSLLLNERVSFAPPAVLNPATLLPVESEATPVHRCSEILAEETGTRRDLKDQPLPGVPAWYTDGSSFIAEGKRRAGAAIVDGKRTVWASSLPEGTSAQKAELVALTQALRLAEGKDINIYTDSRYAFATAHIHGAIYKQRGWLTSAGKDIKNKEEILALLEAIHLPKRVAIIHCPGHQKGNDPVATGNRRADEAAKQAALSTRVLAETTKPAGKRTADGSEFEKRTADGSEFESPKKKAKVE

SEQ ID NO: 6955 - protein, 2096 aa, synthetic construct
MPAAKRVKLDGGDKKYSIGLDIGTNSVGWAVITDEYKVPSKKFKVLGNTDRHSIKKNLIGALLFDSGETAEATRLKRTARRRYTRRKNRICYLQEIFSNEMAKVDDSFFHRLEESFLVEEDKKHERHPIFGNIVDEVAYHEKYPTIYHLRKKLVDSTDKADLRLIYLALAHMIKFRGHFLIEGDLNPDNSDVDKLFIQLVQTYNQLFEENPINASGVDAKAILSARLSKSRRLENLIAQLPGEKKNGLFGNLIALSLGLTPNFKSNFDLAEDAKLQLSKDTYDDDLDNLLAQIGDQYADLFLAAKNLSDAILLSDILRVNTEITKAPLSASMIKRYDEHHQDLTLLKALVRQQLPEKYKEIFFDQSKNGYAGYIDGGASQEEFYKFIKPILEKMDGTEELLVKLNREDLLRKQRTFDNGSIPHQIHLGELHAILRRQEDFYPFLKDNREKIEKILTFRIPYYVGPLARGNSRFAWMTRKSEETITPWNFEEVVDKGASAQSFIERMTNFDKNLPNEKVLPKHSLLYEYFTVYNELTKVKYVTEGMRKPAFLSGEQKKAIVDLLFKTNRKVTVKQLKEDYFKKIECFDSVEISGVEDRFNASLGTYHDLLKIIKDKDFLDNEENEDILEDIVLTLTLFEDREMIEERLKTYAHLFDDKVMKQLKRRRYTGWGRLSRKLINGIRDKQSGKTILDFLKSDGFANRNFMQLIHDDSLTFKEDIQKAQVSGQGDSLHEHIANLAGSPAIKKGILQTVKVVDELVKVMGRHKPENIVIEMARENQTTQKGQKNSRERMKRIEEGIKELGSQILKEHPVENTQLQNEKLYLYYLQNGRDMYVDQELDINRLSDYDVDHIVPQSFLKDDSIDNKVLTRSDKARGKSDNVPSEEVVKKMKNYWRQLLNAKLITQRKFDNLTKAERGGLSELDKAGFIKRQLVETRQITKHVAQILDSRMNTKYDENDKLIREVKVITLKSKLVSDFRKDFQFYKVREINNYHHAHDAYLNAVVGTALIKKYPKLESEFVYGDYKVYDVRKMIAKSEQEIGKATAKYFFYSNIMNFFKTEITLANGEIRKRPLIETNGETGEIVWDKGRDFATVRKVLSMPQVNIVKKTEVQTGGFSKESILPKRNSDKLIARKKDWDPKKYGGFDSPTVAYSVLVVAKVEKGKSKKLKSVKELLGITIMERSSFEKNPIDFLEAKGYKEVKKDLIIKLPKYSLFELENGRKRMLASAGELQKGNELALPSKYVNFLYLASHYEKLKGSPEDNEQKQLFVEQHKHYLDEIIEQISEFSKRVILADANLDKVLSAYNKHRDKPIREQAENIIHLFTLTNLGAPAAFKYFDTTIDRKRYTSTKEVLDATLIHQSITGLYETRIDLSQLGGDGGEAAAKGGSGGGGGTLNIEDEYRLHETSKEPDVPLGSTWLSDFPQAWAETGGMGLAVRQAPLIIPLKATSTPVSIKQYPMSQEARLGIKPHIQRLLDQGILVPCQSPWNTPLLPVKKPGTNDYRPVQDLREVNKRVEDIHPTVPNPYNLLSGLPPSHQWYTVLDLKDAFFCLRLHPTSQPLFAFEWRDPEMGISGQLTWTRLPQGFKNSPTLFDEALHRDLADFRIQHPDLILLQYVDDLLLAATSEQDCQRGTRALLQTLGNLGYRASAKKAQICQKQVKYLGYLLKEGQRWLTEARKETVMGQPTPKTPRQLREFLGTAGFCRLWIPGFAEMAAPLYPLTKTGTLFNWGPDQQKAYQEIKQALLTAPALGLPDLTKPFELFVDEKQGYAKGVLTQKLGPWRRPVAYLSKKLDPVAAGWPPCLRMVAAIAVLTKDAGKLTMGQPLVILAPHAVEALVKQPPDRWLSNARMTHYQAMLLDTDRVQFGPVVALNPATLLPLPEKEAPHDCLEILAETHGTRPDLTDQPIPDADYTWYTDGSSFLQEGQRRAGAAVTTETEVIWARALPAGTSAQRAELIALTQALKMAEGKKLNVYTDSRYAFATAHVHGEIYRRRGLLTSEGREIKNKNEILALLKALFLPKRLSIIHCPGHQKGNSAEARGNRMADQAAREAAMKAVLETSTLLAGKRTADGSEFEKRTADGSEFESPKKKAKVE

SEQ ID NO: 6956 - protein, 2096 aa, synthetic construct
MPAAKRVKLDGGDKKYSIGLDIGTNSVGWAVITDEYKVPSKKFKVLGNTDRHSIKKNLIGALLFDSGETAEATRLKRTARRRYTRRKNRICYLQEIFSNEMAKVDDSFFHRLEESFLVEEDKKHERHPIFGNIVDEVAYHEKYPTIYHLRKKLVDSTDKADLRLIYLALAHMIKFRGHFLIEGDLNPDNSDVDKLFIQLVQTYNQLFEENPINASGVDAKAILSARLSKSRRLENLIAQLPGEKKNGLFGNLIALSLGLTPNFKSNFDLAEDAKLQLSKDTYDDDLDNLLAQIGDQYADLFLAAKNLSDAILLSDILRVNTEITKAPLSASMIKRYDEHHQDLTLLKALVRQQLPEKYKEIFFDQSKNGYAGYIDGGASQEEFYKFIKPILEKMDGTEELLVKLNREDLLRKQRTFDNGSIPHQIHLGELHAILRRQEDFYPFLKDNREKIEKILTFRIPYYVGPLARGNSRFAWMTRKSEETITPWNFEEVVDKGASAQSFIERMTNFDKNLPNEKVLPKHSLLYEYFTVYNELTKVKYVTEGMRKPAFLSGEQKKAIVDLLFKTNRKVTVKQLKEDYFKKIECFDSVEISGVEDRFNASLGTYHDLLKIIKDKDFLDNEENEDILEDIVLTLTLFEDREMIEERLKTYAHLFDDKVMKQLKRRRYTGWGRLSRKLINGIRDKQSGKTILDFLKSDGFANRNFMQLIHDDSLTFKEDIQKAQVSGQGDSLHEHIANLAGSPAIKKGILQTVKVVDELVKVMGRHKPENIVIEMARENQTTQKGQKNSRERMKRIEEGIKELGSQILKEHPVENTQLQNEKLYLYYLQNGRDMYVDQELDINRLSDYDVDHIVPQSFLKDDSIDNKVLTRSDKARGKSDNVPSEEVVKKMKNYWRQLLNAKLITQRKFDNLTKAERGGLSELDKAGFIKRQLVETRQITKHVAQILDSRMNTKYDENDKLIREVKVITLKSKLVSDFRKDFQFYKVREINNYHHAHDAYLNAVVGTALIKKYPKLESEFVYGDYKVYDVRKMIAKSEQEIGKATAKYFFYSNIMNFFKTEITLANGEIRKRPLIETNGETGEIVWDKGRDFATVRKVLSMPQVNIVKKTEVQTGGFSKESILPKRNSDKLIARKKDWDPKKYGGFDSPTVAYSVLVVAKVEKGKSKKLKSVKELLGITIMERSSFEKNPIDFLEAKGYKEVKKDLIIKLPKYSLFELENGRKRMLASAGELQKGNELALPSKYVNFLYLASHYEKLKGSPEDNEQKQLFVEQHKHYLDEIIEQISEFSKRVILADANLDKVLSAYNKHRDKPIREQAENIIHLFTLTNLGAPAAFKYFDTTIDRKRYTSTKEVLDATLIHQSITGLYETRIDLSQLGGDGGEAAAKGGSGGGGGTLNIEDEYRLHETSKEPDVPLGSTWLSDFPQAWAETGGMGLAVRQAPLIIPLKATSTPVSIKQYPMSQEARLGIKPHIQRLLDQGILVPCQSPWNTPLLPVKKPGTNDYRPVQDLREVNKRVEDIHPTVPNPYNLLSGLPPSHQWYTVLDLKDAFFCLRLHPTSQPLFAFEWRDPEMGISGQLTWTRLPQGFKNSPTLFNEALHRDLADFRIQHPDLILLQYVDDLLLAATSEQDCQRGTRALLQTLGNLGYRASAKKAQICQKQVKYLGYLLKEGQRWLTEARKETVMGQPTPKTPRQLREFLGTAGFCRLWIPGFAEMAAPLYPLTKPGTLFNWGPDQQKAYQEIKQALLTAPALGLPDLTKPFELFVDEKQGYAKGVLTQKLGPWRRPVAYLSKKLDPVAAGWPPCLRMVAAIAVLTKDAGKLTMGQPLVILAPHAVEALVKQPPDRWLSNARMTHYQAMLLDTDRVQFGPVVALNPATLLPLPEKEAPHDCLEILAETHGTRPDLTDQPIPDADYTWYTDGSSFLQEGQRRAGAAVTTETEVIWARALPAGTSAQRAELIALTQALKMAEGKKLNVYTDSRYAFATAHVHGEIYRRRGWLTSEGREIKNKNEILALLKALFLPKRLSIIHCPGHQKGNSAEARGNRMADQAAREAAMKAVLETSTLLAGKRTADGSEFEKRTADGSEFESPKKKAKVE

SEQ ID NO: 6957 - protein, 2102 aa, synthetic construct
MPAAKRVKLDGGDKKYSIGLDIGTNSVGWAVITDEYKVPSKKFKVLGNTDRHSIKKNLIGALLFDSGETAEATRLKRTARRRYTRRKNRICYLQEIFSNEMAKVDDSFFHRLEESFLVEEDKKHERHPIFGNIVDEVAYHEKYPTIYHLRKKLVDSTDKADLRLIYLALAHMIKFRGHFLIEGDLNPDNSDVDKLFIQLVQTYNQLFEENPINASGVDAKAILSARLSKSRRLENLIAQLPGEKKNGLFGNLIALSLGLTPNFKSNFDLAEDAKLQLSKDTYDDDLDNLLAQIGDQYADLFLAAKNLSDAILLSDILRVNTEITKAPLSASMIKRYDEHHQDLTLLKALVRQQLPEKYKEIFFDQSKNGYAGYIDGGASQEEFYKFIKPILEKMDGTEELLVKLNREDLLRKQRTFDNGSIPHQIHLGELHAILRRQEDFYPFLKDNREKIEKILTFRIPYYVGPLARGNSRFAWMTRKSEETITPWNFEEVVDKGASAQSFIERMTNFDKNLPNEKVLPKHSLLYEYFTVYNELTKVKYVTEGMRKPAFLSGEQKKAIVDLLFKTNRKVTVKQLKEDYFKKIECFDSVEISGVEDRFNASLGTYHDLLKIIKDKDFLDNEENEDILEDIVLTLTLFEDREMIEERLKTYAHLFDDKVMKQLKRRRYTGWGRLSRKLINGIRDKQSGKTILDFLKSDGFANRNFMQLIHDDSLTFKEDIQKAQVSGQGDSLHEHIANLAGSPAIKKGILQTVKVVDELVKVMGRHKPENIVIEMARENQTTQKGQKNSRERMKRIEEGIKELGSQILKEHPVENTQLQNEKLYLYYLQNGRDMYVDQELDINRLSDYDVDHIVPQSFLKDDSIDNKVLTRSDKARGKSDNVPSEEVVKKMKNYWRQLLNAKLITQRKFDNLTKAERGGLSELDKAGFIKRQLVETRQITKHVAQILDSRMNTKYDENDKLIREVKVITLKSKLVSDFRKDFQFYKVREINNYHHAHDAYLNAVVGTALIKKYPKLESEFVYGDYKVYDVRKMIAKSEQEIGKATAKYFFYSNIMNFFKTEITLANGEIRKRPLIETNGETGEIVWDKGRDFATVRKVLSMPQVNIVKKTEVQTGGFSKESILPKRNSDKLIARKKDWDPKKYGGFDSPTVAYSVLVVAKVEKGKSKKLKSVKELLGITIMERSSFEKNPIDFLEAKGYKEVKKDLIIKLPKYSLFELENGRKRMLASAGELQKGNELALPSKYVNFLYLASHYEKLKGSPEDNEQKQLFVEQHKHYLDEIIEQISEFSKRVILADANLDKVLSAYNKHRDKPIREQAENIIHLFTLTNLGAPAAFKYFDTTIDRKRYTSTKEVLDATLIHQSITGLYETRIDLSQLGGDGGEAAAKGGGGGSGGTVSLQDEHRLFDIPVTTSLPDVWLQDFPQAWAETGGLGRAKCQAPIIIDLKPTAVPVSIKQYPMSLEAHMGIRQHIIKFLELGVLRPCRSPWNTPLLPVKKPGTQDYRPVQDLREINKRTVDIHPTVPNPYNLLSTLKPDYSWYTVLDLKDAFFCLPLAPQSQELFAFEWKDPERGISGQLTWTRLPQGFKNSPTLFNEALHRDLTDFRTQHPEVTLLQYVDDLLLAAPTKKACTQGTRHLLQELGEKGYRASAKKAQICQTKVTYLGYILSEGKRWLTPGRIETVARIPPPRNPREVREFLGKAGFCRLFIPGFAELAAPLYALTKPSTPFTWQTEHQLAFEALKKALLSAPALGLPDTSKPFTLFLDERQGIAKGVLTQKLGPWKRPVAYLSKKLDPVAAGWPPCLRIMAATAMLVKDSAKLTLGQPLTVITPHTLEAIVRQPPDRWITNARLTHYQALLLDTDRVQFGPPVTLNPATLLPVPENQPSPHDCRQVLAETHGTREDLKDQELPDADHTWYTDGSSYLDSGTRRAGAAVVDGHNTIWAQSLPPGTSAQKAELIALTKALELSKGKKANIYTDSRYAFATAHTHGSIYERRGWLTSEGKEIKNKAEIIALLKALFLPQEVAIIHCPGHQKGQDPVAVGNRQADRVARQAAMAEVLTLATEPDNTSHITAGKRTADGSEFEKRTADGSEFESPKKKAKVE

SEQ ID NO: 6958 - protein, 2095 aa, synthetic construct
MPAAKRVKLDGGDKKYSIGLDIGTNSVGWAVITDEYKVPSKKFKVLGNTDRHSIKKNLIGALLFDSGETAEATRLKRTARRRYTRRKNRICYLQEIFSNEMAKVDDSFFHRLEESFLVEEDKKHERHPIFGNIVDEVAYHEKYPTIYHLRKKLVDSTDKADLRLIYLALAHMIKFRGHFLIEGDLNPDNSDVDKLFIQLVQTYNQLFEENPINASGVDAKAILSARLSKSRRLENLIAQLPGEKKNGLFGNLIALSLGLTPNFKSNFDLAEDAKLQLSKDTYDDDLDNLLAQIGDQYADLFLAAKNLSDAILLSDILRVNTEITKAPLSASMIKRYDEHHQDLTLLKALVRQQLPEKYKEIFFDQSKNGYAGYIDGGASQEEFYKFIKPILEKMDGTEELLVKLNREDLLRKQRTFDNGSIPHQIHLGELHAILRRQEDFYPFLKDNREKIEKILTFRIPYYVGPLARGNSRFAWMTRKSEETITPWNFEEVVDKGASAQSFIERMTNFDKNLPNEKVLPKHSLLYEYFTVYNELTKVKYVTEGMRKPAFLSGEQKKAIVDLLFKTNRKVTVKQLKEDYFKKIECFDSVEISGVEDRFNASLGTYHDLLKIIKDKDFLDNEENEDILEDIVLTLTLFEDREMIEERLKTYAHLFDDKVMKQLKRRRYTGWGRLSRKLINGIRDKQSGKTILDFLKSDGFANRNFMQLIHDDSLTFKEDIQKAQVSGQGDSLHEHIANLAGSPAIKKGILQTVKVVDELVKVMGRHKPENIVIEMARENQTTQKGQKNSRERMKRIEEGIKELGSQILKEHPVENTQLQNEKLYLYYLQNGRDMYVDQELDINRLSDYDVDHIVPQSFLKDDSIDNKVLTRSDKARGKSDNVPSEEVVKKMKNYWRQLLNAKLITQRKFDNLTKAERGGLSELDKAGFIKRQLVETRQITKHVAQILDSRMNTKYDENDKLIREVKVITLKSKLVSDFRKDFQFYKVREINNYHHAHDAYLNAVVGTALIKKYPKLESEFVYGDYKVYDVRKMIAKSEQEIGKATAKYFFYSNIMNFFKTEITLANGEIRKRPLIETNGETGEIVWDKGRDFATVRKVLSMPQVNIVKKTEVQTGGFSKESILPKRNSDKLIARKKDWDPKKYGGFDSPTVAYSVLVVAKVEKGKSKKLKSVKELLGITIMERSSFEKNPIDFLEAKGYKEVKKDLIIKLPKYSLFELENGRKRMLASAGELQKGNELALPSKYVNFLYLASHYEKLKGSPEDNEQKQLFVEQHKHYLDEIIEQISEFSKRVILADANLDKVLSAYNKHRDKPIREQAENIIHLFTLTNLGAPAAFKYFDTTIDRKRYTSTKEVLDATLIHQSITGLYETRIDLSQLGGDGGEAAAKGGGGGSGGTLQLEEEYRLFEPESTQKQEMDIWLKNFPQAWAETGGMGTAHCQAPVLIQLKATATPISIRQYPMPHEAYQGIKPHIRRMLDQGILKPCQSPWNTPLLPVKKPGTEDYRPVQDLREVNKRVEDIHPTVPNPYNLLSTLPPSHPWYTVLDLKDAFFCLRLHSESQLLFAFEWRDPEIGLSGQLTWTRLPQGFKNSPTLFNEALHSDLADFRVRYPALVLLQYVDDLLLAAATRTECLEGTKALLETLGNKGYRASAKKAQICLQEVTYLGYSLKDGQRWLTKARKEAILSIPVPKNSRQVREFLGTAGYCRLWIPGFAELAAPLYPLTRPGTLFQWGTEQQLAFEDIKKALLSSPALGLPDITKPFELFIDENSGFAKGVLVQKLGPWKRPVAYLSKKLDTVASGWPPCLRMVAAIAILVKDAGKLTLGQPLTILTSHPVEALVRQPPNKWLSNARMTHYQAMLLDAERVHFGPTVSLNPATLLPLPSGGNHHDCLQILAETHGTRPDLTDQPLPDADLTWYTDGSSFIRNGEREAGAAVTTESEVIWAAPLPPGTSAQRAELIALTQALKMAEGKKLTVYTDSRYAFATTHVHGEIYRRRGWLTSEGKEIKNKNEILALLEALFLPKRLSIIHCPGHQKGDSPQAKGNRLADDTAKKAATETHSSLTVLPAGKRTADGSEFEKRTADGSEFESPKKKAKVE

SEQ ID NO: 6959 - protein, 2087 aa, synthetic construct
MPAAKRVKLDGGDKKYSIGLDIGTNSVGWAVITDEYKVPSKKFKVLGNTDRHSIKKNLIGALLFDSGETAEATRLKRTARRRYTRRKNRICYLQEIFSNEMAKVDDSFFHRLEESFLVEEDKKHERHPIFGNIVDEVAYHEKYPTIYHLRKKLVDSTDKADLRLIYLALAHMIKFRGHFLIEGDLNPDNSDVDKLFIQLVQTYNQLFEENPINASGVDAKAILSARLSKSRRLENLIAQLPGEKKNGLFGNLIALSLGLTPNFKSNFDLAEDAKLQLSKDTYDDDLDNLLAQIGDQYADLFLAAKNLSDAILLSDILRVNTEITKAPLSASMIKRYDEHHQDLTLLKALVRQQLPEKYKEIFFDQSKNGYAGYIDGGASQEEFYKFIKPILEKMDGTEELLVKLNREDLLRKQRTFDNGSIPHQIHLGELHAILRRQEDFYPFLKDNREKIEKILTFRIPYYVGPLARGNSRFAWMTRKSEETITPWNFEEVVDKGASAQSFIERMTNFDKNLPNEKVLPKHSLLYEYFTVYNELTKVKYVTEGMRKPAFLSGEQKKAIVDLLFKTNRKVTVKQLKEDYFKKIECFDSVEISGVEDRFNASLGTYHDLLKIIKDKDFLDNEENEDILEDIVLTLTLFEDREMIEERLKTYAHLFDDKVMKQLKRRRYTGWGRLSRKLINGIRDKQSGKTILDFLKSDGFANRNFMQLIHDDSLTFKEDIQKAQVSGQGDSLHEHIANLAGSPAIKKGILQTVKVVDELVKVMGRHKPENIVIEMARENQTTQKGQKNSRERMKRIEEGIKELGSQILKEHPVENTQLQNEKLYLYYLQNGRDMYVDQELDINRLSDYDVDHIVPQSFLKDDSIDNKVLTRSDKARGKSDNVPSEEVVKKMKNYWRQLLNAKLITQRKFDNLTKAERGGLSELDKAGFIKRQLVETRQITKHVAQILDSRMNTKYDENDKLIREVKVITLKSKLVSDFRKDFQFYKVREINNYHHAHDAYLNAVVGTALIKKYPKLESEFVYGDYKVYDVRKMIAKSEQEIGKATAKYFFYSNIMNFFKTEITLANGEIRKRPLIETNGETGEIVWDKGRDFATVRKVLSMPQVNIVKKTEVQTGGFSKESILPKRNSDKLIARKKDWDPKKYGGFDSPTVAYSVLVVAKVEKGKSKKLKSVKELLGITIMERSSFEKNPIDFLEAKGYKEVKKDLIIKLPKYSLFELENGRKRMLASAGELQKGNELALPSKYVNFLYLASHYEKLKGSPEDNEQKQLFVEQHKHYLDEIIEQISEFSKRVILADANLDKVLSAYNKHRDKPIREQAENIIHLFTLTNLGAPAAFKYFDTTIDRKRYTSTKEVLDATLIHQSITGLYETRIDLSQLGGDGGEAAAKGGGGGSGGVPWLTQQPLQLTILVPLQEYQEKILSKTALPEDQKQQLKTLFVKYDNLWQHWENQVGHRKIRPHNIATGDYPPRPQKQYPINPKAKPSIQIVIDDLLKQGVLTPQNSTMNTPVYPVPKPDGRWRMVLDYREVNKTIPLTAAQNQHSAGILATIVRQKYKTTLDLANGFWAHPITPESYWLTAFTWQGKQYCWTRLPQGFLNSPALFNADVVDLLKEIPNVQVYVDDIYLSHDDPKEHVQQLEKVFQILLQAGYVVSLKKSEIGQKTVEFLGFNITKEGRGLTDTFKTKLLNITPPKDLKQLQSILGKLNFARNFIPNFAELVQPLYNLIAPAKGKYIEWSEENTKQLNMVIEALNTASNLEERLPEQRLVIKVNTSPSAGYVRYYNETGKKPIMYLNYVFSKAELKFSMLEKLLTTMHKALIKAMDLAMGQEILVYSPIVSMTKIQKTPLPERKALPIRWITWMTYLEDPRIQFHYDKTLPELKHIPDVYTSSQSPVKHPSQYEGVFYTDGSAIKSPDPTKSNNAGMGIVHATYKPEYQVLNQWSIPLGNHTAQMAEIAAVEFACKKALKIPGPVLVITDSFYVAESANKELPYWKSNGFVNNKKKPLKHISKWKSIAECLSMKPDITIQHEKGISLQIPVFILKGNALADKLATQGSYVVNAGKRTADGSEFEKRTADGSEFESPKKKAKVE

SEQ ID NO: 6960 - protein, 2218 aa, synthetic construct
MPAAKRVKLDGGDKKYSIGLDIGTNSVGWAVITDEYKVPSKKFKVLGNTDRHSIKKNLIGALLFDSGETAEATRLKRTARRRYTRRKNRICYLQEIFSNEMAKVDDSFFHRLEESFLVEEDKKHERHPIFGNIVDEVAYHEKYPTIYHLRKKLVDSTDKADLRLIYLALAHMIKFRGHFLIEGDLNPDNSDVDKLFIQLVQTYNQLFEENPINASGVDAKAILSARLSKSRRLENLIAQLPGEKKNGLFGNLIALSLGLTPNFKSNFDLAEDAKLQLSKDTYDDDLDNLLAQIGDQYADLFLAAKNLSDAILLSDILRVNTEITKAPLSASMIKRYDEHHQDLTLLKALVRQQLPEKYKEIFFDQSKNGYAGYIDGGASQEEFYKFIKPILEKMDGTEELLVKLNREDLLRKQRTFDNGSIPHQIHLGELHAILRRQEDFYPFLKDNREKIEKILTFRIPYYVGPLARGNSRFAWMTRKSEETITPWNFEEVVDKGASAQSFIERMTNFDKNLPNEKVLPKHSLLYEYFTVYNELTKVKYVTEGMRKPAFLSGEQKKAIVDLLFKTNRKVTVKQLKEDYFKKIECFDSVEISGVEDRFNASLGTYHDLLKIIKDKDFLDNEENEDILEDIVLTLTLFEDREMIEERLKTYAHLFDDKVMKQLKRRRYTGWGRLSRKLINGIRDKQSGKTILDFLKSDGFANRNFMQLIHDDSLTFKEDIQKAQVSGQGDSLHEHIANLAGSPAIKKGILQTVKVVDELVKVMGRHKPENIVIEMARENQTTQKGQKNSRERMKRIEEGIKELGSQILKEHPVENTQLQNEKLYLYYLQNGRDMYVDQELDINRLSDYDVDHIVPQSFLKDDSIDNKVLTRSDKARGKSDNVPSEEVVKKMKNYWRQLLNAKLITQRKFDNLTKAERGGLSELDKAGFIKRQLVETRQITKHVAQILDSRMNTKYDENDKLIREVKVITLKSKLVSDFRKDFQFYKVREINNYHHAHDAYLNAVVGTALIKKYPKLESEFVYGDYKVYDVRKMIAKSEQEIGKATAKYFFYSNIMNFFKTEITLANGEIRKRPLIETNGETGEIVWDKGRDFATVRKVLSMPQVNIVKKTEVQTGGFSKESILPKRNSDKLIARKKDWDPKKYGGFDSPTVAYSVLVVAKVEKGKSKKLKSVKELLGITIMERSSFEKNPIDFLEAKGYKEVKKDLIIKLPKYSLFELENGRKRMLASAGELQKGNELALPSKYVNFLYLASHYEKLKGSPEDNEQKQLFVEQHKHYLDEIIEQISEFSKRVILADANLDKVLSAYNKHRDKPIREQAENIIHLFTLTNLGAPAAFKYFDTTIDRKRYTSTKEVLDATLIHQSITGLYETRIDLSQLGGDGGEAAAKGGGGGSGGTLGDQGSRGSDPLPEPRVTLTVEGIPTEFLVNTGAEHSVLTKPMGKMGSKRTVVAGATGSKVYPWTTKRLLKIGQKQVTHSFLVIPECPAPLLGRDLLTKLKAQIQFSTEGPQVTWEDRPAMCLVLNLEEEYRLHEKPVPPSIDPSWLQLFPMVWAEKAGMGLANQVPPVVVELKSDASPVAVRQYPMSKEAREGIRPHIQRFLDLGILVPCQSPWNTPLLPVKKPGTNDYRPVQDLREVNKRVQDIHPTVPNPYNLLSSLPPSHTWYSVLDLKDAFFCLKLHPNSQPLFAFEWRDPEKGNTGQLTWTRLPQGFKNSPTLFDEALHRDLASFRALNPQVVMLQYVDDLLVAAPTYRDCKEGTRRLLQELSKLGYRVSAKKAQLCREEVTYLGYLLKGGKRWLTPARKATVMKIPTPTTPRQVREFLGTAGFCRLWIPGFASLAAPLYPLTREKVPFTWTEAHQEAFGRIKEALLSAPALALPDLTKPFALYVDEKEGVARGVLTQTLGPWRRPVAYLSKKLDPVASGWPTCLKAIAAVALLLKDADKLTLGQNVLVIAPHNLESIVRQPPDRWMTNARMTHYQSLLLNERVSFAPPAILNPATLLPVESDDTPIHICSEILAEETGTRPDLRDQPLPGVPAWYTDGSSFIMDGRRQAGAAIVDNKRTVWASNLPEGTSAQKAELIALTQALRLAEGKSINIYTDSRYAFATAHVHGAIYKQRGLLTSAGKDIKNKEEILALLEAIHLPKRVAIIHCPGHQRGTDPVATGNRKADEAAKQAAQSTRILTETTKNAGKRTADGSEFEKRTADGSEFESPKKKAKVE

SEQ ID NO: 6961 - protein, 2218 aa, synthetic construct
MPAAKRVKLDGGDKKYSIGLDIGTNSVGWAVITDEYKVPSKKFKVLGNTDRHSIKKNLIGALLFDSGETAEATRLKRTARRRYTRRKNRICYLQEIFSNEMAKVDDSFFHRLEESFLVEEDKKHERHPIFGNIVDEVAYHEKYPTIYHLRKKLVDSTDKADLRLIYLALAHMIKFRGHFLIEGDLNPDNSDVDKLFIQLVQTYNQLFEENPINASGVDAKAILSARLSKSRRLENLIAQLPGEKKNGLFGNLIALSLGLTPNFKSNFDLAEDAKLQLSKDTYDDDLDNLLAQIGDQYADLFLAAKNLSDAILLSDILRVNTEITKAPLSASMIKRYDEHHQDLTLLKALVRQQLPEKYKEIFFDQSKNGYAGYIDGGASQEEFYKFIKPILEKMDGTEELLVKLNREDLLRKQRTFDNGSIPHQIHLGELHAILRRQEDFYPFLKDNREKIEKILTFRIPYYVGPLARGNSRFAWMTRKSEETITPWNFEEVVDKGASAQSFIERMTNFDKNLPNEKVLPKHSLLYEYFTVYNELTKVKYVTEGMRKPAFLSGEQKKAIVDLLFKTNRKVTVKQLKEDYFKKIECFDSVEISGVEDRFNASLGTYHDLLKIIKDKDFLDNEENEDILEDIVLTLTLFEDREMIEERLKTYAHLFDDKVMKQLKRRRYTGWGRLSRKLINGIRDKQSGKTILDFLKSDGFANRNFMQLIHDDSLTFKEDIQKAQVSGQGDSLHEHIANLAGSPAIKKGILQTVKVVDELVKVMGRHKPENIVIEMARENQTTQKGQKNSRERMKRIEEGIKELGSQILKEHPVENTQLQNEKLYLYYLQNGRDMYVDQELDINRLSDYDVDHIVPQSFLKDDSIDNKVLTRSDKARGKSDNVPSEEVVKKMKNYWRQLLNAKLITQRKFDNLTKAERGGLSELDKAGFIKRQLVETRQITKHVAQILDSRMNTKYDENDKLIREVKVITLKSKLVSDFRKDFQFYKVREINNYHHAHDAYLNAVVGTALIKKYPKLESEFVYGDYKVYDVRKMIAKSEQEIGKATAKYFFYSNIMNFFKTEITLANGEIRKRPLIETNGETGEIVWDKGRDFATVRKVLSMPQVNIVKKTEVQTGGFSKESILPKRNSDKLIARKKDWDPKKYGGFDSPTVAYSVLVVAKVEKGKSKKLKSVKELLGITIMERSSFEKNPIDFLEAKGYKEVKKDLIIKLPKYSLFELENGRKRMLASAGELQKGNELALPSKYVNFLYLASHYEKLKGSPEDNEQKQLFVEQHKHYLDEIIEQISEFSKRVILADANLDKVLSAYNKHRDKPIREQAENIIHLFTLTNLGAPAAFKYFDTTIDRKRYTSTKEVLDATLIHQSITGLYETRIDLSQLGGDGGEAAAKGGGGGSGGTLGDQGSRGSDPLPEPRVTLTVEGIPTEFLVNTGAEHSVLTKPMGKMGSKRTVVAGATGSKVYPWTTKRLLKIGQKQVTHSFLVIPECPAPLLGRDLLTKLKAQIQFSTEGPQVTWEDRPAMCLVLNLEEEYRLHEKPVPPSIDPSWLQLFPMVWAEKAGMGLANQVPPVVVELKSDASPVAVRQYPMSKEAREGIRPHIQRFLDLGILVPCQSPWNTPLLPVKKPGTNDYRPVQDLREVNKRVQDIHPTVPNPYNLLSSLPPSHTWYSVLDLKDAFFCLKLHPNSQPLFAFEWRDPEKGNTGQLTWTRLPQGFKNSPTLFNEALHRDLASFRALNPQVVMLQYVDDLLVAAPTYRDCKEGTRRLLQELSKLGYRVSAKKAQLCREEVTYLGYLLKGGKRWLTPARKATVMKIPTPTTPRQVREFLGTAGFCRLWIPGFASLAAPLYPLTRPKVPFTWTEAHQEAFGRIKEALLSAPALALPDLTKPFALYVDEKEGVARGVLTQTLGPWRRPVAYLSKKLDPVASGWPTCLKAIAAVALLLKDADKLTLGQNVLVIAPHNLESIVRQPPDRWMTNARMTHYQSLLLNERVSFAPPAILNPATLLPVESDDTPIHICSEILAEETGTRPDLRDQPLPGVPAWYTDGSSFIMDGRRQAGAAIVDNKRTVWASNLPEGTSAQKAELIALTQALRLAEGKSINIYTDSRYAFATAHVHGAIYKQRGWLTSAGKDIKNKEEILALLEAIHLPKRVAIIHCPGHQRGTDPVATGNRKADEAAKQAAQSTRILTETTKNAGKRTADGSEFEKRTADGSEFESPKKKAKVE

SEQ ID NO: 6962 - protein, 2218 aa, synthetic construct
MPAAKRVKLDGGDKKYSIGLDIGTNSVGWAVITDEYKVPSKKFKVLGNTDRHSIKKNLIGALLFDSGETAEATRLKRTARRRYTRRKNRICYLQEIFSNEMAKVDDSFFHRLEESFLVEEDKKHERHPIFGNIVDEVAYHEKYPTIYHLRKKLVDSTDKADLRLIYLALAHMIKFRGHFLIEGDLNPDNSDVDKLFIQLVQTYNQLFEENPINASGVDAKAILSARLSKSRRLENLIAQLPGEKKNGLFGNLIALSLGLTPNFKSNFDLAEDAKLQLSKDTYDDDLDNLLAQIGDQYADLFLAAKNLSDAILLSDILRVNTEITKAPLSASMIKRYDEHHQDLTLLKALVRQQLPEKYKEIFFDQSKNGYAGYIDGGASQEEFYKFIKPILEKMDGTEELLVKLNREDLLRKQRTFDNGSIPHQIHLGELHAILRRQEDFYPFLKDNREKIEKILTFRIPYYVGPLARGNSRFAWMTRKSEETITPWNFEEVVDKGASAQSFIERMTNFDKNLPNEKVLPKHSLLYEYFTVYNELTKVKYVTEGMRKPAFLSGEQKKAIVDLLFKTNRKVTVKQLKEDYFKKIECFDSVEISGVEDRFNASLGTYHDLLKIIKDKDFLDNEENEDILEDIVLTLTLFEDREMIEERLKTYAHLFDDKVMKQLKRRRYTGWGRLSRKLINGIRDKQSGKTILDFLKSDGFANRNFMQLIHDDSLTFKEDIQKAQVSGQGDSLHEHIANLAGSPAIKKGILQTVKVVDELVKVMGRHKPENIVIEMARENQTTQKGQKNSRERMKRIEEGIKELGSQILKEHPVENTQLQNEKLYLYYLQNGRDMYVDQELDINRLSDYDVDHIVPQSFLKDDSIDNKVLTRSDKARGKSDNVPSEEVVKKMKNYWRQLLNAKLITQRKFDNLTKAERGGLSELDKAGFIKRQLVETRQITKHVAQILDSRMNTKYDENDKLIREVKVITLKSKLVSDFRKDFQFYKVREINNYHHAHDAYLNAVVGTALIKKYPKLESEFVYGDYKVYDVRKMIAKSEQEIGKATAKYFFYSNIMNFFKTEITLANGEIRKRPLIETNGETGEIVWDKGRDFATVRKVLSMPQVNIVKKTEVQTGGFSKESILPKRNSDKLIARKKDWDPKKYGGFDSPTVAYSVLVVAKVEKGKSKKLKSVKELLGITIMERSSFEKNPIDFLEAKGYKEVKKDLIIKLPKYSLFELENGRKRMLASAGELQKGNELALPSKYVNFLYLASHYEKLKGSPEDNEQKQLFVEQHKHYLDEIIEQISEFSKRVILADANLDKVLSAYNKHRDKPIREQAENIIHLFTLTNLGAPAAFKYFDTTIDRKRYTSTKEVLDATLIHQSITGLYETRIDLSQLGGDGGEAAAKGGGGGSGGTLGDQGSRGSDPLPEPRVTLTVEGIPTEFLVNTGAEHSVLTKPMGKMGSKRTVVAGATGSKVYPWTTKRLLKIGQKQVTHSFLVIPECPAPLLGRDLLTKLKAQIQFSTEGPQVTWEDRPAMCLVLNLEEEYRLHEKPVPPSIDPSWLQLFPMVWAEKAGMGLANQVPPVVVELKSDASPVAVRQYPMSKEAREGIRPHIQRFLDLGILVPCQSPWNTPLLPVKKPGTNDYRPVQDLREVNKRVQDIHPTVPNPYNLLSSLPPSHTWYSVLDLKDAFFCLKLHPNSQPLFAFEWRDPEKGNTGQLTWTRLPQGFKNSPTLFNEALHRDLASFRALNPQVVMLQYVDDLLVAAPTYRDCKEGTRRLLQELSKLGYRVSAKKAQLCREEVTYLGYLLKGGKRWLTPARKATVMKIPTPTTPRQVREFLGKAGFCRLFIPGFASLAAPLYPLTRPKVPFTWTEAHQEAFGRIKEALLSAPALALPDLTKPFALYVDEKEGVARGVLTQTLGPWRRPVAYLSKKLDPVASGWPTCLKAIAAVALLLKDADKLTLGQNVLVIAPHNLESIVRQPPDRWMTNARMTHYQSLLLNERVSFAPPAILNPATLLPVESDDTPIHICSEILAEETGTRPDLRDQPLPGVPAWYTDGSSFIMDGRRQAGAAIVDNKRTVWASNLPEGTSAQKAELIALTQALRLAEGKSINIYTDSRYAFATAHVHGAIYKQRGWLTSAGKDIKNKEEILALLEAIHLPKRVAIIHCPGHQRGTDPVATGNRKADEAAKQAAQSTRILTETTKNAGKRTADGSEFEKRTADGSEFESPKKKAKVE

SEQ ID NO: 6963 - protein, 2096 aa, synthetic construct
MPAAKRVKLDGGDKKYSIGLDIGTNSVGWAVITDEYKVPSKKFKVLGNTDRHSIKKNLIGALLFDSGETAEATRLKRTARRRYTRRKNRICYLQEIFSNEMAKVDDSFFHRLEESFLVEEDKKHERHPIFGNIVDEVAYHEKYPTIYHLRKKLVDSTDKADLRLIYLALAHMIKFRGHFLIEGDLNPDNSDVDKLFIQLVQTYNQLFEENPINASGVDAKAILSARLSKSRRLENLIAQLPGEKKNGLFGNLIALSLGLTPNFKSNFDLAEDAKLQLSKDTYDDDLDNLLAQIGDQYADLFLAAKNLSDAILLSDILRVNTEITKAPLSASMIKRYDEHHQDLTLLKALVRQQLPEKYKEIFFDQSKNGYAGYIDGGASQEEFYKFIKPILEKMDGTEELLVKLNREDLLRKQRTFDNGSIPHQIHLGELHAILRRQEDFYPFLKDNREKIEKILTFRIPYYVGPLARGNSRFAWMTRKSEETITPWNFEEVVDKGASAQSFIERMTNFDKNLPNEKVLPKHSLLYEYFTVYNELTKVKYVTEGMRKPAFLSGEQKKAIVDLLFKTNRKVTVKQLKEDYFKKIECFDSVEISGVEDRFNASLGTYHDLLKIIKDKDFLDNEENEDILEDIVLTLTLFEDREMIEERLKTYAHLFDDKVMKQLKRRRYTGWGRLSRKLINGIRDKQSGKTILDFLKSDGFANRNFMQLIHDDSLTFKEDIQKAQVSGQGDSLHEHIANLAGSPAIKKGILQTVKVVDELVKVMGRHKPENIVIEMARENQTTQKGQKNSRERMKRIEEGIKELGSQILKEHPVENTQLQNEKLYLYYLQNGRDMYVDQELDINRLSDYDVDHIVPQSFLKDDSIDNKVLTRSDKARGKSDNVPSEEVVKKMKNYWRQLLNAKLITQRKFDNLTKAERGGLSELDKAGFIKRQLVETRQITKHVAQILDSRMNTKYDENDKLIREVKVITLKSKLVSDFRKDFQFYKVREINNYHHAHDAYLNAVVGTALIKKYPKLESEFVYGDYKVYDVRKMIAKSEQEIGKATAKYFFYSNIMNFFKTEITLANGEIRKRPLIETNGETGEIVWDKGRDFATVRKVLSMPQVNIVKKTEVQTGGFSKESILPKRNSDKLIARKKDWDPKKYGGFDSPTVAYSVLVVAKVEKGKSKKLKSVKELLGITIMERSSFEKNPIDFLEAKGYKEVKKDLIIKLPKYSLFELENGRKRMLASAGELQKGNELALPSKYVNFLYLASHYEKLKGSPEDNEQKQLFVEQHKHYLDEIIEQISEFSKRVILADANLDKVLSAYNKHRDKPIREQAENIIHLFTLTNLGAPAAFKYFDTTIDRKRYTSTKEVLDATLIHQSITGLYETRIDLSQLGGDGGEAAAKGGGGGSGGTLNLEDEYRLYETSAEPEVSPGSTWLSDFPQAWAETGGMGLAVRQAPLIIPLKATSTPVSIKQYPMSQEAKLGIKPHIQRLLDQGILVPCQSPWNTPLLPVKKPGTNDYRPVQDLREVNKRVEDIHPTVPNPYNLLSGLPPSHRWYTVLDLKDAFFCLRLHPTSQPLFAFEWRDPGMGISGQLTWTRLPQGFKNSPTLFNEALHRDLADFRIQHPDLILLQYVDDILLAATSELDCQQGTRALLLTLGNLGYRASAKKAQLCQKQVKYLGYLLKEGQRWLTEARKETVMGQPTPKTPRQLREFLGKAGFCRLFIPGFAEMAAPLYPLTKPGTLFNWGPDQQKAYQEIKQALLTAPALGLPDLTKPFELFVDEKQGYAKGVLTQKLGPWRRPVAYLSKKLDPVAAGWPPCLRMVAAIAVLRKDAGKLTMGQPLVILAPHAVEALVKQPPDRWLSNARMTHYQAMLLDTDRVQFGPVVALNPATLLPLPEEGAPHDCLEILAETHGTRPDLTDQPIPDADHTWYTDGSSFLQEGQRKAGAAVTTETEVIWARALPAGTSAQRAELIALTQALKMAEGKRLNVYTDSRYAFATAHIHGEIYRRRGWLTSEGREIKNKSEILALLKALFLPKRLSIIHCLGHQKGDSAEARGNRLADQAAREAAIKTPPDTSTLLAGKRTADGSEFEKRTADGSEFESPKKKAKVE

SEQ ID NO: 6964 - protein, 2096 aa, synthetic construct
MPAAKRVKLDGGDKKYSIGLDIGTNSVGWAVITDEYKVPSKKFKVLGNTDRHSIKKNLIGALLFDSGETAEATRLKRTARRRYTRRKNRICYLQEIFSNEMAKVDDSFFHRLEESFLVEEDKKHERHPIFGNIVDEVAYHEKYPTIYHLRKKLVDSTDKADLRLIYLALAHMIKFRGHFLIEGDLNPDNSDVDKLFIQLVQTYNQLFEENPINASGVDAKAILSARLSKSRRLENLIAQLPGEKKNGLFGNLIALSLGLTPNFKSNFDLAEDAKLQLSKDTYDDDLDNLLAQIGDQYADLFLAAKNLSDAILLSDILRVNTEITKAPLSASMIKRYDEHHQDLTLLKALVRQQLPEKYKEIFFDQSKNGYAGYIDGGASQEEFYKFIKPILEKMDGTEELLVKLNREDLLRKQRTFDNGSIPHQIHLGELHAILRRQEDFYPFLKDNREKIEKILTFRIPYYVGPLARGNSRFAWMTRKSEETITPWNFEEVVDKGASAQSFIERMTNFDKNLPNEKVLPKHSLLYEYFTVYNELTKVKYVTEGMRKPAFLSGEQKKAIVDLLFKTNRKVTVKQLKEDYFKKIECFDSVEISGVEDRFNASLGTYHDLLKIIKDKDFLDNEENEDILEDIVLTLTLFEDREMIEERLKTYAHLFDDKVMKQLKRRRYTGWGRLSRKLINGIRDKQSGKTILDFLKSDGFANRNFMQLIHDDSLTFKEDIQKAQVSGQGDSLHEHIANLAGSPAIKKGILQTVKVVDELVKVMGRHKPENIVIEMARENQTTQKGQKNSRERMKRIEEGIKELGSQILKEHPVENTQLQNEKLYLYYLQNGRDMYVDQELDINRLSDYDVDHIVPQSFLKDDSIDNKVLTRSDKARGKSDNVPSEEVVKKMKNYWRQLLNAKLITQRKFDNLTKAERGGLSELDKAGFIKRQLVETRQITKHVAQILDSRMNTKYDENDKLIREVKVITLKSKLVSDFRKDFQFYKVREINNYHHAHDAYLNAVVGTALIKKYPKLESEFVYGDYKVYDVRKMIAKSEQEIGKATAKYFFYSNIMNFFKTEITLANGEIRKRPLIETNGETGEIVWDKGRDFATVRKVLSMPQVNIVKKTEVQTGGFSKESILPKRNSDKLIARKKDWDPKKYGGFDSPTVAYSVLVVAKVEKGKSKKLKSVKELLGITIMERSSFEKNPIDFLEAKGYKEVKKDLIIKLPKYSLFELENGRKRMLASAGELQKGNELALPSKYVNFLYLASHYEKLKGSPEDNEQKQLFVEQHKHYLDEIIEQISEFSKRVILADANLDKVLSAYNKHRDKPIREQAENIIHLFTLTNLGAPAAFKYFDTTIDRKRYTSTKEVLDATLIHQSITGLYETRIDLSQLGGDGGEAAAKGGGGGSGGTLGIEDEYRLHETSTEPDVSLGSTWLSDFPQAWAETGGMGLAVRQAPLIIPLKATSTPVSIQQYPMSHEARLGIKPHIQRLLDQGILVPCQSPWNTPLLPVKKPGTNDYRPVQDLREVNKRVEDIHPTVPNPYNLLSGLPPSHQWYTVLDLKDAFFCLRLHPTSQPLFAFEWRDPGMGISGQLTWTRLPQGFKNSPTLFDEALHRDLADFRIQHPDLILLQYVDDILLAATSELDCQQGTRALLQTLGDLGYRASAKKAQICQKQVKYLGYLLREGQRWLTEARKETVMGQPVPKTPRQLREFLGTAGFCRLWIPGFAEMAAPLYPLTKTGTLFSWGPDQQKAYQEIKQALLTAPALGLPDLTKPFELFVDEKQGYAKGVLTQKLGPWRRPVAYLSKKLDPVAAGWPPCLRMVAAIAVLTKDAGKLTMGQPLVILAPHAVEALVKQPPDRWLSNARMTHYQAMLLDTDRVQFGPVVALNPATLLPLPEEGAPHDCLEILAETHGTRPDLTDQPIPDADHTWYTDGSSFLQEGQRKAGAAVTTETEVIWAGALPAGTSAQRAELIALTQALKMAEGKRLNVYTDSRYAFATAHIHGEIYRRRGLLTSEGREIKNKSEILALLKALFLPKRLSIIHCLGHQKGDSAEARGNRLADQAAREAAIKTPPDTSTLLAGKRTADGSEFEKRTADGSEFESPKKKAKVE

SEQ ID NO: 6965 - protein, 2096 aa, synthetic construct
MPAAKRVKLDGGDKKYSIGLDIGTNSVGWAVITDEYKVPSKKFKVLGNTDRHSIKKNLIGALLFDSGETAEATRLKRTARRRYTRRKNRICYLQEIFSNEMAKVDDSFFHRLEESFLVEEDKKHERHPIFGNIVDEVAYHEKYPTIYHLRKKLVDSTDKADLRLIYLALAHMIKFRGHFLIEGDLNPDNSDVDKLFIQLVQTYNQLFEENPINASGVDAKAILSARLSKSRRLENLIAQLPGEKKNGLFGNLIALSLGLTPNFKSNFDLAEDAKLQLSKDTYDDDLDNLLAQIGDQYADLFLAAKNLSDAILLSDILRVNTEITKAPLSASMIKRYDEHHQDLTLLKALVRQQLPEKYKEIFFDQSKNGYAGYIDGGASQEEFYKFIKPILEKMDGTEELLVKLNREDLLRKQRTFDNGSIPHQIHLGELHAILRRQEDFYPFLKDNREKIEKILTFRIPYYVGPLARGNSRFAWMTRKSEETITPWNFEEVVDKGASAQSFIERMTNFDKNLPNEKVLPKHSLLYEYFTVYNELTKVKYVTEGMRKPAFLSGEQKKAIVDLLFKTNRKVTVKQLKEDYFKKIECFDSVEISGVEDRFNASLGTYHDLLKIIKDKDFLDNEENEDILEDIVLTLTLFEDREMIEERLKTYAHLFDDKVMKQLKRRRYTGWGRLSRKLINGIRDKQSGKTILDFLKSDGFANRNFMQLIHDDSLTFKEDIQKAQVSGQGDSLHEHIANLAGSPAIKKGILQTVKVVDELVKVMGRHKPENIVIEMARENQTTQKGQKNSRERMKRIEEGIKELGSQILKEHPVENTQLQNEKLYLYYLQNGRDMYVDQELDINRLSDYDVDHIVPQSFLKDDSIDNKVLTRSDKARGKSDNVPSEEVVKKMKNYWRQLLNAKLITQRKFDNLTKAERGGLSELDKAGFIKRQLVETRQITKHVAQILDSRMNTKYDENDKLIREVKVITLKSKLVSDFRKDFQFYKVREINNYHHAHDAYLNAVVGTALIKKYPKLESEFVYGDYKVYDVRKMIAKSEQEIGKATAKYFFYSNIMNFFKTEITLANGEIRKRPLIETNGETGEIVWDKGRDFATVRKVLSMPQVNIVKKTEVQTGGFSKESILPKRNSDKLIARKKDWDPKKYGGFDSPTVAYSVLVVAKVEKGKSKKLKSVKELLGITIMERSSFEKNPIDFLEAKGYKEVKKDLIIKLPKYSLFELENGRKRMLASAGELQKGNELALPSKYVNFLYLASHYEKLKGSPEDNEQKQLFVEQHKHYLDEIIEQISEFSKRVILADANLDKVLSAYNKHRDKPIREQAENIIHLFTLTNLGAPAAFKYFDTTIDRKRYTSTKEVLDATLIHQSITGLYETRIDLSQLGGDGGEAAAKGGGGGSGGTLNIEDEYRLHETSKGPDVPLGSTWLSDFPQAWAETGGMGLAVRQAPLIIPLKATSTPVSIKQYPMSQEARLGIKPHIQRLLDQGILVPCQSPWNTPLLPVKKPGTNDYRPVQDLREVNKRVEDIHPTVPNPYNLLSGLPPSHQWYTVLDLKDAFFCLRLHPTSQSLFAFEWRDPEMGISGQLTWTRLPQGFKNSPTLFDEALHRDLADFRIQHPDLILLQYVDDLLLAATSELDCQQGTRALLQTLGDLGYRASAKKAQICQKQVKYLGYLLKEGQRWLTEARKETVMGQPTPKTPRQLREFLGTAGFCRLWIPGFAEMAAPLYPLTKTGTLFEWGPDQQKAYQEIKQALLTAPALGLPDLTKPFELFVDEKQGYAKGVLTQKLGPWRRPVAYLSKKLDPVAAGWPPCLRMVAAIAVLTKDAGKLTMGQPLVILAPHAVEALVKQPPDRWLSNARMTHYQALLLDTDRVQFGPIVALNPATLLPLPEEGLQHDCLDILAEAHGTRPDLTDQPLPDADHTWYTDGSSFLQEGQRKAGAAVTTETEVVWAKALPAGTSAQRAELIALTQALKMAEGKKLNVYTDSRYAFATAHIHGEIYRRRGLLTSEGKEIKNKDEILALLKALFLPKRLSIIHCPGHQKGNRAEARGNRMADQAAREVATRETPETSTLLAGKRTADGSEFEKRTADGSEFESPKKKAKVE

SEQ ID NO: 6966 - protein, 2087 aa, synthetic construct
MPAAKRVKLDGGDKKYSIGLDIGTNSVGWAVITDEYKVPSKKFKVLGNTDRHSIKKNLIGALLFDSGETAEATRLKRTARRRYTRRKNRICYLQEIFSNEMAKVDDSFFHRLEESFLVEEDKKHERHPIFGNIVDEVAYHEKYPTIYHLRKKLVDSTDKADLRLIYLALAHMIKFRGHFLIEGDLNPDNSDVDKLFIQLVQTYNQLFEENPINASGVDAKAILSARLSKSRRLENLIAQLPGEKKNGLFGNLIALSLGLTPNFKSNFDLAEDAKLQLSKDTYDDDLDNLLAQIGDQYADLFLAAKNLSDAILLSDILRVNTEITKAPLSASMIKRYDEHHQDLTLLKALVRQQLPEKYKEIFFDQSKNGYAGYIDGGASQEEFYKFIKPILEKMDGTEELLVKLNREDLLRKQRTFDNGSIPHQIHLGELHAILRRQEDFYPFLKDNREKIEKILTFRIPYYVGPLARGNSRFAWMTRKSEETITPWNFEEVVDKGASAQSFIERMTNFDKNLPNEKVLPKHSLLYEYFTVYNELTKVKYVTEGMRKPAFLSGEQKKAIVDLLFKTNRKVTVKQLKEDYFKKIECFDSVEISGVEDRFNASLGTYHDLLKIIKDKDFLDNEENEDILEDIVLTLTLFEDREMIEERLKTYAHLFDDKVMKQLKRRRYTGWGRLSRKLINGIRDKQSGKTILDFLKSDGFANRNFMQLIHDDSLTFKEDIQKAQVSGQGDSLHEHIANLAGSPAIKKGILQTVKVVDELVKVMGRHKPENIVIEMARENQTTQKGQKNSRERMKRIEEGIKELGSQILKEHPVENTQLQNEKLYLYYLQNGRDMYVDQELDINRLSDYDVDHIVPQSFLKDDSIDNKVLTRSDKARGKSDNVPSEEVVKKMKNYWRQLLNAKLITQRKFDNLTKAERGGLSELDKAGFIKRQLVETRQITKHVAQILDSRMNTKYDENDKLIREVKVITLKSKLVSDFRKDFQFYKVREINNYHHAHDAYLNAVVGTALIKKYPKLESEFVYGDYKVYDVRKMIAKSEQEIGKATAKYFFYSNIMNFFKTEITLANGEIRKRPLIETNGETGEIVWDKGRDFATVRKVLSMPQVNIVKKTEVQTGGFSKESILPKRNSDKLIARKKDWDPKKYGGFDSPTVAYSVLVVAKVEKGKSKKLKSVKELLGITIMERSSFEKNPIDFLEAKGYKEVKKDLIIKLPKYSLFELENGRKRMLASAGELQKGNELALPSKYVNFLYLASHYEKLKGSPEDNEQKQLFVEQHKHYLDEIIEQISEFSKRVILADANLDKVLSAYNKHRDKPIREQAENIIHLFTLTNLGAPAAFKYFDTTIDRKRYTSTKEVLDATLIHQSITGLYETRIDLSQLGGDGGEAAAKGGGGGSGGIPWLMKKPLQLTTLVPLQEYEERLLKQTMLTGSYKEKLQSLFLKYDALWQHWENQVGHRRIKPHHIATGTVNPRPQKQYPINPKAKASIQTVINDLLKQGVLIQQNSIMNTPVYPVPKPDGKWRMVLDYREVNKTIPLIAAQNQHSAGILSSIFRGKYKTTLDLSNGFWAHSITPESYWLTAFTWLGQQYCWTRLPQGFLNSPALFNADVVDLLKEVPNVQVYVDDIYISHDDPREHLEQLEKVFSLLLNAGYVVSLKKSEIAQHEVEFLGFNITKEGRGLTETFKQKLLNITPPRDLKQLQSILGLLNFARNFIPNFSELVKPLYNIIATAPGKYITWTTDNSQQLQNIISMLNSAENLEERNPEVRLIMKVNTSPSAGYIRFYNEFAKRPIMYLNYVYTKAEVKFTNTEKLLTTIHKGLIKALDLGMGQEILVYSPIVSMTKIQKTPLPERKALPIRWITWMSYLEDPRIQFHYDKTLPELQQVPTVTDDIIAKIKHPSEFSMVFYTDGSAIKHPNVNKSHNAGMGIAQVQFKPEFTVINTWSIPLGDHTAQLAEVAAVEFACKKALKIDGPVLIVTDSFYVAESVNKELPYWQSNGFFNNKKKPLKHVSKWKSIADCIQLKPDIIIIHEKGHQPTASTFHTEGNNLADKLATQGSYVVNAGKRTADGSEFEKRTADGSEFESPKKKAKVE

SEQ ID NO: 6967 - protein, 2087 aa, synthetic construct
MPAAKRVKLDGGDKKYSIGLDIGTNSVGWAVITDEYKVPSKKFKVLGNTDRHSIKKNLIGALLFDSGETAEATRLKRTARRRYTRRKNRICYLQEIFSNEMAKVDDSFFHRLEESFLVEEDKKHERHPIFGNIVDEVAYHEKYPTIYHLRKKLVDSTDKADLRLIYLALAHMIKFRGHFLIEGDLNPDNSDVDKLFIQLVQTYNQLFEENPINASGVDAKAILSARLSKSRRLENLIAQLPGEKKNGLFGNLIALSLGLTPNFKSNFDLAEDAKLQLSKDTYDDDLDNLLAQIGDQYADLFLAAKNLSDAILLSDILRVNTEITKAPLSASMIKRYDEHHQDLTLLKALVRQQLPEKYKEIFFDQSKNGYAGYIDGGASQEEFYKFIKPILEKMDGTEELLVKLNREDLLRKQRTFDNGSIPHQIHLGELHAILRRQEDFYPFLKDNREKIEKILTFRIPYYVGPLARGNSRFAWMTRKSEETITPWNFEEVVDKGASAQSFIERMTNFDKNLPNEKVLPKHSLLYEYFTVYNELTKVKYVTEGMRKPAFLSGEQKKAIVDLLFKTNRKVTVKQLKEDYFKKIECFDSVEISGVEDRFNASLGTYHDLLKIIKDKDFLDNEENEDILEDIVLTLTLFEDREMIEERLKTYAHLFDDKVMKQLKRRRYTGWGRLSRKLINGIRDKQSGKTILDFLKSDGFANRNFMQLIHDDSLTFKEDIQKAQVSGQGDSLHEHIANLAGSPAIKKGILQTVKVVDELVKVMGRHKPENIVIEMARENQTTQKGQKNSRERMKRIEEGIKELGSQILKEHPVENTQLQNEKLYLYYLQNGRDMYVDQELDINRLSDYDVDHIVPQSFLKDDSIDNKVLTRSDKARGKSDNVPSEEVVKKMKNYWRQLLNAKLITQRKFDNLTKAERGGLSELDKAGFIKRQLVETRQITKHVAQILDSRMNTKYDENDKLIREVKVITLKSKLVSDFRKDFQFYKVREINNYHHAHDAYLNAVVGTALIKKYPKLESEFVYGDYKVYDVRKMIAKSEQEIGKATAKYFFYSNIMNFFKTEITLANGEIRKRPLIETNGETGEIVWDKGRDFATVRKVLSMPQVNIVKKTEVQTGGFSKESILPKRNSDKLIARKKDWDPKKYGGFDSPTVAYSVLVVAKVEKGKSKKLKSVKELLGITIMERSSFEKNPIDFLEAKGYKEVKKDLIIKLPKYSLFELENGRKRMLASAGELQKGNELALPSKYVNFLYLASHYEKLKGSPEDNEQKQLFVEQHKHYLDEIIEQISEFSKRVILADANLDKVLSAYNKHRDKPIREQAENIIHLFTLTNLGAPAAFKYFDTTIDRKRYTSTKEVLDATLIHQSITGLYETRIDLSQLGGDGGEAAAKGGGGGSGGIPWLMKKPLQLTTLVPLQEYEERLLKQTMLTGSYKEKLQSLFLKYDALWQHWENQVGHRRIKPHHIATGTVNPRPQKQYPINPKAKASIQTVINDLLKQGVLIQQNSIMNTPVYPVPKPDGKWRMVLDYREVNKTIPLIAAQNQHSAGILSSIFRGKYKTTLDLSNGFWAHSITPESYWLTAFTWLGQQYCWTRLPQGFLNSPALFNADVVDLLKEVPNVQVYVDDIYISHDDPREHLEQLEKVFSLLLNAGYVVSLKKSEIAQHEVEFLGFNITKEGRGLTETFKQKLLNITPPRDLKQLQSILGKLNFARNFIPNFSELVKPLYNIIATAPGKYITWTTDNSQQLQNIISMLNSAENLEERNPEVRLIMKVNTSPSAGYIRFYNEFAKRPIMYLNYVYTKAEVKFTNTEKLLTTIHKGLIKALDLGMGQEILVYSPIVSMTKIQKTPLPERKALPIRWITWMSYLEDPRIQFHYDKTLPELQQVPTVTDDIIAKIKHPSEFSMVFYTDGSAIKHPNVNKSHNAGMGIAQVQFKPEFTVINTWSIPLGDHTAQLAEVAAVEFACKKALKIDGPVLIVTDSFYVAESVNKELPYWQSNGFFNNKKKPLKHVSKWKSIADCIQLKPDIIIIHEKGHQPTASTFHTEGNNLADKLATQGSYVVNAGKRTADGSEFEKRTADGSEFESPKKKAKVE

SEQ ID NO: 6968 - protein, 2094 aa, synthetic construct
MPAAKRVKLDGGDKKYSIGLDIGTNSVGWAVITDEYKVPSKKFKVLGNTDRHSIKKNLIGALLFDSGETAEATRLKRTARRRYTRRKNRICYLQEIFSNEMAKVDDSFFHRLEESFLVEEDKKHERHPIFGNIVDEVAYHEKYPTIYHLRKKLVDSTDKADLRLIYLALAHMIKFRGHFLIEGDLNPDNSDVDKLFIQLVQTYNQLFEENPINASGVDAKAILSARLSKSRRLENLIAQLPGEKKNGLFGNLIALSLGLTPNFKSNFDLAEDAKLQLSKDTYDDDLDNLLAQIGDQYADLFLAAKNLSDAILLSDILRVNTEITKAPLSASMIKRYDEHHQDLTLLKALVRQQLPEKYKEIFFDQSKNGYAGYIDGGASQEEFYKFIKPILEKMDGTEELLVKLNREDLLRKQRTFDNGSIPHQIHLGELHAILRRQEDFYPFLKDNREKIEKILTFRIPYYVGPLARGNSRFAWMTRKSEETITPWNFEEVVDKGASAQSFIERMTNFDKNLPNEKVLPKHSLLYEYFTVYNELTKVKYVTEGMRKPAFLSGEQKKAIVDLLFKTNRKVTVKQLKEDYFKKIECFDSVEISGVEDRFNASLGTYHDLLKIIKDKDFLDNEENEDILEDIVLTLTLFEDREMIEERLKTYAHLFDDKVMKQLKRRRYTGWGRLSRKLINGIRDKQSGKTILDFLKSDGFANRNFMQLIHDDSLTFKEDIQKAQVSGQGDSLHEHIANLAGSPAIKKGILQTVKVVDELVKVMGRHKPENIVIEMARENQTTQKGQKNSRERMKRIEEGIKELGSQILKEHPVENTQLQNEKLYLYYLQNGRDMYVDQELDINRLSDYDVDHIVPQSFLKDDSIDNKVLTRSDKARGKSDNVPSEEVVKKMKNYWRQLLNAKLITQRKFDNLTKAERGGLSELDKAGFIKRQLVETRQITKHVAQILDSRMNTKYDENDKLIREVKVITLKSKLVSDFRKDFQFYKVREINNYHHAHDAYLNAVVGTALIKKYPKLESEFVYGDYKVYDVRKMIAKSEQEIGKATAKYFFYSNIMNFFKTEITLANGEIRKRPLIETNGETGEIVWDKGRDFATVRKVLSMPQVNIVKKTEVQTGGFSKESILPKRNSDKLIARKKDWDPKKYGGFDSPTVAYSVLVVAKVEKGKSKKLKSVKELLGITIMERSSFEKNPIDFLEAKGYKEVKKDLIIKLPKYSLFELENGRKRMLASAGELQKGNELALPSKYVNFLYLASHYEKLKGSPEDNEQKQLFVEQHKHYLDEIIEQISEFSKRVILADANLDKVLSAYNKHRDKPIREQAENIIHLFTLTNLGAPAAFKYFDTTIDRKRYTSTKEVLDATLIHQSITGLYETRIDLSQLGGDGGEAAAKGGGGGSGGVLNLEEEYRLHEKPVPSSIDPSWLQLFPTVWAERAGMGLANQVPPVVVELRSGASPVAVRQYPMSKEAREGIRPHIQRFLDLGVLVPCQSPWNTPLLPVKKPGTNDYRPVQDLREINKRVQDIHPTVPNPYNLLSSLPPSHTWYSVLDLKDAFFCLKLHPNSQPLFAFEWRDPEKGNTGQLTWTRLPQGFKNSPTLFNEALHRDLAPFRALNPQVVLLQYVDDLLVAAPTYRDCKEGTQKLLQELSKLGYRVSAKKAQLCQKEVTYLGYLLKEGKRWLTPARKATVMKIPPPTTPRQVREFLGKAGFCRLFIPGFASLAAPLYPLTKPSIPFIWTEEHQKAFDRIKEALLSAPALALPDLTKPFTLYVDERAGVARGVLTQTLGPWRRPVAYLSKKLDPVASGWPTCLKAVAAVALLLKDADKLTLGQNVTVIASHSLESIVRQPPDRWMTNARMTHYQSLLLNERVSFAPPAVLNPATLLPVESEATPVHRCSEILAEETGTRRDLKDQPLPGVPAWYTDGSSFIAEGKRRAGAAIVDGKRTVWASSLPEGTSAQKAELVALTQALRLAEGKDINIYTDSRYAFATAHIHGAIYKQRGWLTSAGKDIKNKEEILALLEAIHLPKRVAIIHCPGHQKGNDPVATGNRRADEAAKQAALSTRVLAETTKPAGKRTADGSEFEKRTADGSEFESPKKKAKVE

SEQ ID NO: 6969 - protein, 2096 aa, synthetic construct
MPAAKRVKLDGGDKKYSIGLDIGTNSVGWAVITDEYKVPSKKFKVLGNTDRHSIKKNLIGALLFDSGETAEATRLKRTARRRYTRRKNRICYLQEIFSNEMAKVDDSFFHRLEESFLVEEDKKHERHPIFGNIVDEVAYHEKYPTIYHLRKKLVDSTDKADLRLIYLALAHMIKFRGHFLIEGDLNPDNSDVDKLFIQLVQTYNQLFEENPINASGVDAKAILSARLSKSRRLENLIAQLPGEKKNGLFGNLIALSLGLTPNFKSNFDLAEDAKLQLSKDTYDDDLDNLLAQIGDQYADLFLAAKNLSDAILLSDILRVNTEITKAPLSASMIKRYDEHHQDLTLLKALVRQQLPEKYKEIFFDQSKNGYAGYIDGGASQEEFYKFIKPILEKMDGTEELLVKLNREDLLRKQRTFDNGSIPHQIHLGELHAILRRQEDFYPFLKDNREKIEKILTFRIPYYVGPLARGNSRFAWMTRKSEETITPWNFEEVVDKGASAQSFIERMTNFDKNLPNEKVLPKHSLLYEYFTVYNELTKVKYVTEGMRKPAFLSGEQKKAIVDLLFKTNRKVTVKQLKEDYFKKIECFDSVEISGVEDRFNASLGTYHDLLKIIKDKDFLDNEENEDILEDIVLTLTLFEDREMIEERLKTYAHLFDDKVMKQLKRRRYTGWGRLSRKLINGIRDKQSGKTILDFLKSDGFANRNFMQLIHDDSLTFKEDIQKAQVSGQGDSLHEHIANLAGSPAIKKGILQTVKVVDELVKVMGRHKPENIVIEMARENQTTQKGQKNSRERMKRIEEGIKELGSQILKEHPVENTQLQNEKLYLYYLQNGRDMYVDQELDINRLSDYDVDHIVPQSFLKDDSIDNKVLTRSDKARGKSDNVPSEEVVKKMKNYWRQLLNAKLITQRKFDNLTKAERGGLSELDKAGFIKRQLVETRQITKHVAQILDSRMNTKYDENDKLIREVKVITLKSKLVSDFRKDFQFYKVREINNYHHAHDAYLNAVVGTALIKKYPKLESEFVYGDYKVYDVRKMIAKSEQEIGKATAKYFFYSNIMNFFKTEITLANGEIRKRPLIETNGETGEIVWDKGRDFATVRKVLSMPQVNIVKKTEVQTGGFSKESILPKRNSDKLIARKKDWDPKKYGGFDSPTVAYSVLVVAKVEKGKSKKLKSVKELLGITIMERSSFEKNPIDFLEAKGYKEVKKDLIIKLPKYSLFELENGRKRMLASAGELQKGNELALPSKYVNFLYLASHYEKLKGSPEDNEQKQLFVEQHKHYLDEIIEQISEFSKRVILADANLDKVLSAYNKHRDKPIREQAENIIHLFTLTNLGAPAAFKYFDTTIDRKRYTSTKEVLDATLIHQSITGLYETRIDLSQLGGDGGEAAAKGGGGGSGGTLNIEDEYRLHETSKEPDVPLGSTWLSDFPQAWAETGGMGLAVRQAPLIIPLKATSTPVSIKQYPMSQEARLGIKPHIQRLLDQGILVPCQSPWNTPLLPVKKPGTNDYRPVQDLREVNKRVEDIHPTVPNPYNLLSGLPPSHQWYTVLDLKDAFFCLRLHPTSQPLFAFEWRDPEMGISGQLTWTRLPQGFKNSPTLFNEALHRDLADFRIQHPDLILLQYVDDLLLAATSEQDCQRGTRALLQTLGNLGYRASAKKAQICQKQVKYLGYLLKEGQRWLTEARKETVMGQPTPKTPRQLREFLGTAGFCRLWIPGFAEMAAPLYPLTKPGTLFNWGPDQQKAYQEIKQALLTAPALGLPDLTKPFELFVDEKQGYAKGVLTQKLGPWRRPVAYLSKKLDPVAAGWPPCLRMVAAIAVLTKDAGKLTMGQPLVILAPHAVEALVKQPPDRWLSNARMTHYQAMLLDTDRVQFGPVVALNPATLLPLPEKEAPHDCLEILAETHGTRPDLTDQPIPDADYTWYTDGSSFLQEGQRRAGAAVTTETEVIWARALPAGTSAQRAELIALTQALKMAEGKKLNVYTDSRYAFATAHVHGEIYRRRGWLTSEGREIKNKNEILALLKALFLPKRLSIIHCPGHQKGNSAEARGNRMADQAAREAAMKAVLETSTLLAGKRTADGSEFEKRTADGSEFESPKKKAKVE

SEQ ID NO: 6970 - protein, 2096 aa, synthetic construct
MPAAKRVKLDGGDKKYSIGLDIGTNSVGWAVITDEYKVPSKKFKVLGNTDRHSIKKNLIGALLFDSGETAEATRLKRTARRRYTRRKNRICYLQEIFSNEMAKVDDSFFHRLEESFLVEEDKKHERHPIFGNIVDEVAYHEKYPTIYHLRKKLVDSTDKADLRLIYLALAHMIKFRGHFLIEGDLNPDNSDVDKLFIQLVQTYNQLFEENPINASGVDAKAILSARLSKSRRLENLIAQLPGEKKNGLFGNLIALSLGLTPNFKSNFDLAEDAKLQLSKDTYDDDLDNLLAQIGDQYADLFLAAKNLSDAILLSDILRVNTEITKAPLSASMIKRYDEHHQDLTLLKALVRQQLPEKYKEIFFDQSKNGYAGYIDGGASQEEFYKFIKPILEKMDGTEELLVKLNREDLLRKQRTFDNGSIPHQIHLGELHAILRRQEDFYPFLKDNREKIEKILTFRIPYYVGPLARGNSRFAWMTRKSEETITPWNFEEVVDKGASAQSFIERMTNFDKNLPNEKVLPKHSLLYEYFTVYNELTKVKYVTEGMRKPAFLSGEQKKAIVDLLFKTNRKVTVKQLKEDYFKKIECFDSVEISGVEDRFNASLGTYHDLLKIIKDKDFLDNEENEDILEDIVLTLTLFEDREMIEERLKTYAHLFDDKVMKQLKRRRYTGWGRLSRKLINGIRDKQSGKTILDFLKSDGFANRNFMQLIHDDSLTFKEDIQKAQVSGQGDSLHEHIANLAGSPAIKKGILQTVKVVDELVKVMGRHKPENIVIEMARENQTTQKGQKNSRERMKRIEEGIKELGSQILKEHPVENTQLQNEKLYLYYLQNGRDMYVDQELDINRLSDYDVDHIVPQSFLKDDSIDNKVLTRSDKARGKSDNVPSEEVVKKMKNYWRQLLNAKLITQRKFDNLTKAERGGLSELDKAGFIKRQLVETRQITKHVAQILDSRMNTKYDENDKLIREVKVITLKSKLVSDFRKDFQFYKVREINNYHHAHDAYLNAVVGTALIKKYPKLESEFVYGDYKVYDVRKMIAKSEQEIGKATAKYFFYSNIMNFFKTEITLANGEIRKRPLIETNGETGEIVWDKGRDFATVRKVLSMPQVNIVKKTEVQTGGFSKESILPKRNSDKLIARKKDWDPKKYGGFDSPTVAYSVLVVAKVEKGKSKKLKSVKELLGITIMERSSFEKNPIDFLEAKGYKEVKKDLIIKLPKYSLFELENGRKRMLASAGELQKGNELALPSKYVNFLYLASHYEKLKGSPEDNEQKQLFVEQHKHYLDEIIEQISEFSKRVILADANLDKVLSAYNKHRDKPIREQAENIIHLFTLTNLGAPAAFKYFDTTIDRKRYTSTKEVLDATLIHQSITGLYETRIDLSQLGGDGGGGSGGGPAPGGTAPLEEEYRLFLEAPIQNVTLLEQWKREIPKVWAEINPPGLASTQAPIHVQLLSTALPVRVRQYPITLEAKRSLRETIRKFRAAGILRPVHSPWNTPLLPVRKSGTSEYRMVQDLREVNKRVETIHPTVPNPYTLLSLLPPDRIWYSVLDLKDAFFCIPLAPESQLIFAFEWADAEEGESGQLTWTRLPQGFKNSPTLFDEALNRDLQGFRLDHPSVSLLQYVDDLLIAADTQAACLSATRDLLMTLAELGYRVSGKKAQLCQEEVTYLGFKIHKGSRSLSNSRTQAILQIPVPKTKRQVREFLGTIGYCRLWIPGFAELAQPLYAATRGGNDPLVWGEKEEEAFQSLKLALTQPPALALPSLDKPFQLFVEETSGAAKGVLTQALGPWKRPVAYLSKRLDPVAAGWPRCLRAIAAAALLTREASKLTFGQDIEITSSHNLESLLRSPPDKWLTNARITQYQVLLLDPPRVRFKQTAALNPATLLPETDDTLPIHHCLDTLDSLTSTRPDLTDQPLAQAEATLFTDGSSYIRDGKRYAGAAVVTLDSVIWAEPLPIGTSAQKAELIALTKALEWSKDKSVNIYTDSRYAFATLHVHGMIYRERGLLTAGGKAIKNAPEILALLTAVWLPKRVAVMHCKGHQKDDAPTSTGNRRADEVAREVAIRPLSTQATISAGKRTADGSEFEKRTADGSEFESPKKKAKVE

SEQ ID NO: 6971 - protein, 2096 aa, synthetic construct
MPAAKRVKLDGGDKKYSIGLDIGTNSVGWAVITDEYKVPSKKFKVLGNTDRHSIKKNLIGALLFDSGETAEATRLKRTARRRYTRRKNRICYLQEIFSNEMAKVDDSFFHRLEESFLVEEDKKHERHPIFGNIVDEVAYHEKYPTIYHLRKKLVDSTDKADLRLIYLALAHMIKFRGHFLIEGDLNPDNSDVDKLFIQLVQTYNQLFEENPINASGVDAKAILSARLSKSRRLENLIAQLPGEKKNGLFGNLIALSLGLTPNFKSNFDLAEDAKLQLSKDTYDDDLDNLLAQIGDQYADLFLAAKNLSDAILLSDILRVNTEITKAPLSASMIKRYDEHHQDLTLLKALVRQQLPEKYKEIFFDQSKNGYAGYIDGGASQEEFYKFIKPILEKMDGTEELLVKLNREDLLRKQRTFDNGSIPHQIHLGELHAILRRQEDFYPFLKDNREKIEKILTFRIPYYVGPLARGNSRFAWMTRKSEETITPWNFEEVVDKGASAQSFIERMTNFDKNLPNEKVLPKHSLLYEYFTVYNELTKVKYVTEGMRKPAFLSGEQKKAIVDLLFKTNRKVTVKQLKEDYFKKIECFDSVEISGVEDRFNASLGTYHDLLKIIKDKDFLDNEENEDILEDIVLTLTLFEDREMIEERLKTYAHLFDDKVMKQLKRRRYTGWGRLSRKLINGIRDKQSGKTILDFLKSDGFANRNFMQLIHDDSLTFKEDIQKAQVSGQGDSLHEHIANLAGSPAIKKGILQTVKVVDELVKVMGRHKPENIVIEMARENQTTQKGQKNSRERMKRIEEGIKELGSQILKEHPVENTQLQNEKLYLYYLQNGRDMYVDQELDINRLSDYDVDHIVPQSFLKDDSIDNKVLTRSDKARGKSDNVPSEEVVKKMKNYWRQLLNAKLITQRKFDNLTKAERGGLSELDKAGFIKRQLVETRQITKHVAQILDSRMNTKYDENDKLIREVKVITLKSKLVSDFRKDFQFYKVREINNYHHAHDAYLNAVVGTALIKKYPKLESEFVYGDYKVYDVRKMIAKSEQEIGKATAKYFFYSNIMNFFKTEITLANGEIRKRPLIETNGETGEIVWDKGRDFATVRKVLSMPQVNIVKKTEVQTGGFSKESILPKRNSDKLIARKKDWDPKKYGGFDSPTVAYSVLVVAKVEKGKSKKLKSVKELLGITIMERSSFEKNPIDFLEAKGYKEVKKDLIIKLPKYSLFELENGRKRMLASAGELQKGNELALPSKYVNFLYLASHYEKLKGSPEDNEQKQLFVEQHKHYLDEIIEQISEFSKRVILADANLDKVLSAYNKHRDKPIREQAENIIHLFTLTNLGAPAAFKYFDTTIDRKRYTSTKEVLDATLIHQSITGLYETRIDLSQLGGDGGGGSGGGPAPGGTAPLEEEYRLFLEAPIQNVTLLEQWKREIPKVWAEINPPGLASTQAPIHVQLLSTALPVRVRQYPITLEAKRSLRETIRKFRAAGILRPVHSPWNTPLLPVRKSGTSEYRMVQDLREVNKRVETIHPTVPNPYTLLSLLPPDRIWYSVLDLKDAFFCIPLAPESQLIFAFEWADAEEGESGQLTWTRLPQGFKNSPTLFNEALNRDLQGFRLDHPSVSLLQYVDDLLIAADTQAACLSATRDLLMTLAELGYRVSGKKAQLCQEEVTYLGFKIHKGSRSLSNSRTQAILQIPVPKTKRQVREFLGTIGYCRLWIPGFAELAQPLYAATRPGNDPLVWGEKEEEAFQSLKLALTQPPALALPSLDKPFQLFVEETSGAAKGVLTQALGPWKRPVAYLSKRLDPVAAGWPRCLRAIAAAALLTREASKLTFGQDIEITSSHNLESLLRSPPDKWLTNARITQYQVLLLDPPRVRFKQTAALNPATLLPETDDTLPIHHCLDTLDSLTSTRPDLTDQPLAQAEATLFTDGSSYIRDGKRYAGAAVVTLDSVIWAEPLPIGTSAQKAELIALTKALEWSKDKSVNIYTDSRYAFATLHVHGMIYRERGWLTAGGKAIKNAPEILALLTAVWLPKRVAVMHCKGHQKDDAPTSTGNRRADEVAREVAIRPLSTQATISAGKRTADGSEFEKRTADGSEFESPKKKAKVE

SEQ ID NO: 6972 - protein, 2096 aa, synthetic construct
MPAAKRVKLDGGDKKYSIGLDIGTNSVGWAVITDEYKVPSKKFKVLGNTDRHSIKKNLIGALLFDSGETAEATRLKRTARRRYTRRKNRICYLQEIFSNEMAKVDDSFFHRLEESFLVEEDKKHERHPIFGNIVDEVAYHEKYPTIYHLRKKLVDSTDKADLRLIYLALAHMIKFRGHFLIEGDLNPDNSDVDKLFIQLVQTYNQLFEENPINASGVDAKAILSARLSKSRRLENLIAQLPGEKKNGLFGNLIALSLGLTPNFKSNFDLAEDAKLQLSKDTYDDDLDNLLAQIGDQYADLFLAAKNLSDAILLSDILRVNTEITKAPLSASMIKRYDEHHQDLTLLKALVRQQLPEKYKEIFFDQSKNGYAGYIDGGASQEEFYKFIKPILEKMDGTEELLVKLNREDLLRKQRTFDNGSIPHQIHLGELHAILRRQEDFYPFLKDNREKIEKILTFRIPYYVGPLARGNSRFAWMTRKSEETITPWNFEEVVDKGASAQSFIERMTNFDKNLPNEKVLPKHSLLYEYFTVYNELTKVKYVTEGMRKPAFLSGEQKKAIVDLLFKTNRKVTVKQLKEDYFKKIECFDSVEISGVEDRFNASLGTYHDLLKIIKDKDFLDNEENEDILEDIVLTLTLFEDREMIEERLKTYAHLFDDKVMKQLKRRRYTGWGRLSRKLINGIRDKQSGKTILDFLKSDGFANRNFMQLIHDDSLTFKEDIQKAQVSGQGDSLHEHIANLAGSPAIKKGILQTVKVVDELVKVMGRHKPENIVIEMARENQTTQKGQKNSRERMKRIEEGIKELGSQILKEHPVENTQLQNEKLYLYYLQNGRDMYVDQELDINRLSDYDVDHIVPQSFLKDDSIDNKVLTRSDKARGKSDNVPSEEVVKKMKNYWRQLLNAKLITQRKFDNLTKAERGGLSELDKAGFIKRQLVETRQITKHVAQILDSRMNTKYDENDKLIREVKVITLKSKLVSDFRKDFQFYKVREINNYHHAHDAYLNAVVGTALIKKYPKLESEFVYGDYKVYDVRKMIAKSEQEIGKATAKYFFYSNIMNFFKTEITLANGEIRKRPLIETNGETGEIVWDKGRDFATVRKVLSMPQVNIVKKTEVQTGGFSKESILPKRNSDKLIARKKDWDPKKYGGFDSPTVAYSVLVVAKVEKGKSKKLKSVKELLGITIMERSSFEKNPIDFLEAKGYKEVKKDLIIKLPKYSLFELENGRKRMLASAGELQKGNELALPSKYVNFLYLASHYEKLKGSPEDNEQKQLFVEQHKHYLDEIIEQISEFSKRVILADANLDKVLSAYNKHRDKPIREQAENIIHLFTLTNLGAPAAFKYFDTTIDRKRYTSTKEVLDATLIHQSITGLYETRIDLSQLGGDGGGGSGGGPAPGGTAPLEEEYRLFLEAPIQNVTLLEQWKREIPKVWAEINPPGLASTQAPIHVQLLSTALPVRVRQYPITLEAKRSLRETIRKFRAAGILRPVHSPWNTPLLPVRKSGTSEYRMVQDLREVNKRVETIHPTVPNPYTLLSLLPPDRIWYSVLDLKDAFFCIPLAPESQLIFAFEWADAEEGESGQLTWTRLPQGFKNSPTLFNEALNRDLQGFRLDHPSVSLLQYVDDLLIAADTQAACLSATRDLLMTLAELGYRVSGKKAQLCQEEVTYLGFKIHKGSRSLSNSRTQAILQIPVPKTKRQVREFLGKIGYCRLFIPGFAELAQPLYAATRPGNDPLVWGEKEEEAFQSLKLALTQPPALALPSLDKPFQLFVEETSGAAKGVLTQALGPWKRPVAYLSKRLDPVAAGWPRCLRAIAAAALLTREASKLTFGQDIEITSSHNLESLLRSPPDKWLTNARITQYQVLLLDPPRVRFKQTAALNPATLLPETDDTLPIHHCLDTLDSLTSTRPDLTDQPLAQAEATLFTDGSSYIRDGKRYAGAAVVTLDSVIWAEPLPIGTSAQKAELIALTKALEWSKDKSVNIYTDSRYAFATLHVHGMIYRERGWLTAGGKAIKNAPEILALLTAVWLPKRVAVMHCKGHQKDDAPTSTGNRRADEVAREVAIRPLSTQATISAGKRTADGSEFEKRTADGSEFESPKKKAKVE

SEQ ID NO: 6973 - protein, 2100 aa, synthetic construct
MPAAKRVKLDGGDKKYSIGLDIGTNSVGWAVITDEYKVPSKKFKVLGNTDRHSIKKNLIGALLFDSGETAEATRLKRTARRRYTRRKNRICYLQEIFSNEMAKVDDSFFHRLEESFLVEEDKKHERHPIFGNIVDEVAYHEKYPTIYHLRKKLVDSTDKADLRLIYLALAHMIKFRGHFLIEGDLNPDNSDVDKLFIQLVQTYNQLFEENPINASGVDAKAILSARLSKSRRLENLIAQLPGEKKNGLFGNLIALSLGLTPNFKSNFDLAEDAKLQLSKDTYDDDLDNLLAQIGDQYADLFLAAKNLSDAILLSDILRVNTEITKAPLSASMIKRYDEHHQDLTLLKALVRQQLPEKYKEIFFDQSKNGYAGYIDGGASQEEFYKFIKPILEKMDGTEELLVKLNREDLLRKQRTFDNGSIPHQIHLGELHAILRRQEDFYPFLKDNREKIEKILTFRIPYYVGPLARGNSRFAWMTRKSEETITPWNFEEVVDKGASAQSFIERMTNFDKNLPNEKVLPKHSLLYEYFTVYNELTKVKYVTEGMRKPAFLSGEQKKAIVDLLFKTNRKVTVKQLKEDYFKKIECFDSVEISGVEDRFNASLGTYHDLLKIIKDKDFLDNEENEDILEDIVLTLTLFEDREMIEERLKTYAHLFDDKVMKQLKRRRYTGWGRLSRKLINGIRDKQSGKTILDFLKSDGFANRNFMQLIHDDSLTFKEDIQKAQVSGQGDSLHEHIANLAGSPAIKKGILQTVKVVDELVKVMGRHKPENIVIEMARENQTTQKGQKNSRERMKRIEEGIKELGSQILKEHPVENTQLQNEKLYLYYLQNGRDMYVDQELDINRLSDYDVDHIVPQSFLKDDSIDNKVLTRSDKARGKSDNVPSEEVVKKMKNYWRQLLNAKLITQRKFDNLTKAERGGLSELDKAGFIKRQLVETRQITKHVAQILDSRMNTKYDENDKLIREVKVITLKSKLVSDFRKDFQFYKVREINNYHHAHDAYLNAVVGTALIKKYPKLESEFVYGDYKVYDVRKMIAKSEQEIGKATAKYFFYSNIMNFFKTEITLANGEIRKRPLIETNGETGEIVWDKGRDFATVRKVLSMPQVNIVKKTEVQTGGFSKESILPKRNSDKLIARKKDWDPKKYGGFDSPTVAYSVLVVAKVEKGKSKKLKSVKELLGITIMERSSFEKNPIDFLEAKGYKEVKKDLIIKLPKYSLFELENGRKRMLASAGELQKGNELALPSKYVNFLYLASHYEKLKGSPEDNEQKQLFVEQHKHYLDEIIEQISEFSKRVILADANLDKVLSAYNKHRDKPIREQAENIIHLFTLTNLGAPAAFKYFDTTIDRKRYTSTKEVLDATLIHQSITGLYETRIDLSQLGGDGGGGSGGGPAPGGTVSLQDEHRLFDIPVTTSLPDVWLQDFPQAWAETGGLGRAKCQAPIIIDLKPTAVPVSIKQYPMSLEAHMGIRQHIIKFLELGVLRPCRSPWNTPLLPVKKPGTQDYRPVQDLREINKRTVDIHPTVPNPYNLLSTLKPDYSWYTVLDLKDAFFCLPLAPQSQELFAFEWKDPERGISGQLTWTRLPQGFKNSPTLFNEALHRDLTDFRTQHPEVTLLQYVDDLLLAAPTKKACTQGTRHLLQELGEKGYRASAKKAQICQTKVTYLGYILSEGKRWLTPGRIETVARIPPPRNPREVREFLGTAGFCRLWIPGFAELAAPLYALTKPSTPFTWQTEHQLAFEALKKALLSAPALGLPDTSKPFTLFLDERQGIAKGVLTQKLGPWKRPVAYLSKKLDPVAAGWPPCLRIMAATAMLVKDSAKLTLGQPLTVITPHTLEAIVRQPPDRWITNARLTHYQALLLDTDRVQFGPPVTLNPATLLPVPENQPSPHDCRQVLAETHGTREDLKDQELPDADHTWYTDGSSYLDSGTRRAGAAVVDGHNTIWAQSLPPGTSAQKAELIALTKALELSKGKKANIYTDSRYAFATAHTHGSIYERRGWLTSEGKEIKNKAEIIALLKALFLPQEVAIIHCPGHQKGQDPVAVGNRQADRVARQAAMAEVLTLATEPDNTSHITAGKRTADGSEFEKRTADGSEFESPKKKAKVE

SEQ ID NO: 6974 - protein, 2092 aa, synthetic construct
MPAAKRVKLDGGDKKYSIGLDIGTNSVGWAVITDEYKVPSKKFKVLGNTDRHSIKKNLIGALLFDSGETAEATRLKRTARRRYTRRKNRICYLQEIFSNEMAKVDDSFFHRLEESFLVEEDKKHERHPIFGNIVDEVAYHEKYPTIYHLRKKLVDSTDKADLRLIYLALAHMIKFRGHFLIEGDLNPDNSDVDKLFIQLVQTYNQLFEENPINASGVDAKAILSARLSKSRRLENLIAQLPGEKKNGLFGNLIALSLGLTPNFKSNFDLAEDAKLQLSKDTYDDDLDNLLAQIGDQYADLFLAAKNLSDAILLSDILRVNTEITKAPLSASMIKRYDEHHQDLTLLKALVRQQLPEKYKEIFFDQSKNGYAGYIDGGASQEEFYKFIKPILEKMDGTEELLVKLNREDLLRKQRTFDNGSIPHQIHLGELHAILRRQEDFYPFLKDNREKIEKILTFRIPYYVGPLARGNSRFAWMTRKSEETITPWNFEEVVDKGASAQSFIERMTNFDKNLPNEKVLPKHSLLYEYFTVYNELTKVKYVTEGMRKPAFLSGEQKKAIVDLLFKTNRKVTVKQLKEDYFKKIECFDSVEISGVEDRFNASLGTYHDLLKIIKDKDFLDNEENEDILEDIVLTLTLFEDREMIEERLKTYAHLFDDKVMKQLKRRRYTGWGRLSRKLINGIRDKQSGKTILDFLKSDGFANRNFMQLIHDDSLTFKEDIQKAQVSGQGDSLHEHIANLAGSPAIKKGILQTVKVVDELVKVMGRHKPENIVIEMARENQTTQKGQKNSRERMKRIEEGIKELGSQILKEHPVENTQLQNEKLYLYYLQNGRDMYVDQELDINRLSDYDVDHIVPQSFLKDDSIDNKVLTRSDKARGKSDNVPSEEVVKKMKNYWRQLLNAKLITQRKFDNLTKAERGGLSELDKAGFIKRQLVETRQITKHVAQILDSRMNTKYDENDKLIREVKVITLKSKLVSDFRKDFQFYKVREINNYHHAHDAYLNAVVGTALIKKYPKLESEFVYGDYKVYDVRKMIAKSEQEIGKATAKYFFYSNIMNFFKTEITLANGEIRKRPLIETNGETGEIVWDKGRDFATVRKVLSMPQVNIVKKTEVQTGGFSKESILPKRNSDKLIARKKDWDPKKYGGFDSPTVAYSVLVVAKVEKGKSKKLKSVKELLGITIMERSSFEKNPIDFLEAKGYKEVKKDLIIKLPKYSLFELENGRKRMLASAGELQKGNELALPSKYVNFLYLASHYEKLKGSPEDNEQKQLFVEQHKHYLDEIIEQISEFSKRVILADANLDKVLSAYNKHRDKPIREQAENIIHLFTLTNLGAPAAFKYFDTTIDRKRYTSTKEVLDATLIHQSITGLYETRIDLSQLGGDGGGGSGGGPAPGGVLNLEEEYRLHEKPVPSSIDPSWLQLFPTVWAERAGMGLANQVPPVVVELRSGASPVAVRQYPMSKEAREGIRPHIQKFLDLGVLVPCRSPWNTPLLPVKKPGTNDYRPVQDLREINKRVQDIHPTVPNPYNLLSSLPPSYTWYSVLDLKDAFFCLRLHPNSQPLFAFEWKDPEKGNTGQLTWTRLPQGFKNSPTLFNEALHRDLAPFRALNPQVVLLQYVDDLLVAAPTYEDCKKGTQKLLQELSKLGYRVSAKKAQLCQREVTYLGYLLKEGKRWLTPARKATVMKIPVPTTPRQVREFLGTAGFCRLWIPGFASLAAPLYPLTKPSIPFIWTEEHQQAFDHIKKALLSAPALALPDLTKPFTLYIDERAGVARGVLTQTLGPWRRPVAYLSKKLDPVASGWPTCLKAVAAVALLLKDADKLTLGQNVTVIASHSLESIVRQPPDRWMTNARMTHYQSLLLNERVSFAPPAVLNPATLLPVESEATPVHRCSEILAEETGTRRDLEDQPLPGVPTWYTDGSSFITEGKRRAGAPIVDGKRTVWASSLPEGTSAQKAELVALTQALRLAEGKNINIYTDSRYAFATAHIHGAIYKQRGWLTSAGKDIKNKEEILALLEAIHLPRRVAIIHCPGHQRGSNPVATGNRRADEAAKQAALSTRVLAGTTKPAGKRTADGSEFEKRTADGSEFESPKKKAKVE

SEQ ID NO: 6975 - protein, 2092 aa, synthetic construct
MPAAKRVKLDGGDKKYSIGLDIGTNSVGWAVITDEYKVPSKKFKVLGNTDRHSIKKNLIGALLFDSGETAEATRLKRTARRRYTRRKNRICYLQEIFSNEMAKVDDSFFHRLEESFLVEEDKKHERHPIFGNIVDEVAYHEKYPTIYHLRKKLVDSTDKADLRLIYLALAHMIKFRGHFLIEGDLNPDNSDVDKLFIQLVQTYNQLFEENPINASGVDAKAILSARLSKSRRLENLIAQLPGEKKNGLFGNLIALSLGLTPNFKSNFDLAEDAKLQLSKDTYDDDLDNLLAQIGDQYADLFLAAKNLSDAILLSDILRVNTEITKAPLSASMIKRYDEHHQDLTLLKALVRQQLPEKYKEIFFDQSKNGYAGYIDGGASQEEFYKFIKPILEKMDGTEELLVKLNREDLLRKQRTFDNGSIPHQIHLGELHAILRRQEDFYPFLKDNREKIEKILTFRIPYYVGPLARGNSRFAWMTRKSEETITPWNFEEVVDKGASAQSFIERMTNFDKNLPNEKVLPKHSLLYEYFTVYNELTKVKYVTEGMRKPAFLSGEQKKAIVDLLFKTNRKVTVKQLKEDYFKKIECFDSVEISGVEDRFNASLGTYHDLLKIIKDKDFLDNEENEDILEDIVLTLTLFEDREMIEERLKTYAHLFDDKVMKQLKRRRYTGWGRLSRKLINGIRDKQSGKTILDFLKSDGFANRNFMQLIHDDSLTFKEDIQKAQVSGQGDSLHEHIANLAGSPAIKKGILQTVKVVDELVKVMGRHKPENIVIEMARENQTTQKGQKNSRERMKRIEEGIKELGSQILKEHPVENTQLQNEKLYLYYLQNGRDMYVDQELDINRLSDYDVDHIVPQSFLKDDSIDNKVLTRSDKARGKSDNVPSEEVVKKMKNYWRQLLNAKLITQRKFDNLTKAERGGLSELDKAGFIKRQLVETRQITKHVAQILDSRMNTKYDENDKLIREVKVITLKSKLVSDFRKDFQFYKVREINNYHHAHDAYLNAVVGTALIKKYPKLESEFVYGDYKVYDVRKMIAKSEQEIGKATAKYFFYSNIMNFFKTEITLANGEIRKRPLIETNGETGEIVWDKGRDFATVRKVLSMPQVNIVKKTEVQTGGFSKESILPKRNSDKLIARKKDWDPKKYGGFDSPTVAYSVLVVAKVEKGKSKKLKSVKELLGITIMERSSFEKNPIDFLEAKGYKEVKKDLIIKLPKYSLFELENGRKRMLASAGELQKGNELALPSKYVNFLYLASHYEKLKGSPEDNEQKQLFVEQHKHYLDEIIEQISEFSKRVILADANLDKVLSAYNKHRDKPIREQAENIIHLFTLTNLGAPAAFKYFDTTIDRKRYTSTKEVLDATLIHQSITGLYETRIDLSQLGGDGGGGSGGGPAPGGVLNLEEEYRLHEKPVPSSIDPSWLQLFPTVWAERAGMGLANQVPPVVVELRSGASPVAVRQYPMSKEAREGIRPHIQKFLDLGVLVPCRSPWNTPLLPVKKPGTNDYRPVQDLREINKRVQDIHPTVPNPYNLLSSLPPSYTWYSVLDLKDAFFCLRLHPNSQPLFAFEWKDPEKGNTGQLTWTRLPQGFKNSPTLFNEALHRDLAPFRALNPQVVLLQYVDDLLVAAPTYEDCKKGTQKLLQELSKLGYRVSAKKAQLCQREVTYLGYLLKEGKRWLTPARKATVMKIPVPTTPRQVREFLGKAGFCRLFIPGFASLAAPLYPLTKPSIPFIWTEEHQQAFDHIKKALLSAPALALPDLTKPFTLYIDERAGVARGVLTQTLGPWRRPVAYLSKKLDPVASGWPTCLKAVAAVALLLKDADKLTLGQNVTVIASHSLESIVRQPPDRWMTNARMTHYQSLLLNERVSFAPPAVLNPATLLPVESEATPVHRCSEILAEETGTRRDLEDQPLPGVPTWYTDGSSFITEGKRRAGAPIVDGKRTVWASSLPEGTSAQKAELVALTQALRLAEGKNINIYTDSRYAFATAHIHGAIYKQRGWLTSAGKDIKNKEEILALLEAIHLPRRVAIIHCPGHQRGSNPVATGNRRADEAAKQAALSTRVLAGTTKPAGKRTADGSEFEKRTADGSEFESPKKKAKVE

SEQ ID NO: 6976 - protein, 2125 aa, synthetic construct
MPAAKRVKLDGGDKKYSIGLDIGTNSVGWAVITDEYKVPSKKFKVLGNTDRHSIKKNLIGALLFDSGETAEATRLKRTARRRYTRRKNRICYLQEIFSNEMAKVDDSFFHRLEESFLVEEDKKHERHPIFGNIVDEVAYHEKYPTIYHLRKKLVDSTDKADLRLIYLALAHMIKFRGHFLIEGDLNPDNSDVDKLFIQLVQTYNQLFEENPINASGVDAKAILSARLSKSRRLENLIAQLPGEKKNGLFGNLIALSLGLTPNFKSNFDLAEDAKLQLSKDTYDDDLDNLLAQIGDQYADLFLAAKNLSDAILLSDILRVNTEITKAPLSASMIKRYDEHHQDLTLLKALVRQQLPEKYKEIFFDQSKNGYAGYIDGGASQEEFYKFIKPILEKMDGTEELLVKLNREDLLRKQRTFDNGSIPHQIHLGELHAILRRQEDFYPFLKDNREKIEKILTFRIPYYVGPLARGNSRFAWMTRKSEETITPWNFEEVVDKGASAQSFIERMTNFDKNLPNEKVLPKHSLLYEYFTVYNELTKVKYVTEGMRKPAFLSGEQKKAIVDLLFKTNRKVTVKQLKEDYFKKIECFDSVEISGVEDRFNASLGTYHDLLKIIKDKDFLDNEENEDILEDIVLTLTLFEDREMIEERLKTYAHLFDDKVMKQLKRRRYTGWGRLSRKLINGIRDKQSGKTILDFLKSDGFANRNFMQLIHDDSLTFKEDIQKAQVSGQGDSLHEHIANLAGSPAIKKGILQTVKVVDELVKVMGRHKPENIVIEMARENQTTQKGQKNSRERMKRIEEGIKELGSQILKEHPVENTQLQNEKLYLYYLQNGRDMYVDQELDINRLSDYDVDHIVPQSFLKDDSIDNKVLTRSDKARGKSDNVPSEEVVKKMKNYWRQLLNAKLITQRKFDNLTKAERGGLSELDKAGFIKRQLVETRQITKHVAQILDSRMNTKYDENDKLIREVKVITLKSKLVSDFRKDFQFYKVREINNYHHAHDAYLNAVVGTALIKKYPKLESEFVYGDYKVYDVRKMIAKSEQEIGKATAKYFFYSNIMNFFKTEITLANGEIRKRPLIETNGETGEIVWDKGRDFATVRKVLSMPQVNIVKKTEVQTGGFSKESILPKRNSDKLIARKKDWDPKKYGGFDSPTVAYSVLVVAKVEKGKSKKLKSVKELLGITIMERSSFEKNPIDFLEAKGYKEVKKDLIIKLPKYSLFELENGRKRMLASAGELQKGNELALPSKYVNFLYLASHYEKLKGSPEDNEQKQLFVEQHKHYLDEIIEQISEFSKRVILADANLDKVLSAYNKHRDKPIREQAENIIHLFTLTNLGAPAAFKYFDTTIDRKRYTSTKEVLDATLIHQSITGLYETRIDLSQLGGDGGGGSGGGPAPGGLLGRDLLTKLKAQIQFSTEGPQVTWEDRPAMCLVLNLEEEYRLHEKPVPPSIDPSWLQLFPMVWAEKAGMGLANQVPPVVVELKSDASPVAVRQYPMSKEAREGIRPHIQRFLDLGILVPCQSPWNTPLLPVKKPGTNDYRPVQDLREVNKRVQDIHPTVPNPYNLLSSLPPSHTWYSVLDLKDAFFCLKLHPNSQPLFAFEWRDPEKGNTGQLTWTRLPQGFKNSPTLFNEALHRDLASFRALNPQVVMLQYVDDLLVAAPTYRDCKEGTRRLLQELSKLGYRVSAKKAQLCREEVTYLGYLLKGGKRWLTPARKATVMKIPTPTTPRQVREFLGTAGFCRLWIPGFASLAAPLYPLTRPKVPFTWTEAHQEAFGRIKEALLSAPALALPDLTKPFALYVDEKEGVARGVLTQTLGPWRRPVAYLSKKLDPVASGWPTCLKAIAAVALLLKDADKLTLGQNVLVIAPHNLESIVRQPPDRWMTNARMTHYQSLLLNERVSFAPPAILNPATLLPVESDDTPIHICSEILAEETGTRPDLRDQPLPGVPAWYTDGSSFIMDGRRQAGAAIVDNKRTVWASNLPEGTSAQKAELIALTQALRLAEGKSINIYTDSRYAFATAHVHGAIYKQRGWLTSAGKDIKNKEEILALLEAIHLPKRVAIIHCPGHQRGTDPVATGNRKADEAAKQAAQSTRILTETTKNAGKRTADGSEFEKRTADGSEFESPKKKAKVE

SEQ ID NO: 6977 - protein, 2125 aa, synthetic construct
MPAAKRVKLDGGDKKYSIGLDIGTNSVGWAVITDEYKVPSKKFKVLGNTDRHSIKKNLIGALLFDSGETAEATRLKRTARRRYTRRKNRICYLQEIFSNEMAKVDDSFFHRLEESFLVEEDKKHERHPIFGNIVDEVAYHEKYPTIYHLRKKLVDSTDKADLRLIYLALAHMIKFRGHFLIEGDLNPDNSDVDKLFIQLVQTYNQLFEENPINASGVDAKAILSARLSKSRRLENLIAQLPGEKKNGLFGNLIALSLGLTPNFKSNFDLAEDAKLQLSKDTYDDDLDNLLAQIGDQYADLFLAAKNLSDAILLSDILRVNTEITKAPLSASMIKRYDEHHQDLTLLKALVRQQLPEKYKEIFFDQSKNGYAGYIDGGASQEEFYKFIKPILEKMDGTEELLVKLNREDLLRKQRTFDNGSIPHQIHLGELHAILRRQEDFYPFLKDNREKIEKILTFRIPYYVGPLARGNSRFAWMTRKSEETITPWNFEEVVDKGASAQSFIERMTNFDKNLPNEKVLPKHSLLYEYFTVYNELTKVKYVTEGMRKPAFLSGEQKKAIVDLLFKTNRKVTVKQLKEDYFKKIECFDSVEISGVEDRFNASLGTYHDLLKIIKDKDFLDNEENEDILEDIVLTLTLFEDREMIEERLKTYAHLFDDKVMKQLKRRRYTGWGRLSRKLINGIRDKQSGKTILDFLKSDGFANRNFMQLIHDDSLTFKEDIQKAQVSGQGDSLHEHIANLAGSPAIKKGILQTVKVVDELVKVMGRHKPENIVIEMARENQTTQKGQKNSRERMKRIEEGIKELGSQILKEHPVENTQLQNEKLYLYYLQNGRDMYVDQELDINRLSDYDVDHIVPQSFLKDDSIDNKVLTRSDKARGKSDNVPSEEVVKKMKNYWRQLLNAKLITQRKFDNLTKAERGGLSELDKAGFIKRQLVETRQITKHVAQILDSRMNTKYDENDKLIREVKVITLKSKLVSDFRKDFQFYKVREINNYHHAHDAYLNAVVGTALIKKYPKLESEFVYGDYKVYDVRKMIAKSEQEIGKATAKYFFYSNIMNFFKTEITLANGEIRKRPLIETNGETGEIVWDKGRDFATVRKVLSMPQVNIVKKTEVQTGGFSKESILPKRNSDKLIARKKDWDPKKYGGFDSPTVAYSVLVVAKVEKGKSKKLKSVKELLGITIMERSSFEKNPIDFLEAKGYKEVKKDLIIKLPKYSLFELENGRKRMLASAGELQKGNELALPSKYVNFLYLASHYEKLKGSPEDNEQKQLFVEQHKHYLDEIIEQISEFSKRVILADANLDKVLSAYNKHRDKPIREQAENIIHLFTLTNLGAPAAFKYFDTTIDRKRYTSTKEVLDATLIHQSITGLYETRIDLSQLGGDGGGGSGGGPAPGGLLGRDLLTKLKAQIQFSTEGPQVTWEDRPAMCLVLNLEEEYRLHEKPVPPSIDPSWLQLFPMVWAEKAGMGLANQVPPVVVELKSDASPVAVRQYPMSKEAREGIRPHIQRFLDLGILVPCQSPWNTPLLPVKKPGTNDYRPVQDLREVNKRVQDIHPTVPNPYNLLSSLPPSHTWYSVLDLKDAFFCLKLHPNSQPLFAFEWRDPEKGNTGQLTWTRLPQGFKNSPTLFNEALHRDLASFRALNPQVVMLQYVDDLLVAAPTYRDCKEGTRRLLQELSKLGYRVSAKKAQLCREEVTYLGYLLKGGKRWLTPARKATVMKIPTPTTPRQVREFLGKAGFCRLFIPGFASLAAPLYPLTRPKVPFTWTEAHQEAFGRIKEALLSAPALALPDLTKPFALYVDEKEGVARGVLTQTLGPWRRPVAYLSKKLDPVASGWPTCLKAIAAVALLLKDADKLTLGQNVLVIAPHNLESIVRQPPDRWMTNARMTHYQSLLLNERVSFAPPAILNPATLLPVESDDTPIHICSEILAEETGTRPDLRDQPLPGVPAWYTDGSSFIMDGRRQAGAAIVDNKRTVWASNLPEGTSAQKAELIALTQALRLAEGKSINIYTDSRYAFATAHVHGAIYKQRGWLTSAGKDIKNKEEILALLEAIHLPKRVAIIHCPGHQRGTDPVATGNRKADEAAKQAAQSTRILTETTKNAGKRTADGSEFEKRTADGSEFESPKKKAKVE

SEQ ID NO: 6978 - protein, 2094 aa, synthetic construct
MPAAKRVKLDGGDKKYSIGLDIGTNSVGWAVITDEYKVPSKKFKVLGNTDRHSIKKNLIGALLFDSGETAEATRLKRTARRRYTRRKNRICYLQEIFSNEMAKVDDSFFHRLEESFLVEEDKKHERHPIFGNIVDEVAYHEKYPTIYHLRKKLVDSTDKADLRLIYLALAHMIKFRGHFLIEGDLNPDNSDVDKLFIQLVQTYNQLFEENPINASGVDAKAILSARLSKSRRLENLIAQLPGEKKNGLFGNLIALSLGLTPNFKSNFDLAEDAKLQLSKDTYDDDLDNLLAQIGDQYADLFLAAKNLSDAILLSDILRVNTEITKAPLSASMIKRYDEHHQDLTLLKALVRQQLPEKYKEIFFDQSKNGYAGYIDGGASQEEFYKFIKPILEKMDGTEELLVKLNREDLLRKQRTFDNGSIPHQIHLGELHAILRRQEDFYPFLKDNREKIEKILTFRIPYYVGPLARGNSRFAWMTRKSEETITPWNFEEVVDKGASAQSFIERMTNFDKNLPNEKVLPKHSLLYEYFTVYNELTKVKYVTEGMRKPAFLSGEQKKAIVDLLFKTNRKVTVKQLKEDYFKKIECFDSVEISGVEDRFNASLGTYHDLLKIIKDKDFLDNEENEDILEDIVLTLTLFEDREMIEERLKTYAHLFDDKVMKQLKRRRYTGWGRLSRKLINGIRDKQSGKTILDFLKSDGFANRNFMQLIHDDSLTFKEDIQKAQVSGQGDSLHEHIANLAGSPAIKKGILQTVKVVDELVKVMGRHKPENIVIEMARENQTTQKGQKNSRERMKRIEEGIKELGSQILKEHPVENTQLQNEKLYLYYLQNGRDMYVDQELDINRLSDYDVDHIVPQSFLKDDSIDNKVLTRSDKARGKSDNVPSEEVVKKMKNYWRQLLNAKLITQRKFDNLTKAERGGLSELDKAGFIKRQLVETRQITKHVAQILDSRMNTKYDENDKLIREVKVITLKSKLVSDFRKDFQFYKVREINNYHHAHDAYLNAVVGTALIKKYPKLESEFVYGDYKVYDVRKMIAKSEQEIGKATAKYFFYSNIMNFFKTEITLANGEIRKRPLIETNGETGEIVWDKGRDFATVRKVLSMPQVNIVKKTEVQTGGFSKESILPKRNSDKLIARKKDWDPKKYGGFDSPTVAYSVLVVAKVEKGKSKKLKSVKELLGITIMERSSFEKNPIDFLEAKGYKEVKKDLIIKLPKYSLFELENGRKRMLASAGELQKGNELALPSKYVNFLYLASHYEKLKGSPEDNEQKQLFVEQHKHYLDEIIEQISEFSKRVILADANLDKVLSAYNKHRDKPIREQAENIIHLFTLTNLGAPAAFKYFDTTIDRKRYTSTKEVLDATLIHQSITGLYETRIDLSQLGGDGGGGSGGGPAPGGTLNLEDEYRLYETSAEPEVSPGSTWLSDFPQAWAETGGMGLAVRQAPLIIPLKATSTPVSIKQYPMSQEAKLGIKPHIQRLLDQGILVPCQSPWNTPLLPVKKPGTNDYRPVQDLREVNKRVEDIHPTVPNPYNLLSGLPPSHRWYTVLDLKDAFFCLRLHPTSQPLFAFEWRDPGMGISGQLTWTRLPQGFKNSPTLFNEALHRDLADFRIQHPDLILLQYVDDILLAATSELDCQQGTRALLLTLGNLGYRASAKKAQLCQKQVKYLGYLLKEGQRWLTEARKETVMGQPTPKTPRQLREFLGTAGFCRLWIPGFAEMAAPLYPLTKPGTLFNWGPDQQKAYQEIKQALLTAPALGLPDLTKPFELFVDEKQGYAKGVLTQKLGPWRRPVAYLSKKLDPVAAGWPPCLRMVAAIAVLRKDAGKLTMGQPLVILAPHAVEALVKQPPDRWLSNARMTHYQAMLLDTDRVQFGPVVALNPATLLPLPEEGAPHDCLEILAETHGTRPDLTDQPIPDADHTWYTDGSSFLQEGQRKAGAAVTTETEVIWARALPAGTSAQRAELIALTQALKMAEGKRLNVYTDSRYAFATAHIHGEIYRRRGWLTSEGREIKNKSEILALLKALFLPKRLSIIHCLGHQKGDSAEARGNRLADQAAREAAIKTPPDTSTLLAGKRTADGSEFEKRTADGSEFESPKKKAKVE

SEQ ID NO: 6979 - protein, 2094 aa, synthetic construct
MPAAKRVKLDGGDKKYSIGLDIGTNSVGWAVITDEYKVPSKKFKVLGNTDRHSIKKNLIGALLFDSGETAEATRLKRTARRRYTRRKNRICYLQEIFSNEMAKVDDSFFHRLEESFLVEEDKKHERHPIFGNIVDEVAYHEKYPTIYHLRKKLVDSTDKADLRLIYLALAHMIKFRGHFLIEGDLNPDNSDVDKLFIQLVQTYNQLFEENPINASGVDAKAILSARLSKSRRLENLIAQLPGEKKNGLFGNLIALSLGLTPNFKSNFDLAEDAKLQLSKDTYDDDLDNLLAQIGDQYADLFLAAKNLSDAILLSDILRVNTEITKAPLSASMIKRYDEHHQDLTLLKALVRQQLPEKYKEIFFDQSKNGYAGYIDGGASQEEFYKFIKPILEKMDGTEELLVKLNREDLLRKQRTFDNGSIPHQIHLGELHAILRRQEDFYPFLKDNREKIEKILTFRIPYYVGPLARGNSRFAWMTRKSEETITPWNFEEVVDKGASAQSFIERMTNFDKNLPNEKVLPKHSLLYEYFTVYNELTKVKYVTEGMRKPAFLSGEQKKAIVDLLFKTNRKVTVKQLKEDYFKKIECFDSVEISGVEDRFNASLGTYHDLLKIIKDKDFLDNEENEDILEDIVLTLTLFEDREMIEERLKTYAHLFDDKVMKQLKRRRYTGWGRLSRKLINGIRDKQSGKTILDFLKSDGFANRNFMQLIHDDSLTFKEDIQKAQVSGQGDSLHEHIANLAGSPAIKKGILQTVKVVDELVKVMGRHKPENIVIEMARENQTTQKGQKNSRERMKRIEEGIKELGSQILKEHPVENTQLQNEKLYLYYLQNGRDMYVDQELDINRLSDYDVDHIVPQSFLKDDSIDNKVLTRSDKARGKSDNVPSEEVVKKMKNYWRQLLNAKLITQRKFDNLTKAERGGLSELDKAGFIKRQLVETRQITKHVAQILDSRMNTKYDENDKLIREVKVITLKSKLVSDFRKDFQFYKVREINNYHHAHDAYLNAVVGTALIKKYPKLESEFVYGDYKVYDVRKMIAKSEQEIGKATAKYFFYSNIMNFFKTEITLANGEIRKRPLIETNGETGEIVWDKGRDFATVRKVLSMPQVNIVKKTEVQTGGFSKESILPKRNSDKLIARKKDWDPKKYGGFDSPTVAYSVLVVAKVEKGKSKKLKSVKELLGITIMERSSFEKNPIDFLEAKGYKEVKKDLIIKLPKYSLFELENGRKRMLASAGELQKGNELALPSKYVNFLYLASHYEKLKGSPEDNEQKQLFVEQHKHYLDEIIEQISEFSKRVILADANLDKVLSAYNKHRDKPIREQAENIIHLFTLTNLGAPAAFKYFDTTIDRKRYTSTKEVLDATLIHQSITGLYETRIDLSQLGGDGGGGSGGGPAPGGTLNLEDEYRLYETSAEPEVSPGSTWLSDFPQAWAETGGMGLAVRQAPLIIPLKATSTPVSIKQYPMSQEAKLGIKPHIQRLLDQGILVPCQSPWNTPLLPVKKPGTNDYRPVQDLREVNKRVEDIHPTVPNPYNLLSGLPPSHRWYTVLDLKDAFFCLRLHPTSQPLFAFEWRDPGMGISGQLTWTRLPQGFKNSPTLFNEALHRDLADFRIQHPDLILLQYVDDILLAATSELDCQQGTRALLLTLGNLGYRASAKKAQLCQKQVKYLGYLLKEGQRWLTEARKETVMGQPTPKTPRQLREFLGKAGFCRLFIPGFAEMAAPLYPLTKPGTLFNWGPDQQKAYQEIKQALLTAPALGLPDLTKPFELFVDEKQGYAKGVLTQKLGPWRRPVAYLSKKLDPVAAGWPPCLRMVAAIAVLRKDAGKLTMGQPLVILAPHAVEALVKQPPDRWLSNARMTHYQAMLLDTDRVQFGPVVALNPATLLPLPEEGAPHDCLEILAETHGTRPDLTDQPIPDADHTWYTDGSSFLQEGQRKAGAAVTTETEVIWARALPAGTSAQRAELIALTQALKMAEGKRLNVYTDSRYAFATAHIHGEIYRRRGWLTSEGREIKNKSEILALLKALFLPKRLSIIHCLGHQKGDSAEARGNRLADQAAREAAIKTPPDTSTLLAGKRTADGSEFEKRTADGSEFESPKKKAKVE

SEQ ID NO: 6980 - protein, 2094 aa, synthetic construct
MPAAKRVKLDGGDKKYSIGLDIGTNSVGWAVITDEYKVPSKKFKVLGNTDRHSIKKNLIGALLFDSGETAEATRLKRTARRRYTRRKNRICYLQEIFSNEMAKVDDSFFHRLEESFLVEEDKKHERHPIFGNIVDEVAYHEKYPTIYHLRKKLVDSTDKADLRLIYLALAHMIKFRGHFLIEGDLNPDNSDVDKLFIQLVQTYNQLFEENPINASGVDAKAILSARLSKSRRLENLIAQLPGEKKNGLFGNLIALSLGLTPNFKSNFDLAEDAKLQLSKDTYDDDLDNLLAQIGDQYADLFLAAKNLSDAILLSDILRVNTEITKAPLSASMIKRYDEHHQDLTLLKALVRQQLPEKYKEIFFDQSKNGYAGYIDGGASQEEFYKFIKPILEKMDGTEELLVKLNREDLLRKQRTFDNGSIPHQIHLGELHAILRRQEDFYPFLKDNREKIEKILTFRIPYYVGPLARGNSRFAWMTRKSEETITPWNFEEVVDKGASAQSFIERMTNFDKNLPNEKVLPKHSLLYEYFTVYNELTKVKYVTEGMRKPAFLSGEQKKAIVDLLFKTNRKVTVKQLKEDYFKKIECFDSVEISGVEDRFNASLGTYHDLLKIIKDKDFLDNEENEDILEDIVLTLTLFEDREMIEERLKTYAHLFDDKVMKQLKRRRYTGWGRLSRKLINGIRDKQSGKTILDFLKSDGFANRNFMQLIHDDSLTFKEDIQKAQVSGQGDSLHEHIANLAGSPAIKKGILQTVKVVDELVKVMGRHKPENIVIEMARENQTTQKGQKNSRERMKRIEEGIKELGSQILKEHPVENTQLQNEKLYLYYLQNGRDMYVDQELDINRLSDYDVDHIVPQSFLKDDSIDNKVLTRSDKARGKSDNVPSEEVVKKMKNYWRQLLNAKLITQRKFDNLTKAERGGLSELDKAGFIKRQLVETRQITKHVAQILDSRMNTKYDENDKLIREVKVITLKSKLVSDFRKDFQFYKVREINNYHHAHDAYLNAVVGTALIKKYPKLESEFVYGDYKVYDVRKMIAKSEQEIGKATAKYFFYSNIMNFFKTEITLANGEIRKRPLIETNGETGEIVWDKGRDFATVRKVLSMPQVNIVKKTEVQTGGFSKESILPKRNSDKLIARKKDWDPKKYGGFDSPTVAYSVLVVAKVEKGKSKKLKSVKELLGITIMERSSFEKNPIDFLEAKGYKEVKKDLIIKLPKYSLFELENGRKRMLASAGELQKGNELALPSKYVNFLYLASHYEKLKGSPEDNEQKQLFVEQHKHYLDEIIEQISEFSKRVILADANLDKVLSAYNKHRDKPIREQAENIIHLFTLTNLGAPAAFKYFDTTIDRKRYTSTKEVLDATLIHQSITGLYETRIDLSQLGGDGGGGSGGGPAPGGTLNIEDEYRLHETSKGPDVPLGSTWLSDFPQAWAETGGMGLAVRQAPLIIPLKATSTPVSIKQYPMSQEARLGIKPHIQRLLDQGILVPCQSPWNTPLLPVKKPGTNDYRPVQDLREVNKRVEDIHPTVPNPYNLLSGLPPSHQWYTVLDLKDAFFCLRLHPTSQSLFAFEWRDPEMGISGQLTWTRLPQGFKNSPTLFNEALHRDLADFRIQHPDLILLQYVDDLLLAATSELDCQQGTRALLQTLGDLGYRASAKKAQICQKQVKYLGYLLKEGQRWLTEARKETVMGQPTPKTPRQLREFLGKAGFCRLFIPGFAEMAAPLYPLTKPGTLFEWGPDQQKAYQEIKQALLTAPALGLPDLTKPFELFVDEKQGYAKGVLTQKLGPWRRPVAYLSKKLDPVAAGWPPCLRMVAAIAVLTKDAGKLTMGQPLVILAPHAVEALVKQPPDRWLSNARMTHYQALLLDTDRVQFGPIVALNPATLLPLPEEGLQHDCLDILAEAHGTRPDLTDQPLPDADHTWYTDGSSFLQEGQRKAGAAVTTETEVVWAKALPAGTSAQRAELIALTQALKMAEGKKLNVYTDSRYAFATAHIHGEIYRRRGWLTSEGKEIKNKDEILALLKALFLPKRLSIIHCPGHQKGNRAEARGNRMADQAAREVATRETPETSTLLAGKRTADGSEFEKRTADGSEFESPKKKAKVE

SEQ ID NO: 6981 - protein, 2114 aa, synthetic construct
MPAAKRVKLDGGDKKYSIGLDIGTNSVGWAVITDEYKVPSKKFKVLGNTDRHSIKKNLIGALLFDSGETAEATRLKRTARRRYTRRKNRICYLQEIFSNEMAKVDDSFFHRLEESFLVEEDKKHERHPIFGNIVDEVAYHEKYPTIYHLRKKLVDSTDKADLRLIYLALAHMIKFRGHFLIEGDLNPDNSDVDKLFIQLVQTYNQLFEENPINASGVDAKAILSARLSKSRRLENLIAQLPGEKKNGLFGNLIALSLGLTPNFKSNFDLAEDAKLQLSKDTYDDDLDNLLAQIGDQYADLFLAAKNLSDAILLSDILRVNTEITKAPLSASMIKRYDEHHQDLTLLKALVRQQLPEKYKEIFFDQSKNGYAGYIDGGASQEEFYKFIKPILEKMDGTEELLVKLNREDLLRKQRTFDNGSIPHQIHLGELHAILRRQEDFYPFLKDNREKIEKILTFRIPYYVGPLARGNSRFAWMTRKSEETITPWNFEEVVDKGASAQSFIERMTNFDKNLPNEKVLPKHSLLYEYFTVYNELTKVKYVTEGMRKPAFLSGEQKKAIVDLLFKTNRKVTVKQLKEDYFKKIECFDSVEISGVEDRFNASLGTYHDLLKIIKDKDFLDNEENEDILEDIVLTLTLFEDREMIEERLKTYAHLFDDKVMKQLKRRRYTGWGRLSRKLINGIRDKQSGKTILDFLKSDGFANRNFMQLIHDDSLTFKEDIQKAQVSGQGDSLHEHIANLAGSPAIKKGILQTVKVVDELVKVMGRHKPENIVIEMARENQTTQKGQKNSRERMKRIEEGIKELGSQILKEHPVENTQLQNEKLYLYYLQNGRDMYVDQELDINRLSDYDVDHIVPQSFLKDDSIDNKVLTRSDKARGKSDNVPSEEVVKKMKNYWRQLLNAKLITQRKFDNLTKAERGGLSELDKAGFIKRQLVETRQITKHVAQILDSRMNTKYDENDKLIREVKVITLKSKLVSDFRKDFQFYKVREINNYHHAHDAYLNAVVGTALIKKYPKLESEFVYGDYKVYDVRKMIAKSEQEIGKATAKYFFYSNIMNFFKTEITLANGEIRKRPLIETNGETGEIVWDKGRDFATVRKVLSMPQVNIVKKTEVQTGGFSKESILPKRNSDKLIARKKDWDPKKYGGFDSPTVAYSVLVVAKVEKGKSKKLKSVKELLGITIMERSSFEKNPIDFLEAKGYKEVKKDLIIKLPKYSLFELENGRKRMLASAGELQKGNELALPSKYVNFLYLASHYEKLKGSPEDNEQKQLFVEQHKHYLDEIIEQISEFSKRVILADANLDKVLSAYNKHRDKPIREQAENIIHLFTLTNLGAPAAFKYFDTTIDRKRYTSTKEVLDATLIHQSITGLYETRIDLSQLGGDGGGGSGGGPAPGGVQEISDSRPMLHIYLNGRRFLGLLDTGADKTCIAGRDWPANWPIHQTESSLQGLGMACGVARSSQPLRWQHEDKSGIIHPFVIPTLPFTLWGRDIMKDIKVRLMTDSPDDSQDLMIGAIESNLFADQISWKSDQPVWLNQWPLKQEKLQALQQLVTEQLQLGHLEESNSPWNTPVFVIKKKSGKWRLLQDLRAVNATMHDMGALQPGLPSPPAVPKGWEIIIIDLQDCFFNIKLHPEDCKRFAFSVPSPNFKRPYQRFQWKVLPQGMKNSPTLCQKFVDKAILTVRDKYQDSYIVHYMDDILLAHPSRSIVDEILTSMIQALNKHGLVVSTEKIQKYDNLKYLGTHIQGDSVSYQKLQIRTDKLRTLNDFQKLLGNINWIRPFLKLTTGELKPLFEILNPDSNPISTRKLTPEACKALQLMNERLSTARVKRLDLSQPWSLCILKTEYTPTACLWQDGVVEWIHLPHISPKVITPYDIFCTQLIIKGRHRSKELFSKDPDYIVVPYTKVQFDLLLQEKEDWPISLLGFLGEVHFHLPKDPLLTFTLQTAIIFPHMTSTTPLEKGIVIFTDGSANGRSVTYIQGREPIIKENTQNTAQQAEIVAVITAFEEVSQPFNLYTDSKYVTGLFPEIETATLSPRTKIYTELKHLQRLIHKRQEKFYIGHIRGHTGLPGPLAQGNAYADSLTRILTAAGKRTADGSEFEKRTADGSEFESPKKKAKVE

SEQ ID NO: 6982 - protein, 2088 aa, synthetic construct
MPAAKRVKLDGGDKKYSIGLDIGTNSVGWAVITDEYKVPSKKFKVLGNTDRHSIKKNLIGALLFDSGETAEATRLKRTARRRYTRRKNRICYLQEIFSNEMAKVDDSFFHRLEESFLVEEDKKHERHPIFGNIVDEVAYHEKYPTIYHLRKKLVDSTDKADLRLIYLALAHMIKFRGHFLIEGDLNPDNSDVDKLFIQLVQTYNQLFEENPINASGVDAKAILSARLSKSRRLENLIAQLPGEKKNGLFGNLIALSLGLTPNFKSNFDLAEDAKLQLSKDTYDDDLDNLLAQIGDQYADLFLAAKNLSDAILLSDILRVNTEITKAPLSASMIKRYDEHHQDLTLLKALVRQQLPEKYKEIFFDQSKNGYAGYIDGGASQEEFYKFIKPILEKMDGTEELLVKLNREDLLRKQRTFDNGSIPHQIHLGELHAILRRQEDFYPFLKDNREKIEKILTFRIPYYVGPLARGNSRFAWMTRKSEETITPWNFEEVVDKGASAQSFIERMTNFDKNLPNEKVLPKHSLLYEYFTVYNELTKVKYVTEGMRKPAFLSGEQKKAIVDLLFKTNRKVTVKQLKEDYFKKIECFDSVEISGVEDRFNASLGTYHDLLKIIKDKDFLDNEENEDILEDIVLTLTLFEDREMIEERLKTYAHLFDDKVMKQLKRRRYTGWGRLSRKLINGIRDKQSGKTILDFLKSDGFANRNFMQLIHDDSLTFKEDIQKAQVSGQGDSLHEHIANLAGSPAIKKGILQTVKVVDELVKVMGRHKPENIVIEMARENQTTQKGQKNSRERMKRIEEGIKELGSQILKEHPVENTQLQNEKLYLYYLQNGRDMYVDQELDINRLSDYDVDHIVPQSFLKDDSIDNKVLTRSDKARGKSDNVPSEEVVKKMKNYWRQLLNAKLITQRKFDNLTKAERGGLSELDKAGFIKRQLVETRQITKHVAQILDSRMNTKYDENDKLIREVKVITLKSKLVSDFRKDFQFYKVREINNYHHAHDAYLNAVVGTALIKKYPKLESEFVYGDYKVYDVRKMIAKSEQEIGKATAKYFFYSNIMNFFKTEITLANGEIRKRPLIETNGETGEIVWDKGRDFATVRKVLSMPQVNIVKKTEVQTGGFSKESILPKRNSDKLIARKKDWDPKKYGGFDSPTVAYSVLVVAKVEKGKSKKLKSVKELLGITIMERSSFEKNPIDFLEAKGYKEVKKDLIIKLPKYSLFELENGRKRMLASAGELQKGNELALPSKYVNFLYLASHYEKLKGSPEDNEQKQLFVEQHKHYLDEIIEQISEFSKRVILADANLDKVLSAYNKHRDKPIREQAENIIHLFTLTNLGAPAAFKYFDTTIDRKRYTSTKEVLDATLIHQSITGLYETRIDLSQLGGDGGGGSGGGPAPGGTLQLDDEYRLYSPLVKPDQNIQFWLEQFPQAWAETAGMGLAKQVPPQVIQLKASATPVSVRQYPLSKEAQEGIRPHVQRLIQQGILVPVQSPWNTPLLPVRKPGTNDYRPVQDLREVNKRVQDIHPTVPNPYNLLCALPPQRSWYTVLDLKDAFFCLRLHPTSQPLFAFEWRDPGTGRTGQLTWTRLPQGFKNSPTIFDEALHRDLANFRIQHPQVTLLQYVDDLLLAGATKQDCLEGTKALLLELSDLGYRASAKKAQICRREVTYLGYSLRDGQRWLTEARKKTVVQIPAPTTAKQVREFLGTAGFCRLWIPGFATLAAPLYPLTKEKGEFSWAPEHQKAFDAIKKALLSAPALALPDVTKPFTLYVDERKGVARGVLTQTLGPWRRPVAYLSKKLDPVASGWPVCLKAIAAVAILVKDADKLTLGQNITVIAPHALENIVRQPPDRWMTNARMTHYQSLLLTERVTFAPPAALNPATLLPEETDEPVTHDCHQLLIEETGVRKDLTDIPLTGEVLTWFTDGSSYVVEGKRMAGAAVVDGTRTIWASSLPEGTSAQKAELMALTQALRLAEGKSINIYTDSRYAFATAHVHGAIYKQRGLLTSAGREIKNKEEILSLLEALHLPKRLAIIHCPGHQKAKDPISRGNQMADRVAKQAAQGVNLLAGKRTADGSEFEKRTADGSEFESPKKKAKVE

SEQ ID NO: 6983 - protein, 2085 aa, synthetic construct
MPAAKRVKLDGGDKKYSIGLDIGTNSVGWAVITDEYKVPSKKFKVLGNTDRHSIKKNLIGALLFDSGETAEATRLKRTARRRYTRRKNRICYLQEIFSNEMAKVDDSFFHRLEESFLVEEDKKHERHPIFGNIVDEVAYHEKYPTIYHLRKKLVDSTDKADLRLIYLALAHMIKFRGHFLIEGDLNPDNSDVDKLFIQLVQTYNQLFEENPINASGVDAKAILSARLSKSRRLENLIAQLPGEKKNGLFGNLIALSLGLTPNFKSNFDLAEDAKLQLSKDTYDDDLDNLLAQIGDQYADLFLAAKNLSDAILLSDILRVNTEITKAPLSASMIKRYDEHHQDLTLLKALVRQQLPEKYKEIFFDQSKNGYAGYIDGGASQEEFYKFIKPILEKMDGTEELLVKLNREDLLRKQRTFDNGSIPHQIHLGELHAILRRQEDFYPFLKDNREKIEKILTFRIPYYVGPLARGNSRFAWMTRKSEETITPWNFEEVVDKGASAQSFIERMTNFDKNLPNEKVLPKHSLLYEYFTVYNELTKVKYVTEGMRKPAFLSGEQKKAIVDLLFKTNRKVTVKQLKEDYFKKIECFDSVEISGVEDRFNASLGTYHDLLKIIKDKDFLDNEENEDILEDIVLTLTLFEDREMIEERLKTYAHLFDDKVMKQLKRRRYTGWGRLSRKLINGIRDKQSGKTILDFLKSDGFANRNFMQLIHDDSLTFKEDIQKAQVSGQGDSLHEHIANLAGSPAIKKGILQTVKVVDELVKVMGRHKPENIVIEMARENQTTQKGQKNSRERMKRIEEGIKELGSQILKEHPVENTQLQNEKLYLYYLQNGRDMYVDQELDINRLSDYDVDHIVPQSFLKDDSIDNKVLTRSDKARGKSDNVPSEEVVKKMKNYWRQLLNAKLITQRKFDNLTKAERGGLSELDKAGFIKRQLVETRQITKHVAQILDSRMNTKYDENDKLIREVKVITLKSKLVSDFRKDFQFYKVREINNYHHAHDAYLNAVVGTALIKKYPKLESEFVYGDYKVYDVRKMIAKSEQEIGKATAKYFFYSNIMNFFKTEITLANGEIRKRPLIETNGETGEIVWDKGRDFATVRKVLSMPQVNIVKKTEVQTGGFSKESILPKRNSDKLIARKKDWDPKKYGGFDSPTVAYSVLVVAKVEKGKSKKLKSVKELLGITIMERSSFEKNPIDFLEAKGYKEVKKDLIIKLPKYSLFELENGRKRMLASAGELQKGNELALPSKYVNFLYLASHYEKLKGSPEDNEQKQLFVEQHKHYLDEIIEQISEFSKRVILADANLDKVLSAYNKHRDKPIREQAENIIHLFTLTNLGAPAAFKYFDTTIDRKRYTSTKEVLDATLIHQSITGLYETRIDLSQLGGDGGGGSGGGPAPGGVPWLMKKPLQLTVLVPLHEYQERLLQQTALPKEQKELLQKLFLKYDALWQHWENQVGHRRIKPHNIATGTLAPRPQKQYPINPKAKPSIQIVIDDLLKQGVLIQQNSTMNTPVYPVPKPDGKWRMVLDYREVNKTIPLIAAQNQHSAGILSSIYRGKYKTTLDLTNGFWAHPITPESYWLTAFTWQGKQYCWTRLPQGFLNSPALFTADVVDLLKEIPNVQAYVDDIYISHDDPQEHLEQLEKIFSILLNAGYVVSLKKSEIAQREVEFLGFNITKEGRGLTDTFKQKLLNITPPKDLKQLQSILGLLNFARNFIPNYSELVKPLYTIVANANGKFISWTEDNSNQLQHIISVLNQADNLEERNPETRLIIKVNSSPSAGYIRYYNEGSKRPIMYVNYIFSKAEAKFTQTEKLLTTMHKGLIKAMDLAMGQEILVYSPIVSMTKIQRTPLPERKALPVRWITWMTYLEDPRIQFHYDKSLPELQQIPNVTEDVIAKTKHPSEFAMVFYTDGSAIKHPDVNKSHSAGMGIAQVQFIPEYKIVHQWSIPLGDHTAQLAEIAAVEFACKKALKISGPVLIVTDSFYVAESANKELPYWKSNGFLNNKKKPLRHVSKWKSIAECLQLKPDIIIMHEKGHQQPMTTLHTEGNNLADKLATQGSYVVHAGKRTADGSEFEKRTADGSEFESPKKKAKVE

SEQ ID NO: 6984 - protein, 2085 aa, synthetic construct
MPAAKRVKLDGGDKKYSIGLDIGTNSVGWAVITDEYKVPSKKFKVLGNTDRHSIKKNLIGALLFDSGETAEATRLKRTARRRYTRRKNRICYLQEIFSNEMAKVDDSFFHRLEESFLVEEDKKHERHPIFGNIVDEVAYHEKYPTIYHLRKKLVDSTDKADLRLIYLALAHMIKFRGHFLIEGDLNPDNSDVDKLFIQLVQTYNQLFEENPINASGVDAKAILSARLSKSRRLENLIAQLPGEKKNGLFGNLIALSLGLTPNFKSNFDLAEDAKLQLSKDTYDDDLDNLLAQIGDQYADLFLAAKNLSDAILLSDILRVNTEITKAPLSASMIKRYDEHHQDLTLLKALVRQQLPEKYKEIFFDQSKNGYAGYIDGGASQEEFYKFIKPILEKMDGTEELLVKLNREDLLRKQRTFDNGSIPHQIHLGELHAILRRQEDFYPFLKDNREKIEKILTFRIPYYVGPLARGNSRFAWMTRKSEETITPWNFEEVVDKGASAQSFIERMTNFDKNLPNEKVLPKHSLLYEYFTVYNELTKVKYVTEGMRKPAFLSGEQKKAIVDLLFKTNRKVTVKQLKEDYFKKIECFDSVEISGVEDRFNASLGTYHDLLKIIKDKDFLDNEENEDILEDIVLTLTLFEDREMIEERLKTYAHLFDDKVMKQLKRRRYTGWGRLSRKLINGIRDKQSGKTILDFLKSDGFANRNFMQLIHDDSLTFKEDIQKAQVSGQGDSLHEHIANLAGSPAIKKGILQTVKVVDELVKVMGRHKPENIVIEMARENQTTQKGQKNSRERMKRIEEGIKELGSQILKEHPVENTQLQNEKLYLYYLQNGRDMYVDQELDINRLSDYDVDHIVPQSFLKDDSIDNKVLTRSDKARGKSDNVPSEEVVKKMKNYWRQLLNAKLITQRKFDNLTKAERGGLSELDKAGFIKRQLVETRQITKHVAQILDSRMNTKYDENDKLIREVKVITLKSKLVSDFRKDFQFYKVREINNYHHAHDAYLNAVVGTALIKKYPKLESEFVYGDYKVYDVRKMIAKSEQEIGKATAKYFFYSNIMNFFKTEITLANGEIRKRPLIETNGETGEIVWDKGRDFATVRKVLSMPQVNIVKKTEVQTGGFSKESILPKRNSDKLIARKKDWDPKKYGGFDSPTVAYSVLVVAKVEKGKSKKLKSVKELLGITIMERSSFEKNPIDFLEAKGYKEVKKDLIIKLPKYSLFELENGRKRMLASAGELQKGNELALPSKYVNFLYLASHYEKLKGSPEDNEQKQLFVEQHKHYLDEIIEQISEFSKRVILADANLDKVLSAYNKHRDKPIREQAENIIHLFTLTNLGAPAAFKYFDTTIDRKRYTSTKEVLDATLIHQSITGLYETRIDLSQLGGDGGGGSGGGPAPGGIPWLMKKPLQLTTLVPLQEYEERLLKQTMLTGSYKEKLQSLFLKYDALWQHWENQVGHRRIKPHHIATGTVNPRPQKQYPINPKAKASIQTVINDLLKQGVLIQQNSIMNTPVYPVPKPDGKWRMVLDYREVNKTIPLIAAQNQHSAGILSSIFRGKYKTTLDLSNGFWAHSITPESYWLTAFTWLGQQYCWTRLPQGFLNSPALFNADVVDLLKEVPNVQVYVDDIYISHDDPREHLEQLEKVFSLLLNAGYVVSLKKSEIAQHEVEFLGFNITKEGRGLTETFKQKLLNITPPRDLKQLQSILGLLNFARNFIPNFSELVKPLYNIIATAPGKYITWTTDNSQQLQNIISMLNSAENLEERNPEVRLIMKVNTSPSAGYIRFYNEFAKRPIMYLNYVYTKAEVKFTNTEKLLTTIHKGLIKALDLGMGQEILVYSPIVSMTKIQKTPLPERKALPIRWITWMSYLEDPRIQFHYDKTLPELQQVPTVTDDIIAKIKHPSEFSMVFYTDGSAIKHPNVNKSHNAGMGIAQVQFKPEFTVINTWSIPLGDHTAQLAEVAAVEFACKKALKIDGPVLIVTDSFYVAESVNKELPYWQSNGFFNNKKKPLKHVSKWKSIADCIQLKPDIIIIHEKGHQPTASTFHTEGNNLADKLATQGSYVVNAGKRTADGSEFEKRTADGSEFESPKKKAKVE

SEQ ID NO: 6985 - protein, 2100 aa, synthetic construct
MPAAKRVKLDGGDKKYSIGLDIGTNSVGWAVITDEYKVPSKKFKVLGNTDRHSIKKNLIGALLFDSGETAEATRLKRTARRRYTRRKNRICYLQEIFSNEMAKVDDSFFHRLEESFLVEEDKKHERHPIFGNIVDEVAYHEKYPTIYHLRKKLVDSTDKADLRLIYLALAHMIKFRGHFLIEGDLNPDNSDVDKLFIQLVQTYNQLFEENPINASGVDAKAILSARLSKSRRLENLIAQLPGEKKNGLFGNLIALSLGLTPNFKSNFDLAEDAKLQLSKDTYDDDLDNLLAQIGDQYADLFLAAKNLSDAILLSDILRVNTEITKAPLSASMIKRYDEHHQDLTLLKALVRQQLPEKYKEIFFDQSKNGYAGYIDGGASQEEFYKFIKPILEKMDGTEELLVKLNREDLLRKQRTFDNGSIPHQIHLGELHAILRRQEDFYPFLKDNREKIEKILTFRIPYYVGPLARGNSRFAWMTRKSEETITPWNFEEVVDKGASAQSFIERMTNFDKNLPNEKVLPKHSLLYEYFTVYNELTKVKYVTEGMRKPAFLSGEQKKAIVDLLFKTNRKVTVKQLKEDYFKKIECFDSVEISGVEDRFNASLGTYHDLLKIIKDKDFLDNEENEDILEDIVLTLTLFEDREMIEERLKTYAHLFDDKVMKQLKRRRYTGWGRLSRKLINGIRDKQSGKTILDFLKSDGFANRNFMQLIHDDSLTFKEDIQKAQVSGQGDSLHEHIANLAGSPAIKKGILQTVKVVDELVKVMGRHKPENIVIEMARENQTTQKGQKNSRERMKRIEEGIKELGSQILKEHPVENTQLQNEKLYLYYLQNGRDMYVDQELDINRLSDYDVDHIVPQSFLKDDSIDNKVLTRSDKARGKSDNVPSEEVVKKMKNYWRQLLNAKLITQRKFDNLTKAERGGLSELDKAGFIKRQLVETRQITKHVAQILDSRMNTKYDENDKLIREVKVITLKSKLVSDFRKDFQFYKVREINNYHHAHDAYLNAVVGTALIKKYPKLESEFVYGDYKVYDVRKMIAKSEQEIGKATAKYFFYSNIMNFFKTEITLANGEIRKRPLIETNGETGEIVWDKGRDFATVRKVLSMPQVNIVKKTEVQTGGFSKESILPKRNSDKLIARKKDWDPKKYGGFDSPTVAYSVLVVAKVEKGKSKKLKSVKELLGITIMERSSFEKNPIDFLEAKGYKEVKKDLIIKLPKYSLFELENGRKRMLASAGELQKGNELALPSKYVNFLYLASHYEKLKGSPEDNEQKQLFVEQHKHYLDEIIEQISEFSKRVILADANLDKVLSAYNKHRDKPIREQAENIIHLFTLTNLGAPAAFKYFDTTIDRKRYTSTKEVLDATLIHQSITGLYETRIDLSQLGGDGGGGSPAPGGGGGTVSLQDEHRLFDIPVTTSLPDVWLQDFPQAWAETGGLGRAKCQAPIIIDLKPTAVPVSIKQYPMSLEAHMGIRQHIIKFLELGVLRPCRSPWNTPLLPVKKPGTQDYRPVQDLREINKRTVDIHPTVPNPYNLLSTLKPDYSWYTVLDLKDAFFCLPLAPQSQELFAFEWKDPERGISGQLTWTRLPQGFKNSPTLFNEALHRDLTDFRTQHPEVTLLQYVDDLLLAAPTKKACTQGTRHLLQELGEKGYRASAKKAQICQTKVTYLGYILSEGKRWLTPGRIETVARIPPPRNPREVREFLGTAGFCRLWIPGFAELAAPLYALTKPSTPFTWQTEHQLAFEALKKALLSAPALGLPDTSKPFTLFLDERQGIAKGVLTQKLGPWKRPVAYLSKKLDPVAAGWPPCLRIMAATAMLVKDSAKLTLGQPLTVITPHTLEAIVRQPPDRWITNARLTHYQALLLDTDRVQFGPPVTLNPATLLPVPENQPSPHDCRQVLAETHGTREDLKDQELPDADHTWYTDGSSYLDSGTRRAGAAVVDGHNTIWAQSLPPGTSAQKAELIALTKALELSKGKKANIYTDSRYAFATAHTHGSIYERRGWLTSEGKEIKNKAEIIALLKALFLPQEVAIIHCPGHQKGQDPVAVGNRQADRVARQAAMAEVLTLATEPDNTSHITAGKRTADGSEFEKRTADGSEFESPKKKAKVE

SEQ ID NO: 6986 - protein, 2092 aa, synthetic construct
MPAAKRVKLDGGDKKYSIGLDIGTNSVGWAVITDEYKVPSKKFKVLGNTDRHSIKKNLIGALLFDSGETAEATRLKRTARRRYTRRKNRICYLQEIFSNEMAKVDDSFFHRLEESFLVEEDKKHERHPIFGNIVDEVAYHEKYPTIYHLRKKLVDSTDKADLRLIYLALAHMIKFRGHFLIEGDLNPDNSDVDKLFIQLVQTYNQLFEENPINASGVDAKAILSARLSKSRRLENLIAQLPGEKKNGLFGNLIALSLGLTPNFKSNFDLAEDAKLQLSKDTYDDDLDNLLAQIGDQYADLFLAAKNLSDAILLSDILRVNTEITKAPLSASMIKRYDEHHQDLTLLKALVRQQLPEKYKEIFFDQSKNGYAGYIDGGASQEEFYKFIKPILEKMDGTEELLVKLNREDLLRKQRTFDNGSIPHQIHLGELHAILRRQEDFYPFLKDNREKIEKILTFRIPYYVGPLARGNSRFAWMTRKSEETITPWNFEEVVDKGASAQSFIERMTNFDKNLPNEKVLPKHSLLYEYFTVYNELTKVKYVTEGMRKPAFLSGEQKKAIVDLLFKTNRKVTVKQLKEDYFKKIECFDSVEISGVEDRFNASLGTYHDLLKIIKDKDFLDNEENEDILEDIVLTLTLFEDREMIEERLKTYAHLFDDKVMKQLKRRRYTGWGRLSRKLINGIRDKQSGKTILDFLKSDGFANRNFMQLIHDDSLTFKEDIQKAQVSGQGDSLHEHIANLAGSPAIKKGILQTVKVVDELVKVMGRHKPENIVIEMARENQTTQKGQKNSRERMKRIEEGIKELGSQILKEHPVENTQLQNEKLYLYYLQNGRDMYVDQELDINRLSDYDVDHIVPQSFLKDDSIDNKVLTRSDKARGKSDNVPSEEVVKKMKNYWRQLLNAKLITQRKFDNLTKAERGGLSELDKAGFIKRQLVETRQITKHVAQILDSRMNTKYDENDKLIREVKVITLKSKLVSDFRKDFQFYKVREINNYHHAHDAYLNAVVGTALIKKYPKLESEFVYGDYKVYDVRKMIAKSEQEIGKATAKYFFYSNIMNFFKTEITLANGEIRKRPLIETNGETGEIVWDKGRDFATVRKVLSMPQVNIVKKTEVQTGGFSKESILPKRNSDKLIARKKDWDPKKYGGFDSPTVAYSVLVVAKVEKGKSKKLKSVKELLGITIMERSSFEKNPIDFLEAKGYKEVKKDLIIKLPKYSLFELENGRKRMLASAGELQKGNELALPSKYVNFLYLASHYEKLKGSPEDNEQKQLFVEQHKHYLDEIIEQISEFSKRVILADANLDKVLSAYNKHRDKPIREQAENIIHLFTLTNLGAPAAFKYFDTTIDRKRYTSTKEVLDATLIHQSITGLYETRIDLSQLGGDGGGGSPAPGGGGGVLNLEEEYRLHEKPVPSSIDPSWLQLFPTVWAERAGMGLANQVPPVVVELRSGASPVAVRQYPMSKEAREGIRPHIQKFLDLGVLVPCRSPWNTPLLPVKKPGTNDYRPVQDLREINKRVQDIHPTVPNPYNLLSSLPPSYTWYSVLDLKDAFFCLRLHPNSQPLFAFEWKDPEKGNTGQLTWTRLPQGFKNSPTLFDEALHRDLAPFRALNPQVVLLQYVDDLLVAAPTYEDCKKGTQKLLQELSKLGYRVSAKKAQLCQREVTYLGYLLKEGKRWLTPARKATVMKIPVPTTPRQVREFLGTAGFCRLWIPGFASLAAPLYPLTKESIPFIWTEEHQQAFDHIKKALLSAPALALPDLTKPFTLYIDERAGVARGVLTQTLGPWRRPVAYLSKKLDPVASGWPTCLKAVAAVALLLKDADKLTLGQNVTVIASHSLESIVRQPPDRWMTNARMTHYQSLLLNERVSFAPPAVLNPATLLPVESEATPVHRCSEILAEETGTRRDLEDQPLPGVPTWYTDGSSFITEGKRRAGAPIVDGKRTVWASSLPEGTSAQKAELVALTQALRLAEGKNINIYTDSRYAFATAHIHGAIYKQRGLLTSAGKDIKNKEEILALLEAIHLPRRVAIIHCPGHQRGSNPVATGNRRADEAAKQAALSTRVLAGTTKPAGKRTADGSEFEKRTADGSEFESPKKKAKVE

SEQ ID NO: 6987 - protein, 2092 aa, synthetic construct
MPAAKRVKLDGGDKKYSIGLDIGTNSVGWAVITDEYKVPSKKFKVLGNTDRHSIKKNLIGALLFDSGETAEATRLKRTARRRYTRRKNRICYLQEIFSNEMAKVDDSFFHRLEESFLVEEDKKHERHPIFGNIVDEVAYHEKYPTIYHLRKKLVDSTDKADLRLIYLALAHMIKFRGHFLIEGDLNPDNSDVDKLFIQLVQTYNQLFEENPINASGVDAKAILSARLSKSRRLENLIAQLPGEKKNGLFGNLIALSLGLTPNFKSNFDLAEDAKLQLSKDTYDDDLDNLLAQIGDQYADLFLAAKNLSDAILLSDILRVNTEITKAPLSASMIKRYDEHHQDLTLLKALVRQQLPEKYKEIFFDQSKNGYAGYIDGGASQEEFYKFIKPILEKMDGTEELLVKLNREDLLRKQRTFDNGSIPHQIHLGELHAILRRQEDFYPFLKDNREKIEKILTFRIPYYVGPLARGNSRFAWMTRKSEETITPWNFEEVVDKGASAQSFIERMTNFDKNLPNEKVLPKHSLLYEYFTVYNELTKVKYVTEGMRKPAFLSGEQKKAIVDLLFKTNRKVTVKQLKEDYFKKIECFDSVEISGVEDRFNASLGTYHDLLKIIKDKDFLDNEENEDILEDIVLTLTLFEDREMIEERLKTYAHLFDDKVMKQLKRRRYTGWGRLSRKLINGIRDKQSGKTILDFLKSDGFANRNFMQLIHDDSLTFKEDIQKAQVSGQGDSLHEHIANLAGSPAIKKGILQTVKVVDELVKVMGRHKPENIVIEMARENQTTQKGQKNSRERMKRIEEGIKELGSQILKEHPVENTQLQNEKLYLYYLQNGRDMYVDQELDINRLSDYDVDHIVPQSFLKDDSIDNKVLTRSDKARGKSDNVPSEEVVKKMKNYWRQLLNAKLITQRKFDNLTKAERGGLSELDKAGFIKRQLVETRQITKHVAQILDSRMNTKYDENDKLIREVKVITLKSKLVSDFRKDFQFYKVREINNYHHAHDAYLNAVVGTALIKKYPKLESEFVYGDYKVYDVRKMIAKSEQEIGKATAKYFFYSNIMNFFKTEITLANGEIRKRPLIETNGETGEIVWDKGRDFATVRKVLSMPQVNIVKKTEVQTGGFSKESILPKRNSDKLIARKKDWDPKKYGGFDSPTVAYSVLVVAKVEKGKSKKLKSVKELLGITIMERSSFEKNPIDFLEAKGYKEVKKDLIIKLPKYSLFELENGRKRMLASAGELQKGNELALPSKYVNFLYLASHYEKLKGSPEDNEQKQLFVEQHKHYLDEIIEQISEFSKRVILADANLDKVLSAYNKHRDKPIREQAENIIHLFTLTNLGAPAAFKYFDTTIDRKRYTSTKEVLDATLIHQSITGLYETRIDLSQLGGDGGGGSPAPGGGGGVLNLEEEYRLHEKPVPSSIDPSWLQLFPTVWAERAGMGLANQVPPVVVELRSGASPVAVRQYPMSKEAREGIRPHIQKFLDLGVLVPCRSPWNTPLLPVKKPGTNDYRPVQDLREINKRVQDIHPTVPNPYNLLSSLPPSYTWYSVLDLKDAFFCLRLHPNSQPLFAFEWKDPEKGNTGQLTWTRLPQGFKNSPTLFNEALHRDLAPFRALNPQVVLLQYVDDLLVAAPTYEDCKKGTQKLLQELSKLGYRVSAKKAQLCQREVTYLGYLLKEGKRWLTPARKATVMKIPVPTTPRQVREFLGTAGFCRLWIPGFASLAAPLYPLTKPSIPFIWTEEHQQAFDHIKKALLSAPALALPDLTKPFTLYIDERAGVARGVLTQTLGPWRRPVAYLSKKLDPVASGWPTCLKAVAAVALLLKDADKLTLGQNVTVIASHSLESIVRQPPDRWMTNARMTHYQSLLLNERVSFAPPAVLNPATLLPVESEATPVHRCSEILAEETGTRRDLEDQPLPGVPTWYTDGSSFITEGKRRAGAPIVDGKRTVWASSLPEGTSAQKAELVALTQALRLAEGKNINIYTDSRYAFATAHIHGAIYKQRGWLTSAGKDIKNKEEILALLEAIHLPRRVAIIHCPGHQRGSNPVATGNRRADEAAKQAALSTRVLAGTTKPAGKRTADGSEFEKRTADGSEFESPKKKAKVE

SEQ ID NO: 6988 - protein, 2125 aa, synthetic construct
MPAAKRVKLDGGDKKYSIGLDIGTNSVGWAVITDEYKVPSKKFKVLGNTDRHSIKKNLIGALLFDSGETAEATRLKRTARRRYTRRKNRICYLQEIFSNEMAKVDDSFFHRLEESFLVEEDKKHERHPIFGNIVDEVAYHEKYPTIYHLRKKLVDSTDKADLRLIYLALAHMIKFRGHFLIEGDLNPDNSDVDKLFIQLVQTYNQLFEENPINASGVDAKAILSARLSKSRRLENLIAQLPGEKKNGLFGNLIALSLGLTPNFKSNFDLAEDAKLQLSKDTYDDDLDNLLAQIGDQYADLFLAAKNLSDAILLSDILRVNTEITKAPLSASMIKRYDEHHQDLTLLKALVRQQLPEKYKEIFFDQSKNGYAGYIDGGASQEEFYKFIKPILEKMDGTEELLVKLNREDLLRKQRTFDNGSIPHQIHLGELHAILRRQEDFYPFLKDNREKIEKILTFRIPYYVGPLARGNSRFAWMTRKSEETITPWNFEEVVDKGASAQSFIERMTNFDKNLPNEKVLPKHSLLYEYFTVYNELTKVKYVTEGMRKPAFLSGEQKKAIVDLLFKTNRKVTVKQLKEDYFKKIECFDSVEISGVEDRFNASLGTYHDLLKIIKDKDFLDNEENEDILEDIVLTLTLFEDREMIEERLKTYAHLFDDKVMKQLKRRRYTGWGRLSRKLINGIRDKQSGKTILDFLKSDGFANRNFMQLIHDDSLTFKEDIQKAQVSGQGDSLHEHIANLAGSPAIKKGILQTVKVVDELVKVMGRHKPENIVIEMARENQTTQKGQKNSRERMKRIEEGIKELGSQILKEHPVENTQLQNEKLYLYYLQNGRDMYVDQELDINRLSDYDVDHIVPQSFLKDDSIDNKVLTRSDKARGKSDNVPSEEVVKKMKNYWRQLLNAKLITQRKFDNLTKAERGGLSELDKAGFIKRQLVETRQITKHVAQILDSRMNTKYDENDKLIREVKVITLKSKLVSDFRKDFQFYKVREINNYHHAHDAYLNAVVGTALIKKYPKLESEFVYGDYKVYDVRKMIAKSEQEIGKATAKYFFYSNIMNFFKTEITLANGEIRKRPLIETNGETGEIVWDKGRDFATVRKVLSMPQVNIVKKTEVQTGGFSKESILPKRNSDKLIARKKDWDPKKYGGFDSPTVAYSVLVVAKVEKGKSKKLKSVKELLGITIMERSSFEKNPIDFLEAKGYKEVKKDLIIKLPKYSLFELENGRKRMLASAGELQKGNELALPSKYVNFLYLASHYEKLKGSPEDNEQKQLFVEQHKHYLDEIIEQISEFSKRVILADANLDKVLSAYNKHRDKPIREQAENIIHLFTLTNLGAPAAFKYFDTTIDRKRYTSTKEVLDATLIHQSITGLYETRIDLSQLGGDGGGGSPAPGGGGGLLGRDLLTKLKAQIQFSTEGPQVTWEDRPAMCLVLNLEEEYRLHEKPVPPSIDPSWLQLFPMVWAEKAGMGLANQVPPVVVELKSDASPVAVRQYPMSKEAREGIRPHIQRFLDLGILVPCQSPWNTPLLPVKKPGTNDYRPVQDLREVNKRVQDIHPTVPNPYNLLSSLPPSHTWYSVLDLKDAFFCLKLHPNSQPLFAFEWRDPEKGNTGQLTWTRLPQGFKNSPTLFNEALHRDLASFRALNPQVVMLQYVDDLLVAAPTYRDCKEGTRRLLQELSKLGYRVSAKKAQLCREEVTYLGYLLKGGKRWLTPARKATVMKIPTPTTPRQVREFLGTAGFCRLWIPGFASLAAPLYPLTRPKVPFTWTEAHQEAFGRIKEALLSAPALALPDLTKPFALYVDEKEGVARGVLTQTLGPWRRPVAYLSKKLDPVASGWPTCLKAIAAVALLLKDADKLTLGQNVLVIAPHNLESIVRQPPDRWMTNARMTHYQSLLLNERVSFAPPAILNPATLLPVESDDTPIHICSEILAEETGTRPDLRDQPLPGVPAWYTDGSSFIMDGRRQAGAAIVDNKRTVWASNLPEGTSAQKAELIALTQALRLAEGKSINIYTDSRYAFATAHVHGAIYKQRGWLTSAGKDIKNKEEILALLEAIHLPKRVAIIHCPGHQRGTDPVATGNRKADEAAKQAAQSTRILTETTKNAGKRTADGSEFEKRTADGSEFESPKKKAKVE

SEQ ID NO: 6989 - protein, 2216 aa, synthetic construct
MPAAKRVKLDGGDKKYSIGLDIGTNSVGWAVITDEYKVPSKKFKVLGNTDRHSIKKNLIGALLFDSGETAEATRLKRTARRRYTRRKNRICYLQEIFSNEMAKVDDSFFHRLEESFLVEEDKKHERHPIFGNIVDEVAYHEKYPTIYHLRKKLVDSTDKADLRLIYLALAHMIKFRGHFLIEGDLNPDNSDVDKLFIQLVQTYNQLFEENPINASGVDAKAILSARLSKSRRLENLIAQLPGEKKNGLFGNLIALSLGLTPNFKSNFDLAEDAKLQLSKDTYDDDLDNLLAQIGDQYADLFLAAKNLSDAILLSDILRVNTEITKAPLSASMIKRYDEHHQDLTLLKALVRQQLPEKYKEIFFDQSKNGYAGYIDGGASQEEFYKFIKPILEKMDGTEELLVKLNREDLLRKQRTFDNGSIPHQIHLGELHAILRRQEDFYPFLKDNREKIEKILTFRIPYYVGPLARGNSRFAWMTRKSEETITPWNFEEVVDKGASAQSFIERMTNFDKNLPNEKVLPKHSLLYEYFTVYNELTKVKYVTEGMRKPAFLSGEQKKAIVDLLFKTNRKVTVKQLKEDYFKKIECFDSVEISGVEDRFNASLGTYHDLLKIIKDKDFLDNEENEDILEDIVLTLTLFEDREMIEERLKTYAHLFDDKVMKQLKRRRYTGWGRLSRKLINGIRDKQSGKTILDFLKSDGFANRNFMQLIHDDSLTFKEDIQKAQVSGQGDSLHEHIANLAGSPAIKKGILQTVKVVDELVKVMGRHKPENIVIEMARENQTTQKGQKNSRERMKRIEEGIKELGSQILKEHPVENTQLQNEKLYLYYLQNGRDMYVDQELDINRLSDYDVDHIVPQSFLKDDSIDNKVLTRSDKARGKSDNVPSEEVVKKMKNYWRQLLNAKLITQRKFDNLTKAERGGLSELDKAGFIKRQLVETRQITKHVAQILDSRMNTKYDENDKLIREVKVITLKSKLVSDFRKDFQFYKVREINNYHHAHDAYLNAVVGTALIKKYPKLESEFVYGDYKVYDVRKMIAKSEQEIGKATAKYFFYSNIMNFFKTEITLANGEIRKRPLIETNGETGEIVWDKGRDFATVRKVLSMPQVNIVKKTEVQTGGFSKESILPKRNSDKLIARKKDWDPKKYGGFDSPTVAYSVLVVAKVEKGKSKKLKSVKELLGITIMERSSFEKNPIDFLEAKGYKEVKKDLIIKLPKYSLFELENGRKRMLASAGELQKGNELALPSKYVNFLYLASHYEKLKGSPEDNEQKQLFVEQHKHYLDEIIEQISEFSKRVILADANLDKVLSAYNKHRDKPIREQAENIIHLFTLTNLGAPAAFKYFDTTIDRKRYTSTKEVLDATLIHQSITGLYETRIDLSQLGGDGGGGSPAPGGGGGTLGDQGSRGSDPLPEPRVTLTVEGIPTEFLVNTGAEHSVLTKPMGKMGSKRTVVAGATGSKVYPWTTKRLLKIGQKQVTHSFLVIPECPAPLLGRDLLTKLKAQIQFSTEGPQVTWEDRPAMCLVLNLEEEYRLHEKPVPPSIDPSWLQLFPMVWAEKAGMGLANQVPPVVVELKSDASPVAVRQYPMSKEAREGIRPHIQRFLDLGILVPCQSPWNTPLLPVKKPGTNDYRPVQDLREVNKRVQDIHPTVPNPYNLLSSLPPSHTWYSVLDLKDAFFCLKLHPNSQPLFAFEWRDPEKGNTGQLTWTRLPQGFKNSPTLFNEALHRDLASFRALNPQVVMLQYVDDLLVAAPTYRDCKEGTRRLLQELSKLGYRVSAKKAQLCREEVTYLGYLLKGGKRWLTPARKATVMKIPTPTTPRQVREFLGTAGFCRLWIPGFASLAAPLYPLTRPKVPFTWTEAHQEAFGRIKEALLSAPALALPDLTKPFALYVDEKEGVARGVLTQTLGPWRRPVAYLSKKLDPVASGWPTCLKAIAAVALLLKDADKLTLGQNVLVIAPHNLESIVRQPPDRWMTNARMTHYQSLLLNERVSFAPPAILNPATLLPVESDDTPIHICSEILAEETGTRPDLRDQPLPGVPAWYTDGSSFIMDGRRQAGAAIVDNKRTVWASNLPEGTSAQKAELIALTQALRLAEGKSINIYTDSRYAFATAHVHGAIYKQRGWLTSAGKDIKNKEEILALLEAIHLPKRVAIIHCPGHQRGTDPVATGNRKADEAAKQAAQSTRILTETTKNAGKRTADGSEFEKRTADGSEFESPKKKAKVE

SEQ ID NO: 6990 - protein, 2088 aa, synthetic construct
MPAAKRVKLDGGDKKYSIGLDIGTNSVGWAVITDEYKVPSKKFKVLGNTDRHSIKKNLIGALLFDSGETAEATRLKRTARRRYTRRKNRICYLQEIFSNEMAKVDDSFFHRLEESFLVEEDKKHERHPIFGNIVDEVAYHEKYPTIYHLRKKLVDSTDKADLRLIYLALAHMIKFRGHFLIEGDLNPDNSDVDKLFIQLVQTYNQLFEENPINASGVDAKAILSARLSKSRRLENLIAQLPGEKKNGLFGNLIALSLGLTPNFKSNFDLAEDAKLQLSKDTYDDDLDNLLAQIGDQYADLFLAAKNLSDAILLSDILRVNTEITKAPLSASMIKRYDEHHQDLTLLKALVRQQLPEKYKEIFFDQSKNGYAGYIDGGASQEEFYKFIKPILEKMDGTEELLVKLNREDLLRKQRTFDNGSIPHQIHLGELHAILRRQEDFYPFLKDNREKIEKILTFRIPYYVGPLARGNSRFAWMTRKSEETITPWNFEEVVDKGASAQSFIERMTNFDKNLPNEKVLPKHSLLYEYFTVYNELTKVKYVTEGMRKPAFLSGEQKKAIVDLLFKTNRKVTVKQLKEDYFKKIECFDSVEISGVEDRFNASLGTYHDLLKIIKDKDFLDNEENEDILEDIVLTLTLFEDREMIEERLKTYAHLFDDKVMKQLKRRRYTGWGRLSRKLINGIRDKQSGKTILDFLKSDGFANRNFMQLIHDDSLTFKEDIQKAQVSGQGDSLHEHIANLAGSPAIKKGILQTVKVVDELVKVMGRHKPENIVIEMARENQTTQKGQKNSRERMKRIEEGIKELGSQILKEHPVENTQLQNEKLYLYYLQNGRDMYVDQELDINRLSDYDVDHIVPQSFLKDDSIDNKVLTRSDKARGKSDNVPSEEVVKKMKNYWRQLLNAKLITQRKFDNLTKAERGGLSELDKAGFIKRQLVETRQITKHVAQILDSRMNTKYDENDKLIREVKVITLKSKLVSDFRKDFQFYKVREINNYHHAHDAYLNAVVGTALIKKYPKLESEFVYGDYKVYDVRKMIAKSEQEIGKATAKYFFYSNIMNFFKTEITLANGEIRKRPLIETNGETGEIVWDKGRDFATVRKVLSMPQVNIVKKTEVQTGGFSKESILPKRNSDKLIARKKDWDPKKYGGFDSPTVAYSVLVVAKVEKGKSKKLKSVKELLGITIMERSSFEKNPIDFLEAKGYKEVKKDLIIKLPKYSLFELENGRKRMLASAGELQKGNELALPSKYVNFLYLASHYEKLKGSPEDNEQKQLFVEQHKHYLDEIIEQISEFSKRVILADANLDKVLSAYNKHRDKPIREQAENIIHLFTLTNLGAPAAFKYFDTTIDRKRYTSTKEVLDATLIHQSITGLYETRIDLSQLGGDGGGGSPAPGGGGGTLQLDDEYRLYSPLVKPDQNIQFWLEQFPQAWAETAGMGLAKQVPPQVIQLKASATPVSVRQYPLSKEAQEGIRPHVQRLIQQGILVPVQSPWNTPLLPVRKPGTNDYRPVQDLREVNKRVQDIHPTVPNPYNLLCALPPQRSWYTVLDLKDAFFCLRLHPTSQPLFAFEWRDPGTGRTGQLTWTRLPQGFKNSPTIFDEALHRDLANFRIQHPQVTLLQYVDDLLLAGATKQDCLEGTKALLLELSDLGYRASAKKAQICRREVTYLGYSLRDGQRWLTEARKKTVVQIPAPTTAKQVREFLGTAGFCRLWIPGFATLAAPLYPLTKEKGEFSWAPEHQKAFDAIKKALLSAPALALPDVTKPFTLYVDERKGVARGVLTQTLGPWRRPVAYLSKKLDPVASGWPVCLKAIAAVAILVKDADKLTLGQNITVIAPHALENIVRQPPDRWMTNARMTHYQSLLLTERVTFAPPAALNPATLLPEETDEPVTHDCHQLLIEETGVRKDLTDIPLTGEVLTWFTDGSSYVVEGKRMAGAAVVDGTRTIWASSLPEGTSAQKAELMALTQALRLAEGKSINIYTDSRYAFATAHVHGAIYKQRGLLTSAGREIKNKEEILSLLEALHLPKRLAIIHCPGHQKAKDPISRGNQMADRVAKQAAQGVNLLAGKRTADGSEFEKRTADGSEFESPKKKAKVE

SEQ ID NO: 6991 - protein, 2174 aa, synthetic construct
MPAAKRVKLDGGDKKYSIGLDIGTNSVGWAVITDEYKVPSKKFKVLGNTDRHSIKKNLIGALLFDSGETAEATRLKRTARRRYTRRKNRICYLQEIFSNEMAKVDDSFFHRLEESFLVEEDKKHERHPIFGNIVDEVAYHEKYPTIYHLRKKLVDSTDKADLRLIYLALAHMIKFRGHFLIEGDLNPDNSDVDKLFIQLVQTYNQLFEENPINASGVDAKAILSARLSKSRRLENLIAQLPGEKKNGLFGNLIALSLGLTPNFKSNFDLAEDAKLQLSKDTYDDDLDNLLAQIGDQYADLFLAAKNLSDAILLSDILRVNTEITKAPLSASMIKRYDEHHQDLTLLKALVRQQLPEKYKEIFFDQSKNGYAGYIDGGASQEEFYKFIKPILEKMDGTEELLVKLNREDLLRKQRTFDNGSIPHQIHLGELHAILRRQEDFYPFLKDNREKIEKILTFRIPYYVGPLARGNSRFAWMTRKSEETITPWNFEEVVDKGASAQSFIERMTNFDKNLPNEKVLPKHSLLYEYFTVYNELTKVKYVTEGMRKPAFLSGEQKKAIVDLLFKTNRKVTVKQLKEDYFKKIECFDSVEISGVEDRFNASLGTYHDLLKIIKDKDFLDNEENEDILEDIVLTLTLFEDREMIEERLKTYAHLFDDKVMKQLKRRRYTGWGRLSRKLINGIRDKQSGKTILDFLKSDGFANRNFMQLIHDDSLTFKEDIQKAQVSGQGDSLHEHIANLAGSPAIKKGILQTVKVVDELVKVMGRHKPENIVIEMARENQTTQKGQKNSRERMKRIEEGIKELGSQILKEHPVENTQLQNEKLYLYYLQNGRDMYVDQELDINRLSDYDVDHIVPQSFLKDDSIDNKVLTRSDKARGKSDNVPSEEVVKKMKNYWRQLLNAKLITQRKFDNLTKAERGGLSELDKAGFIKRQLVETRQITKHVAQILDSRMNTKYDENDKLIREVKVITLKSKLVSDFRKDFQFYKVREINNYHHAHDAYLNAVVGTALIKKYPKLESEFVYGDYKVYDVRKMIAKSEQEIGKATAKYFFYSNIMNFFKTEITLANGEIRKRPLIETNGETGEIVWDKGRDFATVRKVLSMPQVNIVKKTEVQTGGFSKESILPKRNSDKLIARKKDWDPKKYGGFDSPTVAYSVLVVAKVEKGKSKKLKSVKELLGITIMERSSFEKNPIDFLEAKGYKEVKKDLIIKLPKYSLFELENGRKRMLASAGELQKGNELALPSKYVNFLYLASHYEKLKGSPEDNEQKQLFVEQHKHYLDEIIEQISEFSKRVILADANLDKVLSAYNKHRDKPIREQAENIIHLFTLTNLGAPAAFKYFDTTIDRKRYTSTKEVLDATLIHQSITGLYETRIDLSQLGGDGGGGSPAPGGGGGMDPLQLLQPLEAEIKGTKLKAHWNSGATITCVPEAFLEDERPIQTMLIKTIHGEKQQDVYYLTFKVQGRKVEAEVLASPYDYILLNPSDVPWLMKKPLQLTVLVPLHEYQERLLQQTALPKEQKELLQKLFLKYDALWQHWENQVGHRRIKPHNIATGTLAPRPQKQYPINPKAKPSIQIVIDDLLKQGVLIQQNSTMNTPVYPVPKPDGKWRMVLDYREVNKTIPLIAAQNQHSAGILSSIYRGKYKTTLDLTNGFWAHPITPESYWLTAFTWQGKQYCWTRLPQGFLNSPALFNADVVDLLKEIPNVQAYVDDIYISHDDPQEHLEQLEKIFSILLNAGYVVSLKKSEIAQREVEFLGFNITKEGRGLTDTFKQKLLNITPPKDLKQLQSILGLLNFARNFIPNYSELVKPLYTIVAPANGKFISWTEDNSNQLQHIISVLNQADNLEERNPETRLIIKVNSSPSAGYIRYYNEGSKRPIMYVNYIFSKAEAKFTQTEKLLTTMHKGLIKAMDLAMGQEILVYSPIVSMTKIQRTPLPERKALPVRWITWMTYLEDPRIQFHYDKSLPELQQIPNVTEDVIAKTKHPSEFAMVFYTDGSAIKHPDVNKSHSAGMGIAQVQFIPEYKIVHQWSIPLGDHTAQLAEIAAVEFACKKALKISGPVLIVTDSFYVAESANKELPYWKSNGFLNNKKKPLRHVSKWKSIAECLQLKPDIIIMHEKGHQQPMTTLHTEGNNLADKLATQGSYVVHAGKRTADGSEFEKRTADGSEFESPKKKAKVE

SEQ ID NO: 6992 - protein, 2092 aa, synthetic construct
MPAAKRVKLDGGDKKYSIGLDIGTNSVGWAVITDEYKVPSKKFKVLGNTDRHSIKKNLIGALLFDSGETAEATRLKRTARRRYTRRKNRICYLQEIFSNEMAKVDDSFFHRLEESFLVEEDKKHERHPIFGNIVDEVAYHEKYPTIYHLRKKLVDSTDKADLRLIYLALAHMIKFRGHFLIEGDLNPDNSDVDKLFIQLVQTYNQLFEENPINASGVDAKAILSARLSKSRRLENLIAQLPGEKKNGLFGNLIALSLGLTPNFKSNFDLAEDAKLQLSKDTYDDDLDNLLAQIGDQYADLFLAAKNLSDAILLSDILRVNTEITKAPLSASMIKRYDEHHQDLTLLKALVRQQLPEKYKEIFFDQSKNGYAGYIDGGASQEEFYKFIKPILEKMDGTEELLVKLNREDLLRKQRTFDNGSIPHQIHLGELHAILRRQEDFYPFLKDNREKIEKILTFRIPYYVGPLARGNSRFAWMTRKSEETITPWNFEEVVDKGASAQSFIERMTNFDKNLPNEKVLPKHSLLYEYFTVYNELTKVKYVTEGMRKPAFLSGEQKKAIVDLLFKTNRKVTVKQLKEDYFKKIECFDSVEISGVEDRFNASLGTYHDLLKIIKDKDFLDNEENEDILEDIVLTLTLFEDREMIEERLKTYAHLFDDKVMKQLKRRRYTGWGRLSRKLINGIRDKQSGKTILDFLKSDGFANRNFMQLIHDDSLTFKEDIQKAQVSGQGDSLHEHIANLAGSPAIKKGILQTVKVVDELVKVMGRHKPENIVIEMARENQTTQKGQKNSRERMKRIEEGIKELGSQILKEHPVENTQLQNEKLYLYYLQNGRDMYVDQELDINRLSDYDVDHIVPQSFLKDDSIDNKVLTRSDKARGKSDNVPSEEVVKKMKNYWRQLLNAKLITQRKFDNLTKAERGGLSELDKAGFIKRQLVETRQITKHVAQILDSRMNTKYDENDKLIREVKVITLKSKLVSDFRKDFQFYKVREINNYHHAHDAYLNAVVGTALIKKYPKLESEFVYGDYKVYDVRKMIAKSEQEIGKATAKYFFYSNIMNFFKTEITLANGEIRKRPLIETNGETGEIVWDKGRDFATVRKVLSMPQVNIVKKTEVQTGGFSKESILPKRNSDKLIARKKDWDPKKYGGFDSPTVAYSVLVVAKVEKGKSKKLKSVKELLGITIMERSSFEKNPIDFLEAKGYKEVKKDLIIKLPKYSLFELENGRKRMLASAGELQKGNELALPSKYVNFLYLASHYEKLKGSPEDNEQKQLFVEQHKHYLDEIIEQISEFSKRVILADANLDKVLSAYNKHRDKPIREQAENIIHLFTLTNLGAPAAFKYFDTTIDRKRYTSTKEVLDATLIHQSITGLYETRIDLSQLGGDGGGGSPAPGGGGGVLNLEEEYRLHEKPVPSSIDPSWLQLFPTVWAERAGMGLANQVPPVVVELRSGASPVAVRQYPMSKEAREGIRPHIQRFLDLGVLVPCQSPWNTPLLPVKKPGTNDYRPVQDLREINKRVQDIHPTVPNPYNLLSSLPPSHTWYSVLDLKDAFFCLKLHPNSQPLFAFEWRDPEKGNTGQLTWTRLPQGFKNSPTLFDEALHRDLAPFRALNPQVVLLQYVDDLLVAAPTYRDCKEGTQKLLQELSKLGYRVSAKKAQLCQKEVTYLGYLLKEGKRWLTPARKATVMKIPPPTTPRQVREFLGTAGFCRLWIPGFASLAAPLYPLTKESIPFIWTEEHQKAFDRIKEALLSAPALALPDLTKPFTLYVDERAGVARGVLTQTLGPWRRPVAYLSKKLDPVASGWPTCLKAVAAVALLLKDADKLTLGQNVTVIASHSLESIVRQPPDRWMTNARMTHYQSLLLNERVSFAPPAVLNPATLLPVESEATPVHRCSEILAEETGTRRDLKDQPLPGVPAWYTDGSSFIAEGKRRAGAAIVDGKRTVWASSLPEGTSAQKAELVALTQALRLAEGKDINIYTDSRYAFATAHIHGAIYKQRGLLTSAGKDIKNKEEILALLEAIHLPKRVAIIHCPGHQKGNDPVATGNRRADEAAKQAALSTRVLAETTKPAGKRTADGSEFEKRTADGSEFESPKKKAKVE

SEQ ID NO: 6993 - protein, 2100 aa, synthetic construct
MPAAKRVKLDGGDKKYSIGLDIGTNSVGWAVITDEYKVPSKKFKVLGNTDRHSIKKNLIGALLFDSGETAEATRLKRTARRRYTRRKNRICYLQEIFSNEMAKVDDSFFHRLEESFLVEEDKKHERHPIFGNIVDEVAYHEKYPTIYHLRKKLVDSTDKADLRLIYLALAHMIKFRGHFLIEGDLNPDNSDVDKLFIQLVQTYNQLFEENPINASGVDAKAILSARLSKSRRLENLIAQLPGEKKNGLFGNLIALSLGLTPNFKSNFDLAEDAKLQLSKDTYDDDLDNLLAQIGDQYADLFLAAKNLSDAILLSDILRVNTEITKAPLSASMIKRYDEHHQDLTLLKALVRQQLPEKYKEIFFDQSKNGYAGYIDGGASQEEFYKFIKPILEKMDGTEELLVKLNREDLLRKQRTFDNGSIPHQIHLGELHAILRRQEDFYPFLKDNREKIEKILTFRIPYYVGPLARGNSRFAWMTRKSEETITPWNFEEVVDKGASAQSFIERMTNFDKNLPNEKVLPKHSLLYEYFTVYNELTKVKYVTEGMRKPAFLSGEQKKAIVDLLFKTNRKVTVKQLKEDYFKKIECFDSVEISGVEDRFNASLGTYHDLLKIIKDKDFLDNEENEDILEDIVLTLTLFEDREMIEERLKTYAHLFDDKVMKQLKRRRYTGWGRLSRKLINGIRDKQSGKTILDFLKSDGFANRNFMQLIHDDSLTFKEDIQKAQVSGQGDSLHEHIANLAGSPAIKKGILQTVKVVDELVKVMGRHKPENIVIEMARENQTTQKGQKNSRERMKRIEEGIKELGSQILKEHPVENTQLQNEKLYLYYLQNGRDMYVDQELDINRLSDYDVDHIVPQSFLKDDSIDNKVLTRSDKARGKSDNVPSEEVVKKMKNYWRQLLNAKLITQRKFDNLTKAERGGLSELDKAGFIKRQLVETRQITKHVAQILDSRMNTKYDENDKLIREVKVITLKSKLVSDFRKDFQFYKVREINNYHHAHDAYLNAVVGTALIKKYPKLESEFVYGDYKVYDVRKMIAKSEQEIGKATAKYFFYSNIMNFFKTEITLANGEIRKRPLIETNGETGEIVWDKGRDFATVRKVLSMPQVNIVKKTEVQTGGFSKESILPKRNSDKLIARKKDWDPKKYGGFDSPTVAYSVLVVAKVEKGKSKKLKSVKELLGITIMERSSFEKNPIDFLEAKGYKEVKKDLIIKLPKYSLFELENGRKRMLASAGELQKGNELALPSKYVNFLYLASHYEKLKGSPEDNEQKQLFVEQHKHYLDEIIEQISEFSKRVILADANLDKVLSAYNKHRDKPIREQAENIIHLFTLTNLGAPAAFKYFDTTIDRKRYTSTKEVLDATLIHQSITGLYETRIDLSQLGGDGGGGGGGSPAPGGTVSLQDEHRLFDIPVTTSLPDVWLQDFPQAWAETGGLGRAKCQAPIIIDLKPTAVPVSIKQYPMSLEAHMGIRQHIIKFLELGVLRPCRSPWNTPLLPVKKPGTQDYRPVQDLREINKRTVDIHPTVPNPYNLLSTLKPDYSWYTVLDLKDAFFCLPLAPQSQELFAFEWKDPERGISGQLTWTRLPQGFKNSPTLFNEALHRDLTDFRTQHPEVTLLQYVDDLLLAAPTKKACTQGTRHLLQELGEKGYRASAKKAQICQTKVTYLGYILSEGKRWLTPGRIETVARIPPPRNPREVREFLGTAGFCRLWIPGFAELAAPLYALTKPSTPFTWQTEHQLAFEALKKALLSAPALGLPDTSKPFTLFLDERQGIAKGVLTQKLGPWKRPVAYLSKKLDPVAAGWPPCLRIMAATAMLVKDSAKLTLGQPLTVITPHTLEAIVRQPPDRWITNARLTHYQALLLDTDRVQFGPPVTLNPATLLPVPENQPSPHDCRQVLAETHGTREDLKDQELPDADHTWYTDGSSYLDSGTRRAGAAVVDGHNTIWAQSLPPGTSAQKAELIALTKALELSKGKKANIYTDSRYAFATAHTHGSIYERRGWLTSEGKEIKNKAEIIALLKALFLPQEVAIIHCPGHQKGQDPVAVGNRQADRVARQAAMAEVLTLATEPDNTSHITAGKRTADGSEFEKRTADGSEFESPKKKAKVE

SEQ ID NO: 6994 - protein, 2171 aa, synthetic construct
MPAAKRVKLDGGDKKYSIGLDIGTNSVGWAVITDEYKVPSKKFKVLGNTDRHSIKKNLIGALLFDSGETAEATRLKRTARRRYTRRKNRICYLQEIFSNEMAKVDDSFFHRLEESFLVEEDKKHERHPIFGNIVDEVAYHEKYPTIYHLRKKLVDSTDKADLRLIYLALAHMIKFRGHFLIEGDLNPDNSDVDKLFIQLVQTYNQLFEENPINASGVDAKAILSARLSKSRRLENLIAQLPGEKKNGLFGNLIALSLGLTPNFKSNFDLAEDAKLQLSKDTYDDDLDNLLAQIGDQYADLFLAAKNLSDAILLSDILRVNTEITKAPLSASMIKRYDEHHQDLTLLKALVRQQLPEKYKEIFFDQSKNGYAGYIDGGASQEEFYKFIKPILEKMDGTEELLVKLNREDLLRKQRTFDNGSIPHQIHLGELHAILRRQEDFYPFLKDNREKIEKILTFRIPYYVGPLARGNSRFAWMTRKSEETITPWNFEEVVDKGASAQSFIERMTNFDKNLPNEKVLPKHSLLYEYFTVYNELTKVKYVTEGMRKPAFLSGEQKKAIVDLLFKTNRKVTVKQLKEDYFKKIECFDSVEISGVEDRFNASLGTYHDLLKIIKDKDFLDNEENEDILEDIVLTLTLFEDREMIEERLKTYAHLFDDKVMKQLKRRRYTGWGRLSRKLINGIRDKQSGKTILDFLKSDGFANRNFMQLIHDDSLTFKEDIQKAQVSGQGDSLHEHIANLAGSPAIKKGILQTVKVVDELVKVMGRHKPENIVIEMARENQTTQKGQKNSRERMKRIEEGIKELGSQILKEHPVENTQLQNEKLYLYYLQNGRDMYVDQELDINRLSDYDVDHIVPQSFLKDDSIDNKVLTRSDKARGKSDNVPSEEVVKKMKNYWRQLLNAKLITQRKFDNLTKAERGGLSELDKAGFIKRQLVETRQITKHVAQILDSRMNTKYDENDKLIREVKVITLKSKLVSDFRKDFQFYKVREINNYHHAHDAYLNAVVGTALIKKYPKLESEFVYGDYKVYDVRKMIAKSEQEIGKATAKYFFYSNIMNFFKTEITLANGEIRKRPLIETNGETGEIVWDKGRDFATVRKVLSMPQVNIVKKTEVQTGGFSKESILPKRNSDKLIARKKDWDPKKYGGFDSPTVAYSVLVVAKVEKGKSKKLKSVKELLGITIMERSSFEKNPIDFLEAKGYKEVKKDLIIKLPKYSLFELENGRKRMLASAGELQKGNELALPSKYVNFLYLASHYEKLKGSPEDNEQKQLFVEQHKHYLDEIIEQISEFSKRVILADANLDKVLSAYNKHRDKPIREQAENIIHLFTLTNLGAPAAFKYFDTTIDRKRYTSTKEVLDATLIHQSITGLYETRIDLSQLGGDGGGGGGGSPAPGGMDLLKPLTVERKGVKIKGYWNSQADITCVPKDLLQGEEPVRQQNVTTIHGTQEGDVYYVNLKIDGRRINTEVIGTTLDYAIITPGDVPWILKKPLELTIKLDLEEQQGTLLNNSILSKKGKEELKQLFEKYSALWQSWENQVGHRRIRPHKIATGTVKPTPQKQYHINPKAKPDIQIVINDLLKQGVLIQKESTMNTPVYPVPKPNGRWRMVLDYRAVNKVTPLIAVQNQHSYGILGSLFKGRYKTTIDLSNGFWAHPIVPEDYWITAFTWQGKQYCWTVLPQGFLNSPGLFTGDVVDLLQGIPNVEVYVDDVYISHDSEKEHLEYLDILFNRLKEAGYIISLKKSNIANSIVDFLGFQITNEGRGLTDTFKEKLENITAPTTLKQLQSILGLLNFARNFIPDFTELIAPLYALIPKSTKNYVPWQIEHSTTLETLITKLNGAEYLQGRKGDKTLIMKVNASYTTGYIRYYNEGEKKPISYVSIVFSKTELKFTELEKLLTTVHKGLLKALDLSMGQNIHVYSPIVSMQNIQKTPQTAKKALASRWLSWLSYLEDPRIRFFYDPQMPALKDLPAVDTGKDNKKHPSNFQHIFYTDGSAITSPTKEGHLNAGMGIVYFINKDGNLQKQQEWSISLGNHTAQFAEIAAFEFALKKCLPLGGNILVVTDSNYVAKAYNEELDVWASNGFVNNRKKPLKHISKWKSVADLKRLRPDVVVTHEPGHQKLDSSPHAYGNNLADQLATQASFKVHAGKRTADGSEFEKRTADGSEFESPKKKAKVE

SEQ ID NO: 6995 - protein, 2093 aa, synthetic construct
MPAAKRVKLDGGDKKYSIGLDIGTNSVGWAVITDEYKVPSKKFKVLGNTDRHSIKKNLIGALLFDSGETAEATRLKRTARRRYTRRKNRICYLQEIFSNEMAKVDDSFFHRLEESFLVEEDKKHERHPIFGNIVDEVAYHEKYPTIYHLRKKLVDSTDKADLRLIYLALAHMIKFRGHFLIEGDLNPDNSDVDKLFIQLVQTYNQLFEENPINASGVDAKAILSARLSKSRRLENLIAQLPGEKKNGLFGNLIALSLGLTPNFKSNFDLAEDAKLQLSKDTYDDDLDNLLAQIGDQYADLFLAAKNLSDAILLSDILRVNTEITKAPLSASMIKRYDEHHQDLTLLKALVRQQLPEKYKEIFFDQSKNGYAGYIDGGASQEEFYKFIKPILEKMDGTEELLVKLNREDLLRKQRTFDNGSIPHQIHLGELHAILRRQEDFYPFLKDNREKIEKILTFRIPYYVGPLARGNSRFAWMTRKSEETITPWNFEEVVDKGASAQSFIERMTNFDKNLPNEKVLPKHSLLYEYFTVYNELTKVKYVTEGMRKPAFLSGEQKKAIVDLLFKTNRKVTVKQLKEDYFKKIECFDSVEISGVEDRFNASLGTYHDLLKIIKDKDFLDNEENEDILEDIVLTLTLFEDREMIEERLKTYAHLFDDKVMKQLKRRRYTGWGRLSRKLINGIRDKQSGKTILDFLKSDGFANRNFMQLIHDDSLTFKEDIQKAQVSGQGDSLHEHIANLAGSPAIKKGILQTVKVVDELVKVMGRHKPENIVIEMARENQTTQKGQKNSRERMKRIEEGIKELGSQILKEHPVENTQLQNEKLYLYYLQNGRDMYVDQELDINRLSDYDVDHIVPQSFLKDDSIDNKVLTRSDKARGKSDNVPSEEVVKKMKNYWRQLLNAKLITQRKFDNLTKAERGGLSELDKAGFIKRQLVETRQITKHVAQILDSRMNTKYDENDKLIREVKVITLKSKLVSDFRKDFQFYKVREINNYHHAHDAYLNAVVGTALIKKYPKLESEFVYGDYKVYDVRKMIAKSEQEIGKATAKYFFYSNIMNFFKTEITLANGEIRKRPLIETNGETGEIVWDKGRDFATVRKVLSMPQVNIVKKTEVQTGGFSKESILPKRNSDKLIARKKDWDPKKYGGFDSPTVAYSVLVVAKVEKGKSKKLKSVKELLGITIMERSSFEKNPIDFLEAKGYKEVKKDLIIKLPKYSLFELENGRKRMLASAGELQKGNELALPSKYVNFLYLASHYEKLKGSPEDNEQKQLFVEQHKHYLDEIIEQISEFSKRVILADANLDKVLSAYNKHRDKPIREQAENIIHLFTLTNLGAPAAFKYFDTTIDRKRYTSTKEVLDATLIHQSITGLYETRIDLSQLGGDGGGGGGGSPAPGGTLQLEEEYRLFEPESTQKQEMDIWLKNFPQAWAETGGMGTAHCQAPVLIQLKATATPISIRQYPMPHEAYQGIKPHIRRMLDQGILKPCQSPWNTPLLPVKKPGTEDYRPVQDLREVNKRVEDIHPTVPNPYNLLSTLPPSHPWYTVLDLKDAFFCLRLHSESQLLFAFEWRDPEIGLSGQLTWTRLPQGFKNSPTLFDEALHSDLADFRVRYPALVLLQYVDDLLLAAATRTECLEGTKALLETLGNKGYRASAKKAQICLQEVTYLGYSLKDGQRWLTKARKEAILSIPVPKNSRQVREFLGTAGYCRLWIPGFAELAAPLYPLTRPGTLFQWGTEQQLAFEDIKKALLSSPALGLPDITKPFELFIDENSGFAKGVLVQKLGPWKRPVAYLSKKLDTVASGWPPCLRMVAAIAILVKDAGKLTLGQPLTILTSHPVEALVRQPPNKWLSNARMTHYQAMLLDAERVHFGPTVSLNPATLLPLPSGGNHHDCLQILAETHGTRPDLTDQPLPDADLTWYTDGSSFIRNGEREAGAAVTTESEVIWAAPLPPGTSAQRAELIALTQALKMAEGKKLTVYTDSRYAFATTHVHGEIYRRRGLLTSEGKEIKNKNEILALLEALFLPKRLSIIHCPGHQKGDSPQAKGNRLADDTAKKAATETHSSLTVLPAGKRTADGSEFEKRTADGSEFESPKKKAKVE

SEQ ID NO: 6996 - protein, 2085 aa, synthetic construct
MPAAKRVKLDGGDKKYSIGLDIGTNSVGWAVITDEYKVPSKKFKVLGNTDRHSIKKNLIGALLFDSGETAEATRLKRTARRRYTRRKNRICYLQEIFSNEMAKVDDSFFHRLEESFLVEEDKKHERHPIFGNIVDEVAYHEKYPTIYHLRKKLVDSTDKADLRLIYLALAHMIKFRGHFLIEGDLNPDNSDVDKLFIQLVQTYNQLFEENPINASGVDAKAILSARLSKSRRLENLIAQLPGEKKNGLFGNLIALSLGLTPNFKSNFDLAEDAKLQLSKDTYDDDLDNLLAQIGDQYADLFLAAKNLSDAILLSDILRVNTEITKAPLSASMIKRYDEHHQDLTLLKALVRQQLPEKYKEIFFDQSKNGYAGYIDGGASQEEFYKFIKPILEKMDGTEELLVKLNREDLLRKQRTFDNGSIPHQIHLGELHAILRRQEDFYPFLKDNREKIEKILTFRIPYYVGPLARGNSRFAWMTRKSEETITPWNFEEVVDKGASAQSFIERMTNFDKNLPNEKVLPKHSLLYEYFTVYNELTKVKYVTEGMRKPAFLSGEQKKAIVDLLFKTNRKVTVKQLKEDYFKKIECFDSVEISGVEDRFNASLGTYHDLLKIIKDKDFLDNEENEDILEDIVLTLTLFEDREMIEERLKTYAHLFDDKVMKQLKRRRYTGWGRLSRKLINGIRDKQSGKTILDFLKSDGFANRNFMQLIHDDSLTFKEDIQKAQVSGQGDSLHEHIANLAGSPAIKKGILQTVKVVDELVKVMGRHKPENIVIEMARENQTTQKGQKNSRERMKRIEEGIKELGSQILKEHPVENTQLQNEKLYLYYLQNGRDMYVDQELDINRLSDYDVDHIVPQSFLKDDSIDNKVLTRSDKARGKSDNVPSEEVVKKMKNYWRQLLNAKLITQRKFDNLTKAERGGLSELDKAGFIKRQLVETRQITKHVAQILDSRMNTKYDENDKLIREVKVITLKSKLVSDFRKDFQFYKVREINNYHHAHDAYLNAVVGTALIKKYPKLESEFVYGDYKVYDVRKMIAKSEQEIGKATAKYFFYSNIMNFFKTEITLANGEIRKRPLIETNGETGEIVWDKGRDFATVRKVLSMPQVNIVKKTEVQTGGFSKESILPKRNSDKLIARKKDWDPKKYGGFDSPTVAYSVLVVAKVEKGKSKKLKSVKELLGITIMERSSFEKNPIDFLEAKGYKEVKKDLIIKLPKYSLFELENGRKRMLASAGELQKGNELALPSKYVNFLYLASHYEKLKGSPEDNEQKQLFVEQHKHYLDEIIEQISEFSKRVILADANLDKVLSAYNKHRDKPIREQAENIIHLFTLTNLGAPAAFKYFDTTIDRKRYTSTKEVLDATLIHQSITGLYETRIDLSQLGGDGGGGGGGSPAPGGVPWLTQQPLQLTILVPLQEYQEKILSKTALPEDQKQQLKTLFVKYDNLWQHWENQVGHRKIRPHNIATGDYPPRPQKQYPINPKAKPSIQIVIDDLLKQGVLTPQNSTMNTPVYPVPKPDGRWRMVLDYREVNKTIPLTAAQNQHSAGILATIVRQKYKTTLDLANGFWAHPITPESYWLTAFTWQGKQYCWTRLPQGFLNSPALFNADVVDLLKEIPNVQVYVDDIYLSHDDPKEHVQQLEKVFQILLQAGYVVSLKKSEIGQKTVEFLGFNITKEGRGLTDTFKTKLLNITPPKDLKQLQSILGLLNFARNFIPNFAELVQPLYNLIAPAKGKYIEWSEENTKQLNMVIEALNTASNLEERLPEQRLVIKVNTSPSAGYVRYYNETGKKPIMYLNYVFSKAELKFSMLEKLLTTMHKALIKAMDLAMGQEILVYSPIVSMTKIQKTPLPERKALPIRWITWMTYLEDPRIQFHYDKTLPELKHIPDVYTSSQSPVKHPSQYEGVFYTDGSAIKSPDPTKSNNAGMGIVHATYKPEYQVLNQWSIPLGNHTAQMAEIAAVEFACKKALKIPGPVLVITDSFYVAESANKELPYWKSNGFVNNKKKPLKHISKWKSIAECLSMKPDITIQHEKGISLQIPVFILKGNALADKLATQGSYVVNAGKRTADGSEFEKRTADGSEFESPKKKAKVE

SEQ ID NO: 6997 - protein, 2085 aa, synthetic construct
MPAAKRVKLDGGDKKYSIGLDIGTNSVGWAVITDEYKVPSKKFKVLGNTDRHSIKKNLIGALLFDSGETAEATRLKRTARRRYTRRKNRICYLQEIFSNEMAKVDDSFFHRLEESFLVEEDKKHERHPIFGNIVDEVAYHEKYPTIYHLRKKLVDSTDKADLRLIYLALAHMIKFRGHFLIEGDLNPDNSDVDKLFIQLVQTYNQLFEENPINASGVDAKAILSARLSKSRRLENLIAQLPGEKKNGLFGNLIALSLGLTPNFKSNFDLAEDAKLQLSKDTYDDDLDNLLAQIGDQYADLFLAAKNLSDAILLSDILRVNTEITKAPLSASMIKRYDEHHQDLTLLKALVRQQLPEKYKEIFFDQSKNGYAGYIDGGASQEEFYKFIKPILEKMDGTEELLVKLNREDLLRKQRTFDNGSIPHQIHLGELHAILRRQEDFYPFLKDNREKIEKILTFRIPYYVGPLARGNSRFAWMTRKSEETITPWNFEEVVDKGASAQSFIERMTNFDKNLPNEKVLPKHSLLYEYFTVYNELTKVKYVTEGMRKPAFLSGEQKKAIVDLLFKTNRKVTVKQLKEDYFKKIECFDSVEISGVEDRFNASLGTYHDLLKIIKDKDFLDNEENEDILEDIVLTLTLFEDREMIEERLKTYAHLFDDKVMKQLKRRRYTGWGRLSRKLINGIRDKQSGKTILDFLKSDGFANRNFMQLIHDDSLTFKEDIQKAQVSGQGDSLHEHIANLAGSPAIKKGILQTVKVVDELVKVMGRHKPENIVIEMARENQTTQKGQKNSRERMKRIEEGIKELGSQILKEHPVENTQLQNEKLYLYYLQNGRDMYVDQELDINRLSDYDVDHIVPQSFLKDDSIDNKVLTRSDKARGKSDNVPSEEVVKKMKNYWRQLLNAKLITQRKFDNLTKAERGGLSELDKAGFIKRQLVETRQITKHVAQILDSRMNTKYDENDKLIREVKVITLKSKLVSDFRKDFQFYKVREINNYHHAHDAYLNAVVGTALIKKYPKLESEFVYGDYKVYDVRKMIAKSEQEIGKATAKYFFYSNIMNFFKTEITLANGEIRKRPLIETNGETGEIVWDKGRDFATVRKVLSMPQVNIVKKTEVQTGGFSKESILPKRNSDKLIARKKDWDPKKYGGFDSPTVAYSVLVVAKVEKGKSKKLKSVKELLGITIMERSSFEKNPIDFLEAKGYKEVKKDLIIKLPKYSLFELENGRKRMLASAGELQKGNELALPSKYVNFLYLASHYEKLKGSPEDNEQKQLFVEQHKHYLDEIIEQISEFSKRVILADANLDKVLSAYNKHRDKPIREQAENIIHLFTLTNLGAPAAFKYFDTTIDRKRYTSTKEVLDATLIHQSITGLYETRIDLSQLGGDGGGGGGGSPAPGGVPWLTQQPLQLTILVPLQEYQEKILSKTALPEDQKQQLKTLFVKYDNLWQHWENQVGHRKIRPHNIATGDYPPRPQKQYPINPKAKPSIQIVIDDLLKQGVLTPQNSTMNTPVYPVPKPDGRWRMVLDYREVNKTIPLTAAQNQHSAGILATIVRQKYKTTLDLANGFWAHPITPESYWLTAFTWQGKQYCWTRLPQGFLNSPALFNADVVDLLKEIPNVQVYVDDIYLSHDDPKEHVQQLEKVFQILLQAGYVVSLKKSEIGQKTVEFLGFNITKEGRGLTDTFKTKLLNITPPKDLKQLQSILGKLNFARNFIPNFAELVQPLYNLIAPAKGKYIEWSEENTKQLNMVIEALNTASNLEERLPEQRLVIKVNTSPSAGYVRYYNETGKKPIMYLNYVFSKAELKFSMLEKLLTTMHKALIKAMDLAMGQEILVYSPIVSMTKIQKTPLPERKALPIRWITWMTYLEDPRIQFHYDKTLPELKHIPDVYTSSQSPVKHPSQYEGVFYTDGSAIKSPDPTKSNNAGMGIVHATYKPEYQVLNQWSIPLGNHTAQMAEIAAVEFACKKALKIPGPVLVITDSFYVAESANKELPYWKSNGFVNNKKKPLKHISKWKSIAECLSMKPDITIQHEKGISLQIPVFILKGNALADKLATQGSYVVNAGKRTADGSEFEKRTADGSEFESPKKKAKVE

SEQ ID NO: 6998 - protein, 2094 aa, synthetic construct; identical to SEQ ID NO: 4520

SEQ ID NO: 6999 - protein, 2094 aa, synthetic construct
MPAAKRVKLDGGDKKYSIGLDIGTNSVGWAVITDEYKVPSKKFKVLGNTDRHSIKKNLIGALLFDSGETAEATRLKRTARRRYTRRKNRICYLQEIFSNEMAKVDDSFFHRLEESFLVEEDKKHERHPIFGNIVDEVAYHEKYPTIYHLRKKLVDSTDKADLRLIYLALAHMIKFRGHFLIEGDLNPDNSDVDKLFIQLVQTYNQLFEENPINASGVDAKAILSARLSKSRRLENLIAQLPGEKKNGLFGNLIALSLGLTPNFKSNFDLAEDAKLQLSKDTYDDDLDNLLAQIGDQYADLFLAAKNLSDAILLSDILRVNTEITKAPLSASMIKRYDEHHQDLTLLKALVRQQLPEKYKEIFFDQSKNGYAGYIDGGASQEEFYKFIKPILEKMDGTEELLVKLNREDLLRKQRTFDNGSIPHQIHLGELHAILRRQEDFYPFLKDNREKIEKILTFRIPYYVGPLARGNSRFAWMTRKSEETITPWNFEEVVDKGASAQSFIERMTNFDKNLPNEKVLPKHSLLYEYFTVYNELTKVKYVTEGMRKPAFLSGEQKKAIVDLLFKTNRKVTVKQLKEDYFKKIECFDSVEISGVEDRFNASLGTYHDLLKIIKDKDFLDNEENEDILEDIVLTLTLFEDREMIEERLKTYAHLFDDKVMKQLKRRRYTGWGRLSRKLINGIRDKQSGKTILDFLKSDGFANRNFMQLIHDDSLTFKEDIQKAQVSGQGDSLHEHIANLAGSPAIKKGILQTVKVVDELVKVMGRHKPENIVIEMARENQTTQKGQKNSRERMKRIEEGIKELGSQILKEHPVENTQLQNEKLYLYYLQNGRDMYVDQELDINRLSDYDVDHIVPQSFLKDDSIDNKVLTRSDKARGKSDNVPSEEVVKKMKNYWRQLLNAKLITQRKFDNLTKAERGGLSELDKAGFIKRQLVETRQITKHVAQILDSRMNTKYDENDKLIREVKVITLKSKLVSDFRKDFQFYKVREINNYHHAHDAYLNAVVGTALIKKYPKLESEFVYGDYKVYDVRKMIAKSEQEIGKATAKYFFYSNIMNFFKTEITLANGEIRKRPLIETNGETGEIVWDKGRDFATVRKVLSMPQVNIVKKTEVQTGGFSKESILPKRNSDKLIARKKDWDPKKYGGFDSPTVAYSVLVVAKVEKGKSKKLKSVKELLGITIMERSSFEKNPIDFLEAKGYKEVKKDLIIKLPKYSLFELENGRKRMLASAGELQKGNELALPSKYVNFLYLASHYEKLKGSPEDNEQKQLFVEQHKHYLDEIIEQISEFSKRVILADANLDKVLSAYNKHRDKPIREQAENIIHLFTLTNLGAPAAFKYFDTTIDRKRYTSTKEVLDATLIHQSITGLYETRIDLSQLGGDGGGGGGGSPAPGGTLGIEDEYRLHETSTEPDVSLGSTWLSDFPQAWAETGGMGLAVRQAPLIIPLKATSTPVSIQQYPMSHEARLGIKPHIQRLLDQGILVPCQSPWNTPLLPVKKPGTNDYRPVQDLREVNKRVEDIHPTVPNPYNLLSGLPPSHQWYTVLDLKDAFFCLRLHPTSQPLFAFEWRDPGMGISGQLTWTRLPQGFKNSPTLFNEALHRDLADFRIQHPDLILLQYVDDILLAATSELDCQQGTRALLQTLGDLGYRASAKKAQICQKQVKYLGYLLREGQRWLTEARKETVMGQPVPKTPRQLREFLGTAGFCRLWIPGFAEMAAPLYPLTKPGTLFSWGPDQQKAYQEIKQALLTAPALGLPDLTKPFELFVDEKQGYAKGVLTQKLGPWRRPVAYLSKKLDPVAAGWPPCLRMVAAIAVLTKDAGKLTMGQPLVILAPHAVEALVKQPPDRWLSNARMTHYQAMLLDTDRVQFGPVVALNPATLLPLPEEGAPHDCLEILAETHGTRPDLTDQPIPDADHTWYTDGSSFLQEGQRKAGAAVTTETEVIWAGALPAGTSAQRAELIALTQALKMAEGKRLNVYTDSRYAFATAHIHGEIYRRRGWLTSEGREIKNKSEILALLKALFLPKRLSIIHCLGHQKGDSAEARGNRLADQAAREAAIKTPPDTSTLLAGKRTADGSEFEKRTADGSEFESPKKKAKVE

SEQ ID NO: 7000 - protein, 2094 aa, synthetic construct
MPAAKRVKLDGGDKKYSIGLDIGTNSVGWAVITDEYKVPSKKFKVLGNTDRHSIKKNLIGALLFDSGETAEATRLKRTARRRYTRRKNRICYLQEIFSNEMAKVDDSFFHRLEESFLVEEDKKHERHPIFGNIVDEVAYHEKYPTIYHLRKKLVDSTDKADLRLIYLALAHMIKFRGHFLIEGDLNPDNSDVDKLFIQLVQTYNQLFEENPINASGVDAKAILSARLSKSRRLENLIAQLPGEKKNGLFGNLIALSLGLTPNFKSNFDLAEDAKLQLSKDTYDDDLDNLLAQIGDQYADLFLAAKNLSDAILLSDILRVNTEITKAPLSASMIKRYDEHHQDLTLLKALVRQQLPEKYKEIFFDQSKNGYAGYIDGGASQEEFYKFIKPILEKMDGTEELLVKLNREDLLRKQRTFDNGSIPHQIHLGELHAILRRQEDFYPFLKDNREKIEKILTFRIPYYVGPLARGNSRFAWMTRKSEETITPWNFEEVVDKGASAQSFIERMTNFDKNLPNEKVLPKHSLLYEYFTVYNELTKVKYVTEGMRKPAFLSGEQKKAIVDLLFKTNRKVTVKQLKEDYFKKIECFDSVEISGVEDRFNASLGTYHDLLKIIKDKDFLDNEENEDILEDIVLTLTLFEDREMIEERLKTYAHLFDDKVMKQLKRRRYTGWGRLSRKLINGIRDKQSGKTILDFLKSDGFANRNFMQLIHDDSLTFKEDIQKAQVSGQGDSLHEHIANLAGSPAIKKGILQTVKVVDELVKVMGRHKPENIVIEMARENQTTQKGQKNSRERMKRIEEGIKELGSQILKEHPVENTQLQNEKLYLYYLQNGRDMYVDQELDINRLSDYDVDHIVPQSFLKDDSIDNKVLTRSDKARGKSDNVPSEEVVKKMKNYWRQLLNAKLITQRKFDNLTKAERGGLSELDKAGFIKRQLVETRQITKHVAQILDSRMNTKYDENDKLIREVKVITLKSKLVSDFRKDFQFYKVREINNYHHAHDAYLNAVVGTALIKKYPKLESEFVYGDYKVYDVRKMIAKSEQEIGKATAKYFFYSNIMNFFKTEITLANGEIRKRPLIETNGETGEIVWDKGRDFATVRKVLSMPQVNIVKKTEVQTGGFSKESILPKRNSDKLIARKKDWDPKKYGGFDSPTVAYSVLVVAKVEKGKSKKLKSVKELLGITIMERSSFEKNPIDFLEAKGYKEVKKDLIIKLPKYSLFELENGRKRMLASAGELQKGNELALPSKYVNFLYLASHYEKLKGSPEDNEQKQLFVEQHKHYLDEIIEQISEFSKRVILADANLDKVLSAYNKHRDKPIREQAENIIHLFTLTNLGAPAAFKYFDTTIDRKRYTSTKEVLDATLIHQSITGLYETRIDLSQLGGDGGGGGGGSPAPGGTLNIEDEYRLHETSKEPDVSLGSTWLSDFPQAWAETGGMGLAVRQAPLIIPLKATSTPVSIKQYPMSQEARLGIKPHIQRLLDQGILVPCQSPWNTPLLPVKKPGTNDYRPVQDLREVNKRVEDIHPTVPNPYNLLSGLPPSHQWYTVLDLKDAFFCLRLHPTSQPLFAFEWRDPEMGISGQLTWTRLPQGFKNSPTLFDEALHRDLAGFRIQHPDLILLQYVDDLLLAATSELDCQQGTRALLQTLGDLGYRASAKKAQICQKQVKYLGYLLKEGQRWLTEARKETVMGQPIPKTPRQLREFLGTAGFCRLWIPGFAEMAAPLYPLTKTGTLFNWGPDQQKAFQEIKQALLTAPALGLPDLTKPFELFVDEKQGYAKGVLTQKLGPWRRPVAYLSKKLDPVAAGWPPCLRMVAAIAVLTKDAGKLTMGQPLVILAPHAVEALVKQPPDRWLSNARMTHYQALLLDTDRVQFGPVVALNPATLLPLPEEGLQHDCLDILAEAHGTRSDLMDQPLPDADHTWYTDGSSFLQEGQRKAGAAVTTETEVIWARALPAGTSAQRAELIALTQALKMAEGKKLNVYTDSRYAFATAHIHGEIYRRRGLLTSEGKEIKNKDEILALLKALFLPKRLSIIHCPGHQKGNSAEARGNRMADQAAREVATRETPETSTLLAGKRTADGSEFEKRTADGSEFESPKKKAKVE

SEQ ID NO: 7001 - protein, 2094 aa, synthetic construct
MPAAKRVKLDGGDKKYSIGLDIGTNSVGWAVITDEYKVPSKKFKVLGNTDRHSIKKNLIGALLFDSGETAEATRLKRTARRRYTRRKNRICYLQEIFSNEMAKVDDSFFHRLEESFLVEEDKKHERHPIFGNIVDEVAYHEKYPTIYHLRKKLVDSTDKADLRLIYLALAHMIKFRGHFLIEGDLNPDNSDVDKLFIQLVQTYNQLFEENPINASGVDAKAILSARLSKSRRLENLIAQLPGEKKNGLFGNLIALSLGLTPNFKSNFDLAEDAKLQLSKDTYDDDLDNLLAQIGDQYADLFLAAKNLSDAILLSDILRVNTEITKAPLSASMIKRYDEHHQDLTLLKALVRQQLPEKYKEIFFDQSKNGYAGYIDGGASQEEFYKFIKPILEKMDGTEELLVKLNREDLLRKQRTFDNGSIPHQIHLGELHAILRRQEDFYPFLKDNREKIEKILTFRIPYYVGPLARGNSRFAWMTRKSEETITPWNFEEVVDKGASAQSFIERMTNFDKNLPNEKVLPKHSLLYEYFTVYNELTKVKYVTEGMRKPAFLSGEQKKAIVDLLFKTNRKVTVKQLKEDYFKKIECFDSVEISGVEDRFNASLGTYHDLLKIIKDKDFLDNEENEDILEDIVLTLTLFEDREMIEERLKTYAHLFDDKVMKQLKRRRYTGWGRLSRKLINGIRDKQSGKTILDFLKSDGFANRNFMQLIHDDSLTFKEDIQKAQVSGQGDSLHEHIANLAGSPAIKKGILQTVKVVDELVKVMGRHKPENIVIEMARENQTTQKGQKNSRERMKRIEEGIKELGSQILKEHPVENTQLQNEKLYLYYLQNGRDMYVDQELDINRLSDYDVDHIVPQSFLKDDSIDNKVLTRSDKARGKSDNVPSEEVVKKMKNYWRQLLNAKLITQRKFDNLTKAERGGLSELDKAGFIKRQLVETRQITKHVAQILDSRMNTKYDENDKLIREVKVITLKSKLVSDFRKDFQFYKVREINNYHHAHDAYLNAVVGTALIKKYPKLESEFVYGDYKVYDVRKMIAKSEQEIGKATAKYFFYSNIMNFFKTEITLANGEIRKRPLIETNGETGEIVWDKGRDFATVRKVLSMPQVNIVKKTEVQTGGFSKESILPKRNSDKLIARKKDWDPKKYGGFDSPTVAYSVLVVAKVEKGKSKKLKSVKELLGITIMERSSFEKNPIDFLEAKGYKEVKKDLIIKLPKYSLFELENGRKRMLASAGELQKGNELALPSKYVNFLYLASHYEKLKGSPEDNEQKQLFVEQHKHYLDEIIEQISEFSKRVILADANLDKVLSAYNKHRDKPIREQAENIIHLFTLTNLGAPAAFKYFDTTIDRKRYTSTKEVLDATLIHQSITGLYETRIDLSQLGGDGGGGGGGSPAPGGTLNIEDEYRLHETSKEPDVSLGSTWLSDFPQAWAETGGMGLAVRQAPLIIPLKATSTPVSIKQYPMSQEARLGIKPHIQRLLDQGILVPCQSPWNTPLLPVKKPGTNDYRPVQDLREVNKRVEDIHPTVPNPYNLLSGLPPSHQWYTVLDLKDAFFCLRLHPTSQPLFAFEWRDPEMGISGQLTWTRLPQGFKNSPTLFNEALHRDLAGFRIQHPDLILLQYVDDLLLAATSELDCQQGTRALLQTLGDLGYRASAKKAQICQKQVKYLGYLLKEGQRWLTEARKETVMGQPIPKTPRQLREFLGTAGFCRLWIPGFAEMAAPLYPLTKPGTLFNWGPDQQKAFQEIKQALLTAPALGLPDLTKPFELFVDEKQGYAKGVLTQKLGPWRRPVAYLSKKLDPVAAGWPPCLRMVAAIAVLTKDAGKLTMGQPLVILAPHAVEALVKQPPDRWLSNARMTHYQALLLDTDRVQFGPVVALNPATLLPLPEEGLQHDCLDILAEAHGTRSDLMDQPLPDADHTWYTDGSSFLQEGQRKAGAAVTTETEVIWARALPAGTSAQRAELIALTQALKMAEGKKLNVYTDSRYAFATAHIHGEIYRRRGWLTSEGKEIKNKDEILALLKALFLPKRLSIIHCPGHQKGNSAEARGNRMADQAAREVATRETPETSTLLAGKRTADGSEFEKRTADGSEFESPKKKAKVE

SEQ ID NO: 7002 - protein, 2114 aa, synthetic construct
MPAAKRVKLDGGDKKYSIGLDIGTNSVGWAVITDEYKVPSKKFKVLGNTDRHSIKKNLIGALLFDSGETAEATRLKRTARRRYTRRKNRICYLQEIFSNEMAKVDDSFFHRLEESFLVEEDKKHERHPIFGNIVDEVAYHEKYPTIYHLRKKLVDSTDKADLRLIYLALAHMIKFRGHFLIEGDLNPDNSDVDKLFIQLVQTYNQLFEENPINASGVDAKAILSARLSKSRRLENLIAQLPGEKKNGLFGNLIALSLGLTPNFKSNFDLAEDAKLQLSKDTYDDDLDNLLAQIGDQYADLFLAAKNLSDAILLSDILRVNTEITKAPLSASMIKRYDEHHQDLTLLKALVRQQLPEKYKEIFFDQSKNGYAGYIDGGASQEEFYKFIKPILEKMDGTEELLVKLNREDLLRKQRTFDNGSIPHQIHLGELHAILRRQEDFYPFLKDNREKIEKILTFRIPYYVGPLARGNSRFAWMTRKSEETITPWNFEEVVDKGASAQSFIERMTNFDKNLPNEKVLPKHSLLYEYFTVYNELTKVKYVTEGMRKPAFLSGEQKKAIVDLLFKTNRKVTVKQLKEDYFKKIECFDSVEISGVEDRFNASLGTYHDLLKIIKDKDFLDNEENEDILEDIVLTLTLFEDREMIEERLKTYAHLFDDKVMKQLKRRRYTGWGRLSRKLINGIRDKQSGKTILDFLKSDGFANRNFMQLIHDDSLTFKEDIQKAQVSGQGDSLHEHIANLAGSPAIKKGILQTVKVVDELVKVMGRHKPENIVIEMARENQTTQKGQKNSRERMKRIEEGIKELGSQILKEHPVENTQLQNEKLYLYYLQNGRDMYVDQELDINRLSDYDVDHIVPQSFLKDDSIDNKVLTRSDKARGKSDNVPSEEVVKKMKNYWRQLLNAKLITQRKFDNLTKAERGGLSELDKAGFIKRQLVETRQITKHVAQILDSRMNTKYDENDKLIREVKVITLKSKLVSDFRKDFQFYKVREINNYHHAHDAYLNAVVGTALIKKYPKLESEFVYGDYKVYDVRKMIAKSEQEIGKATAKYFFYSNIMNFFKTEITLANGEIRKRPLIETNGETGEIVWDKGRDFATVRKVLSMPQVNIVKKTEVQTGGFSKESILPKRNSDKLIARKKDWDPKKYGGFDSPTVAYSVLVVAKVEKGKSKKLKSVKELLGITIMERSSFEKNPIDFLEAKGYKEVKKDLIIKLPKYSLFELENGRKRMLASAGELQKGNELALPSKYVNFLYLASHYEKLKGSPEDNEQKQLFVEQHKHYLDEIIEQISEFSKRVILADANLDKVLSAYNKHRDKPIREQAENIIHLFTLTNLGAPAAFKYFDTTIDRKRYTSTKEVLDATLIHQSITGLYETRIDLSQLGGDGGGGGGGSPAPGGVQEISDSRPMLHIYLNGRRFLGLLDTGADKTCIAGRDWPANWPIHQTESSLQGLGMACGVARSSQPLRWQHEDKSGIIHPFVIPTLPFTLWGRDIMKDIKVRLMTDSPDDSQDLMIGAIESNLFADQISWKSDQPVWLNQWPLKQEKLQALQQLVTEQLQLGHLEESNSPWNTPVFVIKKKSGKWRLLQDLRAVNATMHDMGALQPGLPSPVAVPKGWEIIIIDLQDCFFNIKLHPEDCKRFAFSVPSPNFKRPYQRFQWKVLPQGMKNSPTLCQKFVDKAILTVRDKYQDSYIVHYMDDILLAHPSRSIVDEILTSMIQALNKHGLVVSTEKIQKYDNLKYLGTHIQGDSVSYQKLQIRTDKLRTLNDFQKLLGNINWIRPFLKLTTGELKPLFEILNGDSNPISTRKLTPEACKALQLMNERLSTARVKRLDLSQPWSLCILKTEYTPTACLWQDGVVEWIHLPHISPKVITPYDIFCTQLIIKGRHRSKELFSKDPDYIVVPYTKVQFDLLLQEKEDWPISLLGFLGEVHFHLPKDPLLTFTLQTAIIFPHMTSTTPLEKGIVIFTDGSANGRSVTYIQGREPIIKENTQNTAQQAEIVAVITAFEEVSQPFNLYTDSKYVTGLFPEIETATLSPRTKIYTELKHLQRLIHKRQEKFYIGHIRGHTGLPGPLAQGNAYADSLTRILTAAGKRTADGSEFEKRTADGSEFESPKKKAKVE

SEQ ID NO: 7003 - protein, 2088 aa, synthetic construct
MPAAKRVKLDGGDKKYSIGLDIGTNSVGWAVITDEYKVPSKKFKVLGNTDRHSIKKNLIGALLFDSGETAEATRLKRTARRRYTRRKNRICYLQEIFSNEMAKVDDSFFHRLEESFLVEEDKKHERHPIFGNIVDEVAYHEKYPTIYHLRKKLVDSTDKADLRLIYLALAHMIKFRGHFLIEGDLNPDNSDVDKLFIQLVQTYNQLFEENPINASGVDAKAILSARLSKSRRLENLIAQLPGEKKNGLFGNLIALSLGLTPNFKSNFDLAEDAKLQLSKDTYDDDLDNLLAQIGDQYADLFLAAKNLSDAILLSDILRVNTEITKAPLSASMIKRYDEHHQDLTLLKALVRQQLPEKYKEIFFDQSKNGYAGYIDGGASQEEFYKFIKPILEKMDGTEELLVKLNREDLLRKQRTFDNGSIPHQIHLGELHAILRRQEDFYPFLKDNREKIEKILTFRIPYYVGPLARGNSRFAWMTRKSEETITPWNFEEVVDKGASAQSFIERMTNFDKNLPNEKVLPKHSLLYEYFTVYNELTKVKYVTEGMRKPAFLSGEQKKAIVDLLFKTNRKVTVKQLKEDYFKKIECFDSVEISGVEDRFNASLGTYHDLLKIIKDKDFLDNEENEDILEDIVLTLTLFEDREMIEERLKTYAHLFDDKVMKQLKRRRYTGWGRLSRKLINGIRDKQSGKTILDFLKSDGFANRNFMQLIHDDSLTFKEDIQKAQVSGQGDSLHEHIANLAGSPAIKKGILQTVKVVDELVKVMGRHKPENIVIEMARENQTTQKGQKNSRERMKRIEEGIKELGSQILKEHPVENTQLQNEKLYLYYLQNGRDMYVDQELDINRLSDYDVDHIVPQSFLKDDSIDNKVLTRSDKARGKSDNVPSEEVVKKMKNYWRQLLNAKLITQRKFDNLTKAERGGLSELDKAGFIKRQLVETRQITKHVAQILDSRMNTKYDENDKLIREVKVITLKSKLVSDFRKDFQFYKVREINNYHHAHDAYLNAVVGTALIKKYPKLESEFVYGDYKVYDVRKMIAKSEQEIGKATAKYFFYSNIMNFFKTEITLANGEIRKRPLIETNGETGEIVWDKGRDFATVRKVLSMPQVNIVKKTEVQTGGFSKESILPKRNSDKLIARKKDWDPKKYGGFDSPTVAYSVLVVAKVEKGKSKKLKSVKELLGITIMERSSFEKNPIDFLEAKGYKEVKKDLIIKLPKYSLFELENGRKRMLASAGELQKGNELALPSKYVNFLYLASHYEKLKGSPEDNEQKQLFVEQHKHYLDEIIEQISEFSKRVILADANLDKVLSAYNKHRDKPIREQAENIIHLFTLTNLGAPAAFKYFDTTIDRKRYTSTKEVLDATLIHQSITGLYETRIDLSQLGGDGGGGGGGSPAPGGTLQLDDEYRLYSPLVKPDQNIQFWLEQFPQAWAETAGMGLAKQVPPQVIQLKASATPVSVRQYPLSKEAQEGIRPHVQRLIQQGILVPVQSPWNTPLLPVRKPGTNDYRPVQDLREVNKRVQDIHPTVPNPYNLLCALPPQRSWYTVLDLKDAFFCLRLHPTSQPLFAFEWRDPGTGRTGQLTWTRLPQGFKNSPTIFDEALHRDLANFRIQHPQVTLLQYVDDLLLAGATKQDCLEGTKALLLELSDLGYRASAKKAQICRREVTYLGYSLRDGQRWLTEARKKTVVQIPAPTTAKQVREFLGTAGFCRLWIPGFATLAAPLYPLTKEKGEFSWAPEHQKAFDAIKKALLSAPALALPDVTKPFTLYVDERKGVARGVLTQTLGPWRRPVAYLSKKLDPVASGWPVCLKAIAAVAILVKDADKLTLGQNITVIAPHALENIVRQPPDRWMTNARMTHYQSLLLTERVTFAPPAALNPATLLPEETDEPVTHDCHQLLIEETGVRKDLTDIPLTGEVLTWFTDGSSYVVEGKRMAGAAVVDGTRTIWASSLPEGTSAQKAELMALTQALRLAEGKSINIYTDSRYAFATAHVHGAIYKQRGLLTSAGREIKNKEEILSLLEALHLPKRLAIIHCPGHQKAKDPISRGNQMADRVAKQAAQGVNLLAGKRTADGSEFEKRTADGSEFESPKKKAKVE

SEQ ID NO: 7004 - protein, 2174 aa, synthetic construct
MPAAKRVKLDGGDKKYSIGLDIGTNSVGWAVITDEYKVPSKKFKVLGNTDRHSIKKNLIGALLFDSGETAEATRLKRTARRRYTRRKNRICYLQEIFSNEMAKVDDSFFHRLEESFLVEEDKKHERHPIFGNIVDEVAYHEKYPTIYHLRKKLVDSTDKADLRLIYLALAHMIKFRGHFLIEGDLNPDNSDVDKLFIQLVQTYNQLFEENPINASGVDAKAILSARLSKSRRLENLIAQLPGEKKNGLFGNLIALSLGLTPNFKSNFDLAEDAKLQLSKDTYDDDLDNLLAQIGDQYADLFLAAKNLSDAILLSDILRVNTEITKAPLSASMIKRYDEHHQDLTLLKALVRQQLPEKYKEIFFDQSKNGYAGYIDGGASQEEFYKFIKPILEKMDGTEELLVKLNREDLLRKQRTFDNGSIPHQIHLGELHAILRRQEDFYPFLKDNREKIEKILTFRIPYYVGPLARGNSRFAWMTRKSEETITPWNFEEVVDKGASAQSFIERMTNFDKNLPNEKVLPKHSLLYEYFTVYNELTKVKYVTEGMRKPAFLSGEQKKAIVDLLFKTNRKVTVKQLKEDYFKKIECFDSVEISGVEDRFNASLGTYHDLLKIIKDKDFLDNEENEDILEDIVLTLTLFEDREMIEERLKTYAHLFDDKVMKQLKRRRYTGWGRLSRKLINGIRDKQSGKTILDFLKSDGFANRNFMQLIHDDSLTFKEDIQKAQVSGQGDSLHEHIANLAGSPAIKKGILQTVKVVDELVKVMGRHKPENIVIEMARENQTTQKGQKNSRERMKRIEEGIKELGSQILKEHPVENTQLQNEKLYLYYLQNGRDMYVDQELDINRLSDYDVDHIVPQSFLKDDSIDNKVLTRSDKARGKSDNVPSEEVVKKMKNYWRQLLNAKLITQRKFDNLTKAERGGLSELDKAGFIKRQLVETRQITKHVAQILDSRMNTKYDENDKLIREVKVITLKSKLVSDFRKDFQFYKVREINNYHHAHDAYLNAVVGTALIKKYPKLESEFVYGDYKVYDVRKMIAKSEQEIGKATAKYFFYSNIMNFFKTEITLANGEIRKRPLIETNGETGEIVWDKGRDFATVRKVLSMPQVNIVKKTEVQTGGFSKESILPKRNSDKLIARKKDWDPKKYGGFDSPTVAYSVLVVAKVEKGKSKKLKSVKELLGITIMERSSFEKNPIDFLEAKGYKEVKKDLIIKLPKYSLFELENGRKRMLASAGELQKGNELALPSKYVNFLYLASHYEKLKGSPEDNEQKQLFVEQHKHYLDEIIEQISEFSKRVILADANLDKVLSAYNKHRDKPIREQAENIIHLFTLTNLGAPAAFKYFDTTIDRKRYTSTKEVLDATLIHQSITGLYETRIDLSQLGGDGGGGGGGSPAPGGMDPLQLLQPLEAEIKGTKLKAHWNSGATITCVPEAFLEDERPIQTMLIKTIHGEKQQDVYYLTFKVQGRKVEAEVLASPYDYILLNPSDVPWLMKKPLQLTVLVPLHEYQERLLQQTALPKEQKELLQKLFLKYDALWQHWENQVGHRRIKPHNIATGTLAPRPQKQYPINPKAKPSIQIVIDDLLKQGVLIQQNSTMNTPVYPVPKPDGKWRMVLDYREVNKTIPLIAAQNQHSAGILSSIYRGKYKTTLDLTNGFWAHPITPESYWLTAFTWQGKQYCWTRLPQGFLNSPALFNADVVDLLKEIPNVQAYVDDIYISHDDPQEHLEQLEKIFSILLNAGYVVSLKKSEIAQREVEFLGFNITKEGRGLTDTFKQKLLNITPPKDLKQLQSILGLLNFARNFIPNYSELVKPLYTIVAPANGKFISWTEDNSNQLQHIISVLNQADNLEERNPETRLIIKVNSSPSAGYIRYYNEGSKRPIMYVNYIFSKAEAKFTQTEKLLTTMHKGLIKAMDLAMGQEILVYSPIVSMTKIQRTPLPERKALPVRWITWMTYLEDPRIQFHYDKSLPELQQIPNVTEDVIAKTKHPSEFAMVFYTDGSAIKHPDVNKSHSAGMGIAQVQFIPEYKIVHQWSIPLGDHTAQLAEIAAVEFACKKALKISGPVLIVTDSFYVAESANKELPYWKSNGFLNNKKKPLRHVSKWKSIAECLQLKPDIIIMHEKGHQQPMTTLHTEGNNLADKLATQGSYVVHAGKRTADGSEFEKRTADGSEFESPKKKAKVE

SEQ ID NO: 7005 - protein, 2085 aa, synthetic construct
MPAAKRVKLDGGDKKYSIGLDIGTNSVGWAVITDEYKVPSKKFKVLGNTDRHSIKKNLIGALLFDSGETAEATRLKRTARRRYTRRKNRICYLQEIFSNEMAKVDDSFFHRLEESFLVEEDKKHERHPIFGNIVDEVAYHEKYPTIYHLRKKLVDSTDKADLRLIYLALAHMIKFRGHFLIEGDLNPDNSDVDKLFIQLVQTYNQLFEENPINASGVDAKAILSARLSKSRRLENLIAQLPGEKKNGLFGNLIALSLGLTPNFKSNFDLAEDAKLQLSKDTYDDDLDNLLAQIGDQYADLFLAAKNLSDAILLSDILRVNTEITKAPLSASMIKRYDEHHQDLTLLKALVRQQLPEKYKEIFFDQSKNGYAGYIDGGASQEEFYKFIKPILEKMDGTEELLVKLNREDLLRKQRTFDNGSIPHQIHLGELHAILRRQEDFYPFLKDNREKIEKILTFRIPYYVGPLARGNSRFAWMTRKSEETITPWNFEEVVDKGASAQSFIERMTNFDKNLPNEKVLPKHSLLYEYFTVYNELTKVKYVTEGMRKPAFLSGEQKKAIVDLLFKTNRKVTVKQLKEDYFKKIECFDSVEISGVEDRFNASLGTYHDLLKIIKDKDFLDNEENEDILEDIVLTLTLFEDREMIEERLKTYAHLFDDKVMKQLKRRRYTGWGRLSRKLINGIRDKQSGKTILDFLKSDGFANRNFMQLIHDDSLTFKEDIQKAQVSGQGDSLHEHIANLAGSPAIKKGILQTVKVVDELVKVMGRHKPENIVIEMARENQTTQKGQKNSRERMKRIEEGIKELGSQILKEHPVENTQLQNEKLYLYYLQNGRDMYVDQELDINRLSDYDVDHIVPQSFLKDDSIDNKVLTRSDKARGKSDNVPSEEVVKKMKNYWRQLLNAKLITQRKFDNLTKAERGGLSELDKAGFIKRQLVETRQITKHVAQILDSRMNTKYDENDKLIREVKVITLKSKLVSDFRKDFQFYKVREINNYHHAHDAYLNAVVGTALIKKYPKLESEFVYGDYKVYDVRKMIAKSEQEIGKATAKYFFYSNIMNFFKTEITLANGEIRKRPLIETNGETGEIVWDKGRDFATVRKVLSMPQVNIVKKTEVQTGGFSKESILPKRNSDKLIARKKDWDPKKYGGFDSPTVAYSVLVVAKVEKGKSKKLKSVKELLGITIMERSSFEKNPIDFLEAKGYKEVKKDLIIKLPKYSLFELENGRKRMLASAGELQKGNELALPSKYVNFLYLASHYEKLKGSPEDNEQKQLFVEQHKHYLDEIIEQISEFSKRVILADANLDKVLSAYNKHRDKPIREQAENIIHLFTLTNLGAPAAFKYFDTTIDRKRYTSTKEVLDATLIHQSITGLYETRIDLSQLGGDGGGGGGGSPAPGGIPWLMKKPLQLTTLVPLQEYEERLLKQTMLTGSYKEKLQSLFLKYDALWQHWENQVGHRRIKPHHIATGTVNPRPQKQYPINPKAKASIQTVINDLLKQGVLIQQNSIMNTPVYPVPKPDGKWRMVLDYREVNKTIPLIAAQNQHSAGILSSIFRGKYKTTLDLSNGFWAHSITPESYWLTAFTWLGQQYCWTRLPQGFLNSPALFNADVVDLLKEVPNVQVYVDDIYISHDDPREHLEQLEKVFSLLLNAGYVVSLKKSEIAQHEVEFLGFNITKEGRGLTETFKQKLLNITPPRDLKQLQSILGLLNFARNFIPNFSELVKPLYNIIATAPGKYITWTTDNSQQLQNIISMLNSAENLEERNPEVRLIMKVNTSPSAGYIRFYNEFAKRPIMYLNYVYTKAEVKFTNTEKLLTTIHKGLIKALDLGMGQEILVYSPIVSMTKIQKTPLPERKALPIRWITWMSYLEDPRIQFHYDKTLPELQQVPTVTDDIIAKIKHPSEFSMVFYTDGSAIKHPNVNKSHNAGMGIAQVQFKPEFTVINTWSIPLGDHTAQLAEVAAVEFACKKALKIDGPVLIVTDSFYVAESVNKELPYWQSNGFFNNKKKPLKHVSKWKSIADCIQLKPDIIIIHEKGHQPTASTFHTEGNNLADKLATQGSYVVNAGKRTADGSEFEKRTADGSEFESPKKKAKVE

SEQ ID NO: 7006 - protein, 2085 aa, synthetic construct
MPAAKRVKLDGGDKKYSIGLDIGTNSVGWAVITDEYKVPSKKFKVLGNTDRHSIKKNLIGALLFDSGETAEATRLKRTARRRYTRRKNRICYLQEIFSNEMAKVDDSFFHRLEESFLVEEDKKHERHPIFGNIVDEVAYHEKYPTIYHLRKKLVDSTDKADLRLIYLALAHMIKFRGHFLIEGDLNPDNSDVDKLFIQLVQTYNQLFEENPINASGVDAKAILSARLSKSRRLENLIAQLPGEKKNGLFGNLIALSLGLTPNFKSNFDLAEDAKLQLSKDTYDDDLDNLLAQIGDQYADLFLAAKNLSDAILLSDILRVNTEITKAPLSASMIKRYDEHHQDLTLLKALVRQQLPEKYKEIFFDQSKNGYAGYIDGGASQEEFYKFIKPILEKMDGTEELLVKLNREDLLRKQRTFDNGSIPHQIHLGELHAILRRQEDFYPFLKDNREKIEKILTFRIPYYVGPLARGNSRFAWMTRKSEETITPWNFEEVVDKGASAQSFIERMTNFDKNLPNEKVLPKHSLLYEYFTVYNELTKVKYVTEGMRKPAFLSGEQKKAIVDLLFKTNRKVTVKQLKEDYFKKIECFDSVEISGVEDRFNASLGTYHDLLKIIKDKDFLDNEENEDILEDIVLTLTLFEDREMIEERLKTYAHLFDDKVMKQLKRRRYTGWGRLSRKLINGIRDKQSGKTILDFLKSDGFANRNFMQLIHDDSLTFKEDIQKAQVSGQGDSLHEHIANLAGSPAIKKGILQTVKVVDELVKVMGRHKPENIVIEMARENQTTQKGQKNSRERMKRIEEGIKELGSQILKEHPVENTQLQNEKLYLYYLQNGRDMYVDQELDINRLSDYDVDHIVPQSFLKDDSIDNKVLTRSDKARGKSDNVPSEEVVKKMKNYWRQLLNAKLITQRKFDNLTKAERGGLSELDKAGFIKRQLVETRQITKHVAQILDSRMNTKYDENDKLIREVKVITLKSKLVSDFRKDFQFYKVREINNYHHAHDAYLNAVVGTALIKKYPKLESEFVYGDYKVYDVRKMIAKSEQEIGKATAKYFFYSNIMNFFKTEITLANGEIRKRPLIETNGETGEIVWDKGRDFATVRKVLSMPQVNIVKKTEVQTGGFSKESILPKRNSDKLIARKKDWDPKKYGGFDSPTVAYSVLVVAKVEKGKSKKLKSVKELLGITIMERSSFEKNPIDFLEAKGYKEVKKDLIIKLPKYSLFELENGRKRMLASAGELQKGNELALPSKYVNFLYLASHYEKLKGSPEDNEQKQLFVEQHKHYLDEIIEQISEFSKRVILADANLDKVLSAYNKHRDKPIREQAENIIHLFTLTNLGAPAAFKYFDTTIDRKRYTSTKEVLDATLIHQSITGLYETRIDLSQLGGDGGGGGGGSPAPGGIPWLMKKPLQLTTLVPLQEYEERLLKQTMLTGSYKEKLQSLFLKYDALWQHWENQVGHRRIKPHHIATGTVNPRPQKQYPINPKAKASIQTVINDLLKQGVLIQQNSIMNTPVYPVPKPDGKWRMVLDYREVNKTIPLIAAQNQHSAGILSSIFRGKYKTTLDLSNGFWAHSITPESYWLTAFTWLGQQYCWTRLPQGFLNSPALFNADVVDLLKEVPNVQVYVDDIYISHDDPREHLEQLEKVFSLLLNAGYVVSLKKSEIAQHEVEFLGFNITKEGRGLTETFKQKLLNITPPRDLKQLQSILGKLNFARNFIPNFSELVKPLYNIIATAPGKYITWTTDNSQQLQNIISMLNSAENLEERNPEVRLIMKVNTSPSAGYIRFYNEFAKRPIMYLNYVYTKAEVKFTNTEKLLTTIHKGLIKALDLGMGQEILVYSPIVSMTKIQKTPLPERKALPIRWITWMSYLEDPRIQFHYDKTLPELQQVPTVTDDIIAKIKHPSEFSMVFYTDGSAIKHPNVNKSHNAGMGIAQVQFKPEFTVINTWSIPLGDHTAQLAEVAAVEFACKKALKIDGPVLIVTDSFYVAESVNKELPYWQSNGFFNNKKKPLKHVSKWKSIADCIQLKPDIIIIHEKGHQPTASTFHTEGNNLADKLATQGSYVVNAGKRTADGSEFEKRTADGSEFESPKKKAKVE

SEQ ID NO: 7007 - protein, 2174 aa, synthetic construct
MPAAKRVKLDGGDKKYSIGLDIGTNSVGWAVITDEYKVPSKKFKVLGNTDRHSIKKNLIGALLFDSGETAEATRLKRTARRRYTRRKNRICYLQEIFSNEMAKVDDSFFHRLEESFLVEEDKKHERHPIFGNIVDEVAYHEKYPTIYHLRKKLVDSTDKADLRLIYLALAHMIKFRGHFLIEGDLNPDNSDVDKLFIQLVQTYNQLFEENPINASGVDAKAILSARLSKSRRLENLIAQLPGEKKNGLFGNLIALSLGLTPNFKSNFDLAEDAKLQLSKDTYDDDLDNLLAQIGDQYADLFLAAKNLSDAILLSDILRVNTEITKAPLSASMIKRYDEHHQDLTLLKALVRQQLPEKYKEIFFDQSKNGYAGYIDGGASQEEFYKFIKPILEKMDGTEELLVKLNREDLLRKQRTFDNGSIPHQIHLGELHAILRRQEDFYPFLKDNREKIEKILTFRIPYYVGPLARGNSRFAWMTRKSEETITPWNFEEVVDKGASAQSFIERMTNFDKNLPNEKVLPKHSLLYEYFTVYNELTKVKYVTEGMRKPAFLSGEQKKAIVDLLFKTNRKVTVKQLKEDYFKKIECFDSVEISGVEDRFNASLGTYHDLLKIIKDKDFLDNEENEDILEDIVLTLTLFEDREMIEERLKTYAHLFDDKVMKQLKRRRYTGWGRLSRKLINGIRDKQSGKTILDFLKSDGFANRNFMQLIHDDSLTFKEDIQKAQVSGQGDSLHEHIANLAGSPAIKKGILQTVKVVDELVKVMGRHKPENIVIEMARENQTTQKGQKNSRERMKRIEEGIKELGSQILKEHPVENTQLQNEKLYLYYLQNGRDMYVDQELDINRLSDYDVDHIVPQSFLKDDSIDNKVLTRSDKARGKSDNVPSEEVVKKMKNYWRQLLNAKLITQRKFDNLTKAERGGLSELDKAGFIKRQLVETRQITKHVAQILDSRMNTKYDENDKLIREVKVITLKSKLVSDFRKDFQFYKVREINNYHHAHDAYLNAVVGTALIKKYPKLESEFVYGDYKVYDVRKMIAKSEQEIGKATAKYFFYSNIMNFFKTEITLANGEIRKRPLIETNGETGEIVWDKGRDFATVRKVLSMPQVNIVKKTEVQTGGFSKESILPKRNSDKLIARKKDWDPKKYGGFDSPTVAYSVLVVAKVEKGKSKKLKSVKELLGITIMERSSFEKNPIDFLEAKGYKEVKKDLIIKLPKYSLFELENGRKRMLASAGELQKGNELALPSKYVNFLYLASHYEKLKGSPEDNEQKQLFVEQHKHYLDEIIEQISEFSKRVILADANLDKVLSAYNKHRDKPIREQAENIIHLFTLTNLGAPAAFKYFDTTIDRKRYTSTKEVLDATLIHQSITGLYETRIDLSQLGGDGGGGGGGSPAPGGMDPLQLLQPLEAEIKGTKLKAHWNSGATITCVPQAFLEEEVPIKNIWIKTIHGEKEQPVYYLTFKIQGRKVEAEVISSPYDYILVSPSDIPWLMKKPLQLTTLVPLQEYEERLLKQTMLTGSYKEKLQSLFLKYDALWQHWENQVGHRRIKPHHIATGTVNPRPQKQYPINPKAKASIQTVINDLLKQGVLIQQNSIMNTPVYPVPKPDGKWRMVLDYREVNKTIPLIAAQNQHSAGILSSIFRGKYKTTLDLSNGFWAHSITPESYWLTAFTWLGQQYCWTRLPQGFLNSPALFNADVVDLLKEVPNVQVYVDDIYISHDDPREHLEQLEKVFSLLLNAGYVVSLKKSEIAQHEVEFLGFNITKEGRGLTETFKQKLLNITPPRDLKQLQSILGKLNFARNFIPNFSELVKPLYNIIATAPGKYITWTTDNSQQLQNIISMLNSAENLEERNPEVRLIMKVNTSPSAGYIRFYNEFAKRPIMYLNYVYTKAEVKFTNTEKLLTTIHKGLIKALDLGMGQEILVYSPIVSMTKIQKTPLPERKALPIRWITWMSYLEDPRIQFHYDKTLPELQQVPTVTDDIIAKIKHPSEFSMVFYTDGSAIKHPNVNKSHNAGMGIAQVQFKPEFTVINTWSIPLGDHTAQLAEVAAVEFACKKALKIDGPVLIVTDSFYVAESVNKELPYWQSNGFFNNKKKPLKHVSKWKSIADCIQLKPDIIIIHEKGHQPTASTFHTEGNNLADKLATQGSYVVNAGKRTADGSEFEKRTADGSEFESPKKKAKVE

SEQ ID NO: 7008 - protein, 2092 aa, synthetic construct
MPAAKRVKLDGGDKKYSIGLDIGTNSVGWAVITDEYKVPSKKFKVLGNTDRHSIKKNLIGALLFDSGETAEATRLKRTARRRYTRRKNRICYLQEIFSNEMAKVDDSFFHRLEESFLVEEDKKHERHPIFGNIVDEVAYHEKYPTIYHLRKKLVDSTDKADLRLIYLALAHMIKFRGHFLIEGDLNPDNSDVDKLFIQLVQTYNQLFEENPINASGVDAKAILSARLSKSRRLENLIAQLPGEKKNGLFGNLIALSLGLTPNFKSNFDLAEDAKLQLSKDTYDDDLDNLLAQIGDQYADLFLAAKNLSDAILLSDILRVNTEITKAPLSASMIKRYDEHHQDLTLLKALVRQQLPEKYKEIFFDQSKNGYAGYIDGGASQEEFYKFIKPILEKMDGTEELLVKLNREDLLRKQRTFDNGSIPHQIHLGELHAILRRQEDFYPFLKDNREKIEKILTFRIPYYVGPLARGNSRFAWMTRKSEETITPWNFEEVVDKGASAQSFIERMTNFDKNLPNEKVLPKHSLLYEYFTVYNELTKVKYVTEGMRKPAFLSGEQKKAIVDLLFKTNRKVTVKQLKEDYFKKIECFDSVEISGVEDRFNASLGTYHDLLKIIKDKDFLDNEENEDILEDIVLTLTLFEDREMIEERLKTYAHLFDDKVMKQLKRRRYTGWGRLSRKLINGIRDKQSGKTILDFLKSDGFANRNFMQLIHDDSLTFKEDIQKAQVSGQGDSLHEHIANLAGSPAIKKGILQTVKVVDELVKVMGRHKPENIVIEMARENQTTQKGQKNSRERMKRIEEGIKELGSQILKEHPVENTQLQNEKLYLYYLQNGRDMYVDQELDINRLSDYDVDHIVPQSFLKDDSIDNKVLTRSDKARGKSDNVPSEEVVKKMKNYWRQLLNAKLITQRKFDNLTKAERGGLSELDKAGFIKRQLVETRQITKHVAQILDSRMNTKYDENDKLIREVKVITLKSKLVSDFRKDFQFYKVREINNYHHAHDAYLNAVVGTALIKKYPKLESEFVYGDYKVYDVRKMIAKSEQEIGKATAKYFFYSNIMNFFKTEITLANGEIRKRPLIETNGETGEIVWDKGRDFATVRKVLSMPQVNIVKKTEVQTGGFSKESILPKRNSDKLIARKKDWDPKKYGGFDSPTVAYSVLVVAKVEKGKSKKLKSVKELLGITIMERSSFEKNPIDFLEAKGYKEVKKDLIIKLPKYSLFELENGRKRMLASAGELQKGNELALPSKYVNFLYLASHYEKLKGSPEDNEQKQLFVEQHKHYLDEIIEQISEFSKRVILADANLDKVLSAYNKHRDKPIREQAENIIHLFTLTNLGAPAAFKYFDTTIDRKRYTSTKEVLDATLIHQSITGLYETRIDLSQLGGDGGGGGGGSPAPGGVLNLEEEYRLHEKPVPSSIDPSWLQLFPTVWAERAGMGLANQVPPVVVELRSGASPVAVRQYPMSKEAREGIRPHIQRFLDLGVLVPCQSPWNTPLLPVKKPGTNDYRPVQDLREINKRVQDIHPTVPNPYNLLSSLPPSHTWYSVLDLKDAFFCLKLHPNSQPLFAFEWRDPEKGNTGQLTWTRLPQGFKNSPTLFNEALHRDLAPFRALNPQVVLLQYVDDLLVAAPTYRDCKEGTQKLLQELSKLGYRVSAKKAQLCQKEVTYLGYLLKEGKRWLTPARKATVMKIPPPTTPRQVREFLGKAGFCRLFIPGFASLAAPLYPLTKPSIPFIWTEEHQKAFDRIKEALLSAPALALPDLTKPFTLYVDERAGVARGVLTQTLGPWRRPVAYLSKKLDPVASGWPTCLKAVAAVALLLKDADKLTLGQNVTVIASHSLESIVRQPPDRWMTNARMTHYQSLLLNERVSFAPPAVLNPATLLPVESEATPVHRCSEILAEETGTRRDLKDQPLPGVPAWYTDGSSFIAEGKRRAGAAIVDGKRTVWASSLPEGTSAQKAELVALTQALRLAEGKDINIYTDSRYAFATAHIHGAIYKQRGWLTSAGKDIKNKEEILALLEAIHLPKRVAIIHCPGHQKGNDPVATGNRRADEAAKQAALSTRVLAETTKPAGKRTADGSEFEKRTADGSEFESPKKKAKVE

SEQ ID NO: 7009 - protein, 2096 aa, synthetic construct
MPAAKRVKLDGGDKKYSIGLDIGTNSVGWAVITDEYKVPSKKFKVLGNTDRHSIKKNLIGALLFDSGETAEATRLKRTARRRYTRRKNRICYLQEIFSNEMAKVDDSFFHRLEESFLVEEDKKHERHPIFGNIVDEVAYHEKYPTIYHLRKKLVDSTDKADLRLIYLALAHMIKFRGHFLIEGDLNPDNSDVDKLFIQLVQTYNQLFEENPINASGVDAKAILSARLSKSRRLENLIAQLPGEKKNGLFGNLIALSLGLTPNFKSNFDLAEDAKLQLSKDTYDDDLDNLLAQIGDQYADLFLAAKNLSDAILLSDILRVNTEITKAPLSASMIKRYDEHHQDLTLLKALVRQQLPEKYKEIFFDQSKNGYAGYIDGGASQEEFYKFIKPILEKMDGTEELLVKLNREDLLRKQRTFDNGSIPHQIHLGELHAILRRQEDFYPFLKDNREKIEKILTFRIPYYVGPLARGNSRFAWMTRKSEETITPWNFEEVVDKGASAQSFIERMTNFDKNLPNEKVLPKHSLLYEYFTVYNELTKVKYVTEGMRKPAFLSGEQKKAIVDLLFKTNRKVTVKQLKEDYFKKIECFDSVEISGVEDRFNASLGTYHDLLKIIKDKDFLDNEENEDILEDIVLTLTLFEDREMIEERLKTYAHLFDDKVMKQLKRRRYTGWGRLSRKLINGIRDKQSGKTILDFLKSDGFANRNFMQLIHDDSLTFKEDIQKAQVSGQGDSLHEHIANLAGSPAIKKGILQTVKVVDELVKVMGRHKPENIVIEMARENQTTQKGQKNSRERMKRIEEGIKELGSQILKEHPVENTQLQNEKLYLYYLQNGRDMYVDQELDINRLSDYDVDHIVPQSFLKDDSIDNKVLTRSDKARGKSDNVPSEEVVKKMKNYWRQLLNAKLITQRKFDNLTKAERGGLSELDKAGFIKRQLVETRQITKHVAQILDSRMNTKYDENDKLIREVKVITLKSKLVSDFRKDFQFYKVREINNYHHAHDAYLNAVVGTALIKKYPKLESEFVYGDYKVYDVRKMIAKSEQEIGKATAKYFFYSNIMNFFKTEITLANGEIRKRPLIETNGETGEIVWDKGRDFATVRKVLSMPQVNIVKKTEVQTGGFSKESILPKRNSDKLIARKKDWDPKKYGGFDSPTVAYSVLVVAKVEKGKSKKLKSVKELLGITIMERSSFEKNPIDFLEAKGYKEVKKDLIIKLPKYSLFELENGRKRMLASAGELQKGNELALPSKYVNFLYLASHYEKLKGSPEDNEQKQLFVEQHKHYLDEIIEQISEFSKRVILADANLDKVLSAYNKHRDKPIREQAENIIHLFTLTNLGAPAAFKYFDTTIDRKRYTSTKEVLDATLIHQSITGLYETRIDLSQLGGDGGGGGPAPGGSGGTAPLEEEYRLFLEAPIQNVTLLEQWKREIPKVWAEINPPGLASTQAPIHVQLLSTALPVRVRQYPITLEAKRSLRETIRKFRAAGILRPVHSPWNTPLLPVRKSGTSEYRMVQDLREVNKRVETIHPTVPNPYTLLSLLPPDRIWYSVLDLKDAFFCIPLAPESQLIFAFEWADAEEGESGQLTWTRLPQGFKNSPTLFNEALNRDLQGFRLDHPSVSLLQYVDDLLIAADTQAACLSATRDLLMTLAELGYRVSGKKAQLCQEEVTYLGFKIHKGSRSLSNSRTQAILQIPVPKTKRQVREFLGTIGYCRLWIPGFAELAQPLYAATRPGNDPLVWGEKEEEAFQSLKLALTQPPALALPSLDKPFQLFVEETSGAAKGVLTQALGPWKRPVAYLSKRLDPVAAGWPRCLRAIAAAALLTREASKLTFGQDIEITSSHNLESLLRSPPDKWLTNARITQYQVLLLDPPRVRFKQTAALNPATLLPETDDTLPIHHCLDTLDSLTSTRPDLTDQPLAQAEATLFTDGSSYIRDGKRYAGAAVVTLDSVIWAEPLPIGTSAQKAELIALTKALEWSKDKSVNIYTDSRYAFATLHVHGMIYRERGWLTAGGKAIKNAPEILALLTAVWLPKRVAVMHCKGHQKDDAPTSTGNRRADEVAREVAIRPLSTQATISAGKRTADGSEFEKRTADGSEFESPKKKAKVE

SEQ ID NO: 7010 - protein, 2216 aa, synthetic construct
MPAAKRVKLDGGDKKYSIGLDIGTNSVGWAVITDEYKVPSKKFKVLGNTDRHSIKKNLIGALLFDSGETAEATRLKRTARRRYTRRKNRICYLQEIFSNEMAKVDDSFFHRLEESFLVEEDKKHERHPIFGNIVDEVAYHEKYPTIYHLRKKLVDSTDKADLRLIYLALAHMIKFRGHFLIEGDLNPDNSDVDKLFIQLVQTYNQLFEENPINASGVDAKAILSARLSKSRRLENLIAQLPGEKKNGLFGNLIALSLGLTPNFKSNFDLAEDAKLQLSKDTYDDDLDNLLAQIGDQYADLFLAAKNLSDAILLSDILRVNTEITKAPLSASMIKRYDEHHQDLTLLKALVRQQLPEKYKEIFFDQSKNGYAGYIDGGASQEEFYKFIKPILEKMDGTEELLVKLNREDLLRKQRTFDNGSIPHQIHLGELHAILRRQEDFYPFLKDNREKIEKILTFRIPYYVGPLARGNSRFAWMTRKSEETITPWNFEEVVDKGASAQSFIERMTNFDKNLPNEKVLPKHSLLYEYFTVYNELTKVKYVTEGMRKPAFLSGEQKKAIVDLLFKTNRKVTVKQLKEDYFKKIECFDSVEISGVEDRFNASLGTYHDLLKIIKDKDFLDNEENEDILEDIVLTLTLFEDREMIEERLKTYAHLFDDKVMKQLKRRRYTGWGRLSRKLINGIRDKQSGKTILDFLKSDGFANRNFMQLIHDDSLTFKEDIQKAQVSGQGDSLHEHIANLAGSPAIKKGILQTVKVVDELVKVMGRHKPENIVIEMARENQTTQKGQKNSRERMKRIEEGIKELGSQILKEHPVENTQLQNEKLYLYYLQNGRDMYVDQELDINRLSDYDVDHIVPQSFLKDDSIDNKVLTRSDKARGKSDNVPSEEVVKKMKNYWRQLLNAKLITQRKFDNLTKAERGGLSELDKAGFIKRQLVETRQITKHVAQILDSRMNTKYDENDKLIREVKVITLKSKLVSDFRKDFQFYKVREINNYHHAHDAYLNAVVGTALIKKYPKLESEFVYGDYKVYDVRKMIAKSEQEIGKATAKYFFYSNIMNFFKTEITLANGEIRKRPLIETNGETGEIVWDKGRDFATVRKVLSMPQVNIVKKTEVQTGGFSKESILPKRNSDKLIARKKDWDPKKYGGFDSPTVAYSVLVVAKVEKGKSKKLKSVKELLGITIMERSSFEKNPIDFLEAKGYKEVKKDLIIKLPKYSLFELENGRKRMLASAGELQKGNELALPSKYVNFLYLASHYEKLKGSPEDNEQKQLFVEQHKHYLDEIIEQISEFSKRVILADANLDKVLSAYNKHRDKPIREQAENIIHLFTLTNLGAPAAFKYFDTTIDRKRYTSTKEVLDATLIHQSITGLYETRIDLSQLGGDGGGGGPAPGGSGGTLGDQGSRGSDPLPEPRVTLTVEGIPTEFLVNTGAEHSVLTKPMGKMGSKRTVVAGATGSKVYPWTTKRLLKIGQKQVTHSFLVIPECPAPLLGRDLLTKLKAQIQFSTEGPQVTWEDRPAMCLVLNLEEEYRLHEKPVPPSIDPSWLQLFPMVWAEKAGMGLANQVPPVVVELKSDASPVAVRQYPMSKEAREGIRPHIQRFLDLGILVPCQSPWNTPLLPVKKPGTNDYRPVQDLREVNKRVQDIHPTVPNPYNLLSSLPPSHTWYSVLDLKDAFFCLKLHPNSQPLFAFEWRDPEKGNTGQLTWTRLPQGFKNSPTLFDEALHRDLASFRALNPQVVMLQYVDDLLVAAPTYRDCKEGTRRLLQELSKLGYRVSAKKAQLCREEVTYLGYLLKGGKRWLTPARKATVMKIPTPTTPRQVREFLGTAGFCRLWIPGFASLAAPLYPLTREKVPFTWTEAHQEAFGRIKEALLSAPALALPDLTKPFALYVDEKEGVARGVLTQTLGPWRRPVAYLSKKLDPVASGWPTCLKAIAAVALLLKDADKLTLGQNVLVIAPHNLESIVRQPPDRWMTNARMTHYQSLLLNERVSFAPPAILNPATLLPVESDDTPIHICSEILAEETGTRPDLRDQPLPGVPAWYTDGSSFIMDGRRQAGAAIVDNKRTVWASNLPEGTSAQKAELIALTQALRLAEGKSINIYTDSRYAFATAHVHGAIYKQRGLLTSAGKDIKNKEEILALLEAIHLPKRVAIIHCPGHQRGTDPVATGNRKADEAAKQAAQSTRILTETTKNAGKRTADGSEFEKRTADGSEFESPKKKAKVE

SEQ ID NO: 7011 - protein, 2125 aa, synthetic construct
MPAAKRVKLDGGDKKYSIGLDIGTNSVGWAVITDEYKVPSKKFKVLGNTDRHSIKKNLIGALLFDSGETAEATRLKRTARRRYTRRKNRICYLQEIFSNEMAKVDDSFFHRLEESFLVEEDKKHERHPIFGNIVDEVAYHEKYPTIYHLRKKLVDSTDKADLRLIYLALAHMIKFRGHFLIEGDLNPDNSDVDKLFIQLVQTYNQLFEENPINASGVDAKAILSARLSKSRRLENLIAQLPGEKKNGLFGNLIALSLGLTPNFKSNFDLAEDAKLQLSKDTYDDDLDNLLAQIGDQYADLFLAAKNLSDAILLSDILRVNTEITKAPLSASMIKRYDEHHQDLTLLKALVRQQLPEKYKEIFFDQSKNGYAGYIDGGASQEEFYKFIKPILEKMDGTEELLVKLNREDLLRKQRTFDNGSIPHQIHLGELHAILRRQEDFYPFLKDNREKIEKILTFRIPYYVGPLARGNSRFAWMTRKSEETITPWNFEEVVDKGASAQSFIERMTNFDKNLPNEKVLPKHSLLYEYFTVYNELTKVKYVTEGMRKPAFLSGEQKKAIVDLLFKTNRKVTVKQLKEDYFKKIECFDSVEISGVEDRFNASLGTYHDLLKIIKDKDFLDNEENEDILEDIVLTLTLFEDREMIEERLKTYAHLFDDKVMKQLKRRRYTGWGRLSRKLINGIRDKQSGKTILDFLKSDGFANRNFMQLIHDDSLTFKEDIQKAQVSGQGDSLHEHIANLAGSPAIKKGILQTVKVVDELVKVMGRHKPENIVIEMARENQTTQKGQKNSRERMKRIEEGIKELGSQILKEHPVENTQLQNEKLYLYYLQNGRDMYVDQELDINRLSDYDVDHIVPQSFLKDDSIDNKVLTRSDKARGKSDNVPSEEVVKKMKNYWRQLLNAKLITQRKFDNLTKAERGGLSELDKAGFIKRQLVETRQITKHVAQILDSRMNTKYDENDKLIREVKVITLKSKLVSDFRKDFQFYKVREINNYHHAHDAYLNAVVGTALIKKYPKLESEFVYGDYKVYDVRKMIAKSEQEIGKATAKYFFYSNIMNFFKTEITLANGEIRKRPLIETNGETGEIVWDKGRDFATVRKVLSMPQVNIVKKTEVQTGGFSKESILPKRNSDKLIARKKDWDPKKYGGFDSPTVAYSVLVVAKVEKGKSKKLKSVKELLGITIMERSSFEKNPIDFLEAKGYKEVKKDLIIKLPKYSLFELENGRKRMLASAGELQKGNELALPSKYVNFLYLASHYEKLKGSPEDNEQKQLFVEQHKHYLDEIIEQISEFSKRVILADANLDKVLSAYNKHRDKPIREQAENIIHLFTLTNLGAPAAFKYFDTTIDRKRYTSTKEVLDATLIHQSITGLYETRIDLSQLGGDGGGGGPAPGGSGGLLGRDLLTKLKAQIQFSTEGPQVTWEDRPAMCLVLNLEEEYRLHEKPVPPSIDPSWLQLFPMVWAEKAGMGLANQVPPVVVELKSDASPVAVRQYPMSKEAREGIRPHIQRFLDLGILVPCQSPWNTPLLPVKKPGTNDYRPVQDLREVNKRVQDIHPTVPNPYNLLSSLPPSHTWYSVLDLKDAFFCLKLHPNSQPLFAFEWRDPEKGNTGQLTWTRLPQGFKNSPTLFNEALHRDLASFRALNPQVVMLQYVDDLLVAAPTYRDCKEGTRRLLQELSKLGYRVSAKKAQLCREEVTYLGYLLKGGKRWLTPARKATVMKIPTPTTPRQVREFLGTAGFCRLWIPGFASLAAPLYPLTRPKVPFTWTEAHQEAFGRIKEALLSAPALALPDLTKPFALYVDEKEGVARGVLTQTLGPWRRPVAYLSKKLDPVASGWPTCLKAIAAVALLLKDADKLTLGQNVLVIAPHNLESIVRQPPDRWMTNARMTHYQSLLLNERVSFAPPAILNPATLLPVESDDTPIHICSEILAEETGTRPDLRDQPLPGVPAWYTDGSSFIMDGRRQAGAAIVDNKRTVWASNLPEGTSAQKAELIALTQALRLAEGKSINIYTDSRYAFATAHVHGAIYKQRGWLTSAGKDIKNKEEILALLEAIHLPKRVAIIHCPGHQRGTDPVATGNRKADEAAKQAAQSTRILTETTKNAGKRTADGSEFEKRTADGSEFESPKKKAKVE

SEQ ID NO: 7012 - protein, 2094 aa, synthetic construct
MPAAKRVKLDGGDKKYSIGLDIGTNSVGWAVITDEYKVPSKKFKVLGNTDRHSIKKNLIGALLFDSGETAEATRLKRTARRRYTRRKNRICYLQEIFSNEMAKVDDSFFHRLEESFLVEEDKKHERHPIFGNIVDEVAYHEKYPTIYHLRKKLVDSTDKADLRLIYLALAHMIKFRGHFLIEGDLNPDNSDVDKLFIQLVQTYNQLFEENPINASGVDAKAILSARLSKSRRLENLIAQLPGEKKNGLFGNLIALSLGLTPNFKSNFDLAEDAKLQLSKDTYDDDLDNLLAQIGDQYADLFLAAKNLSDAILLSDILRVNTEITKAPLSASMIKRYDEHHQDLTLLKALVRQQLPEKYKEIFFDQSKNGYAGYIDGGASQEEFYKFIKPILEKMDGTEELLVKLNREDLLRKQRTFDNGSIPHQIHLGELHAILRRQEDFYPFLKDNREKIEKILTFRIPYYVGPLARGNSRFAWMTRKSEETITPWNFEEVVDKGASAQSFIERMTNFDKNLPNEKVLPKHSLLYEYFTVYNELTKVKYVTEGMRKPAFLSGEQKKAIVDLLFKTNRKVTVKQLKEDYFKKIECFDSVEISGVEDRFNASLGTYHDLLKIIKDKDFLDNEENEDILEDIVLTLTLFEDREMIEERLKTYAHLFDDKVMKQLKRRRYTGWGRLSRKLINGIRDKQSGKTILDFLKSDGFANRNFMQLIHDDSLTFKEDIQKAQVSGQGDSLHEHIANLAGSPAIKKGILQTVKVVDELVKVMGRHKPENIVIEMARENQTTQKGQKNSRERMKRIEEGIKELGSQILKEHPVENTQLQNEKLYLYYLQNGRDMYVDQELDINRLSDYDVDHIVPQSFLKDDSIDNKVLTRSDKARGKSDNVPSEEVVKKMKNYWRQLLNAKLITQRKFDNLTKAERGGLSELDKAGFIKRQLVETRQITKHVAQILDSRMNTKYDENDKLIREVKVITLKSKLVSDFRKDFQFYKVREINNYHHAHDAYLNAVVGTALIKKYPKLESEFVYGDYKVYDVRKMIAKSEQEIGKATAKYFFYSNIMNFFKTEITLANGEIRKRPLIETNGETGEIVWDKGRDFATVRKVLSMPQVNIVKKTEVQTGGFSKESILPKRNSDKLIARKKDWDPKKYGGFDSPTVAYSVLVVAKVEKGKSKKLKSVKELLGITIMERSSFEKNPIDFLEAKGYKEVKKDLIIKLPKYSLFELENGRKRMLASAGELQKGNELALPSKYVNFLYLASHYEKLKGSPEDNEQKQLFVEQHKHYLDEIIEQISEFSKRVILADANLDKVLSAYNKHRDKPIREQAENIIHLFTLTNLGAPAAFKYFDTTIDRKRYTSTKEVLDATLIHQSITGLYETRIDLSQLGGDGGGGGPAPGGSGGTLGIEDEYRLHETSTEPDVSLGSTWLSDFPQAWAETGGMGLAVRQAPLIIPLKATSTPVSIQQYPMSHEARLGIKPHIQRLLDQGILVPCQSPWNTPLLPVKKPGTNDYRPVQDLREVNKRVEDIHPTVPNPYNLLSGLPPSHQWYTVLDLKDAFFCLRLHPTSQPLFAFEWRDPGMGISGQLTWTRLPQGFKNSPTLFNEALHRDLADFRIQHPDLILLQYVDDILLAATSELDCQQGTRALLQTLGDLGYRASAKKAQICQKQVKYLGYLLREGQRWLTEARKETVMGQPVPKTPRQLREFLGTAGFCRLWIPGFAEMAAPLYPLTKPGTLFSWGPDQQKAYQEIKQALLTAPALGLPDLTKPFELFVDEKQGYAKGVLTQKLGPWRRPVAYLSKKLDPVAAGWPPCLRMVAAIAVLTKDAGKLTMGQPLVILAPHAVEALVKQPPDRWLSNARMTHYQAMLLDTDRVQFGPVVALNPATLLPLPEEGAPHDCLEILAETHGTRPDLTDQPIPDADHTWYTDGSSFLQEGQRKAGAAVTTETEVIWAGALPAGTSAQRAELIALTQALKMAEGKRLNVYTDSRYAFATAHIHGEIYRRRGWLTSEGREIKNKSEILALLKALFLPKRLSIIHCLGHQKGDSAEARGNRLADQAAREAAIKTPPDTSTLLAGKRTADGSEFEKRTADGSEFESPKKKAKVE

SEQ ID NO: 7013 - protein, 2086 aa, synthetic construct
MPAAKRVKLDGGDKKYSIGLDIGTNSVGWAVITDEYKVPSKKFKVLGNTDRHSIKKNLIGALLFDSGETAEATRLKRTARRRYTRRKNRICYLQEIFSNEMAKVDDSFFHRLEESFLVEEDKKHERHPIFGNIVDEVAYHEKYPTIYHLRKKLVDSTDKADLRLIYLALAHMIKFRGHFLIEGDLNPDNSDVDKLFIQLVQTYNQLFEENPINASGVDAKAILSARLSKSRRLENLIAQLPGEKKNGLFGNLIALSLGLTPNFKSNFDLAEDAKLQLSKDTYDDDLDNLLAQIGDQYADLFLAAKNLSDAILLSDILRVNTEITKAPLSASMIKRYDEHHQDLTLLKALVRQQLPEKYKEIFFDQSKNGYAGYIDGGASQEEFYKFIKPILEKMDGTEELLVKLNREDLLRKQRTFDNGSIPHQIHLGELHAILRRQEDFYPFLKDNREKIEKILTFRIPYYVGPLARGNSRFAWMTRKSEETITPWNFEEVVDKGASAQSFIERMTNFDKNLPNEKVLPKHSLLYEYFTVYNELTKVKYVTEGMRKPAFLSGEQKKAIVDLLFKTNRKVTVKQLKEDYFKKIECFDSVEISGVEDRFNASLGTYHDLLKIIKDKDFLDNEENEDILEDIVLTLTLFEDREMIEERLKTYAHLFDDKVMKQLKRRRYTGWGRLSRKLINGIRDKQSGKTILDFLKSDGFANRNFMQLIHDDSLTFKEDIQKAQVSGQGDSLHEHIANLAGSPAIKKGILQTVKVVDELVKVMGRHKPENIVIEMARENQTTQKGQKNSRERMKRIEEGIKELGSQILKEHPVENTQLQNEKLYLYYLQNGRDMYVDQELDINRLSDYDVDHIVPQSFLKDDSIDNKVLTRSDKARGKSDNVPSEEVVKKMKNYWRQLLNAKLITQRKFDNLTKAERGGLSELDKAGFIKRQLVETRQITKHVAQILDSRMNTKYDENDKLIREVKVITLKSKLVSDFRKDFQFYKVREINNYHHAHDAYLNAVVGTALIKKYPKLESEFVYGDYKVYDVRKMIAKSEQEIGKATAKYFFYSNIMNFFKTEITLANGEIRKRPLIETNGETGEIVWDKGRDFATVRKVLSMPQVNIVKKTEVQTGGFSKESILPKRNSDKLIARKKDWDPKKYGGFDSPTVAYSVLVVAKVEKGKSKKLKSVKELLGITIMERSSFEKNPIDFLEAKGYKEVKKDLIIKLPKYSLFELENGRKRMLASAGELQKGNELALPSKYVNFLYLASHYEKLKGSPEDNEQKQLFVEQHKHYLDEIIEQISEFSKRVILADANLDKVLSAYNKHRDKPIREQAENIIHLFTLTNLGAPAAFKYFDTTIDRKRYTSTKEVLDATLIHQSITGLYETRIDLSQLGGDGGGGGPAPGGSGGLDDEYRLYSPLVKPDQNIQFWLEQFPQAWAETAGMGLAKQVPPQVIQLKASATPVSVRQYPLSKEAQEGIRPHVQRLIQQGILVPVQSPWNTPLLPVRKPGTNDYRPVQDLREVNKRVQDIHPTVPNPYNLLCALPPQRSWYTVLDLKDAFFCLRLHPTSQPLFAFEWRDPGTGRTGQLTWTRLPQGFKNSPTIFNEALHRDLANFRIQHPQVTLLQYVDDLLLAGATKQDCLEGTKALLLELSDLGYRASAKKAQICRREVTYLGYSLRDGQRWLTEARKKTVVQIPAPTTAKQVREFLGKAGFCRLFIPGFATLAAPLYPLTKPKGEFSWAPEHQKAFDAIKKALLSAPALALPDVTKPFTLYVDERKGVARGVLTQTLGPWRRPVAYLSKKLDPVASGWPVCLKAIAAVAILVKDADKLTLGQNITVIAPHALENIVRQPPDRWMTNARMTHYQSLLLTERVTFAPPAALNPATLLPEETDEPVTHDCHQLLIEETGVRKDLTDIPLTGEVLTWFTDGSSYVVEGKRMAGAAVVDGTRTIWASSLPEGTSAQKAELMALTQALRLAEGKSINIYTDSRYAFATAHVHGAIYKQRGWLTSAGREIKNKEEILSLLEALHLPKRLAIIHCPGHQKAKDPISRGNQMADRVAKQAAQGVNLLPAGKRTADGSEFEKRTADGSEFESPKKKAKVE

SEQ ID NO: 7014 - protein, 2088 aa, synthetic construct
MPAAKRVKLDGGDKKYSIGLDIGTNSVGWAVITDEYKVPSKKFKVLGNTDRHSIKKNLIGALLFDSGETAEATRLKRTARRRYTRRKNRICYLQEIFSNEMAKVDDSFFHRLEESFLVEEDKKHERHPIFGNIVDEVAYHEKYPTIYHLRKKLVDSTDKADLRLIYLALAHMIKFRGHFLIEGDLNPDNSDVDKLFIQLVQTYNQLFEENPINASGVDAKAILSARLSKSRRLENLIAQLPGEKKNGLFGNLIALSLGLTPNFKSNFDLAEDAKLQLSKDTYDDDLDNLLAQIGDQYADLFLAAKNLSDAILLSDILRVNTEITKAPLSASMIKRYDEHHQDLTLLKALVRQQLPEKYKEIFFDQSKNGYAGYIDGGASQEEFYKFIKPILEKMDGTEELLVKLNREDLLRKQRTFDNGSIPHQIHLGELHAILRRQEDFYPFLKDNREKIEKILTFRIPYYVGPLARGNSRFAWMTRKSEETITPWNFEEVVDKGASAQSFIERMTNFDKNLPNEKVLPKHSLLYEYFTVYNELTKVKYVTEGMRKPAFLSGEQKKAIVDLLFKTNRKVTVKQLKEDYFKKIECFDSVEISGVEDRFNASLGTYHDLLKIIKDKDFLDNEENEDILEDIVLTLTLFEDREMIEERLKTYAHLFDDKVMKQLKRRRYTGWGRLSRKLINGIRDKQSGKTILDFLKSDGFANRNFMQLIHDDSLTFKEDIQKAQVSGQGDSLHEHIANLAGSPAIKKGILQTVKVVDELVKVMGRHKPENIVIEMARENQTTQKGQKNSRERMKRIEEGIKELGSQILKEHPVENTQLQNEKLYLYYLQNGRDMYVDQELDINRLSDYDVDHIVPQSFLKDDSIDNKVLTRSDKARGKSDNVPSEEVVKKMKNYWRQLLNAKLITQRKFDNLTKAERGGLSELDKAGFIKRQLVETRQITKHVAQILDSRMNTKYDENDKLIREVKVITLKSKLVSDFRKDFQFYKVREINNYHHAHDAYLNAVVGTALIKKYPKLESEFVYGDYKVYDVRKMIAKSEQEIGKATAKYFFYSNIMNFFKTEITLANGEIRKRPLIETNGETGEIVWDKGRDFATVRKVLSMPQVNIVKKTEVQTGGFSKESILPKRNSDKLIARKKDWDPKKYGGFDSPTVAYSVLVVAKVEKGKSKKLKSVKELLGITIMERSSFEKNPIDFLEAKGYKEVKKDLIIKLPKYSLFELENGRKRMLASAGELQKGNELALPSKYVNFLYLASHYEKLKGSPEDNEQKQLFVEQHKHYLDEIIEQISEFSKRVILADANLDKVLSAYNKHRDKPIREQAENIIHLFTLTNLGAPAAFKYFDTTIDRKRYTSTKEVLDATLIHQSITGLYETRIDLSQLGGDGGGGGPAPGGSGGTLQLDDEYRLYSPLVKPDQNIQFWLEQFPQAWAETAGMGLAKQVPPQVIQLKASATPVSVRQYPLSKEAQEGIRPHVQRLIQQGILVPVQSPWNTPLLPVRKPGTNDYRPVQDLREVNKRVQDIHPTVPNPYNLLCALPPQRSWYTVLDLKDAFFCLRLHPTSQPLFAFEWRDPGTGRTGQLTWTRLPQGFKNSPTIFDEALHRDLANFRIQHPQVTLLQYVDDLLLAGATKQDCLEGTKALLLELSDLGYRASAKKAQICRREVTYLGYSLRDGQRWLTEARKKTVVQIPAPTTAKQVREFLGTAGFCRLWIPGFATLAAPLYPLTKEKGEFSWAPEHQKAFDAIKKALLSAPALALPDVTKPFTLYVDERKGVARGVLTQTLGPWRRPVAYLSKKLDPVASGWPVCLKAIAAVAILVKDADKLTLGQNITVIAPHALENIVRQPPDRWMTNARMTHYQSLLLTERVTFAPPAALNPATLLPEETDEPVTHDCHQLLIEETGVRKDLTDIPLTGEVLTWFTDGSSYVVEGKRMAGAAVVDGTRTIWASSLPEGTSAQKAELMALTQALRLAEGKSINIYTDSRYAFATAHVHGAIYKQRGLLTSAGREIKNKEEILSLLEALHLPKRLAIIHCPGHQKAKDPISRGNQMADRVAKQAAQGVNLLAGKRTADGSEFEKRTADGSEFESPKKKAKVE

SEQ ID NO: 7015 - protein, 2086 aa, synthetic construct; identical to SEQ ID NO: 7013

SEQ ID NO: 7016 - protein, 2085 aa, synthetic construct
MPAAKRVKLDGGDKKYSIGLDIGTNSVGWAVITDEYKVPSKKFKVLGNTDRHSIKKNLIGALLFDSGETAEATRLKRTARRRYTRRKNRICYLQEIFSNEMAKVDDSFFHRLEESFLVEEDKKHERHPIFGNIVDEVAYHEKYPTIYHLRKKLVDSTDKADLRLIYLALAHMIKFRGHFLIEGDLNPDNSDVDKLFIQLVQTYNQLFEENPINASGVDAKAILSARLSKSRRLENLIAQLPGEKKNGLFGNLIALSLGLTPNFKSNFDLAEDAKLQLSKDTYDDDLDNLLAQIGDQYADLFLAAKNLSDAILLSDILRVNTEITKAPLSASMIKRYDEHHQDLTLLKALVRQQLPEKYKEIFFDQSKNGYAGYIDGGASQEEFYKFIKPILEKMDGTEELLVKLNREDLLRKQRTFDNGSIPHQIHLGELHAILRRQEDFYPFLKDNREKIEKILTFRIPYYVGPLARGNSRFAWMTRKSEETITPWNFEEVVDKGASAQSFIERMTNFDKNLPNEKVLPKHSLLYEYFTVYNELTKVKYVTEGMRKPAFLSGEQKKAIVDLLFKTNRKVTVKQLKEDYFKKIECFDSVEISGVEDRFNASLGTYHDLLKIIKDKDFLDNEENEDILEDIVLTLTLFEDREMIEERLKTYAHLFDDKVMKQLKRRRYTGWGRLSRKLINGIRDKQSGKTILDFLKSDGFANRNFMQLIHDDSLTFKEDIQKAQVSGQGDSLHEHIANLAGSPAIKKGILQTVKVVDELVKVMGRHKPENIVIEMARENQTTQKGQKNSRERMKRIEEGIKELGSQILKEHPVENTQLQNEKLYLYYLQNGRDMYVDQELDINRLSDYDVDHIVPQSFLKDDSIDNKVLTRSDKARGKSDNVPSEEVVKKMKNYWRQLLNAKLITQRKFDNLTKAERGGLSELDKAGFIKRQLVETRQITKHVAQILDSRMNTKYDENDKLIREVKVITLKSKLVSDFRKDFQFYKVREINNYHHAHDAYLNAVVGTALIKKYPKLESEFVYGDYKVYDVRKMIAKSEQEIGKATAKYFFYSNIMNFFKTEITLANGEIRKRPLIETNGETGEIVWDKGRDFATVRKVLSMPQVNIVKKTEVQTGGFSKESILPKRNSDKLIARKKDWDPKKYGGFDSPTVAYSVLVVAKVEKGKSKKLKSVKELLGITIMERSSFEKNPIDFLEAKGYKEVKKDLIIKLPKYSLFELENGRKRMLASAGELQKGNELALPSKYVNFLYLASHYEKLKGSPEDNEQKQLFVEQHKHYLDEIIEQISEFSKRVILADANLDKVLSAYNKHRDKPIREQAENIIHLFTLTNLGAPAAFKYFDTTIDRKRYTSTKEVLDATLIHQSITGLYETRIDLSQLGGDGGGGGPAPGGSGGIPWLMKKPLQLTTLVPLQEYEERLLKQTMLTGSYKEKLQSLFLKYDALWQHWENQVGHRRIKPHHIATGTVNPRPQKQYPINPKAKASIQTVINDLLKQGVLIQQNSIMNTPVYPVPKPDGKWRMVLDYREVNKTIPLIAAQNQHSAGILSSIFRGKYKTTLDLSNGFWAHSITPESYWLTAFTWLGQQYCWTRLPQGFLNSPALFNADVVDLLKEVPNVQVYVDDIYISHDDPREHLEQLEKVFSLLLNAGYVVSLKKSEIAQHEVEFLGFNITKEGRGLTETFKQKLLNITPPRDLKQLQSILGLLNFARNFIPNFSELVKPLYNIIATAPGKYITWTTDNSQQLQNIISMLNSAENLEERNPEVRLIMKVNTSPSAGYIRFYNEFAKRPIMYLNYVYTKAEVKFTNTEKLLTTIHKGLIKALDLGMGQEILVYSPIVSMTKIQKTPLPERKALPIRWITWMSYLEDPRIQFHYDKTLPELQQVPTVTDDIIAKIKHPSEFSMVFYTDGSAIKHPNVNKSHNAGMGIAQVQFKPEFTVINTWSIPLGDHTAQLAEVAAVEFACKKALKIDGPVLIVTDSFYVAESVNKELPYWQSNGFFNNKKKPLKHVSKWKSIADCIQLKPDIIIIHEKGHQPTASTFHTEGNNLADKLATQGSYVVNAGKRTADGSEFEKRTADGSEFESPKKKAKVE

SEQ ID NO: 7017 - protein, 2092 aa, synthetic construct
MPAAKRVKLDGGDKKYSIGLDIGTNSVGWAVITDEYKVPSKKFKVLGNTDRHSIKKNLIGALLFDSGETAEATRLKRTARRRYTRRKNRICYLQEIFSNEMAKVDDSFFHRLEESFLVEEDKKHERHPIFGNIVDEVAYHEKYPTIYHLRKKLVDSTDKADLRLIYLALAHMIKFRGHFLIEGDLNPDNSDVDKLFIQLVQTYNQLFEENPINASGVDAKAILSARLSKSRRLENLIAQLPGEKKNGLFGNLIALSLGLTPNFKSNFDLAEDAKLQLSKDTYDDDLDNLLAQIGDQYADLFLAAKNLSDAILLSDILRVNTEITKAPLSASMIKRYDEHHQDLTLLKALVRQQLPEKYKEIFFDQSKNGYAGYIDGGASQEEFYKFIKPILEKMDGTEELLVKLNREDLLRKQRTFDNGSIPHQIHLGELHAILRRQEDFYPFLKDNREKIEKILTFRIPYYVGPLARGNSRFAWMTRKSEETITPWNFEEVVDKGASAQSFIERMTNFDKNLPNEKVLPKHSLLYEYFTVYNELTKVKYVTEGMRKPAFLSGEQKKAIVDLLFKTNRKVTVKQLKEDYFKKIECFDSVEISGVEDRFNASLGTYHDLLKIIKDKDFLDNEENEDILEDIVLTLTLFEDREMIEERLKTYAHLFDDKVMKQLKRRRYTGWGRLSRKLINGIRDKQSGKTILDFLKSDGFANRNFMQLIHDDSLTFKEDIQKAQVSGQGDSLHEHIANLAGSPAIKKGILQTVKVVDELVKVMGRHKPENIVIEMARENQTTQKGQKNSRERMKRIEEGIKELGSQILKEHPVENTQLQNEKLYLYYLQNGRDMYVDQELDINRLSDYDVDHIVPQSFLKDDSIDNKVLTRSDKARGKSDNVPSEEVVKKMKNYWRQLLNAKLITQRKFDNLTKAERGGLSELDKAGFIKRQLVETRQITKHVAQILDSRMNTKYDENDKLIREVKVITLKSKLVSDFRKDFQFYKVREINNYHHAHDAYLNAVVGTALIKKYPKLESEFVYGDYKVYDVRKMIAKSEQEIGKATAKYFFYSNIMNFFKTEITLANGEIRKRPLIETNGETGEIVWDKGRDFATVRKVLSMPQVNIVKKTEVQTGGFSKESILPKRNSDKLIARKKDWDPKKYGGFDSPTVAYSVLVVAKVEKGKSKKLKSVKELLGITIMERSSFEKNPIDFLEAKGYKEVKKDLIIKLPKYSLFELENGRKRMLASAGELQKGNELALPSKYVNFLYLASHYEKLKGSPEDNEQKQLFVEQHKHYLDEIIEQISEFSKRVILADANLDKVLSAYNKHRDKPIREQAENIIHLFTLTNLGAPAAFKYFDTTIDRKRYTSTKEVLDATLIHQSITGLYETRIDLSQLGGDGGGGGPAPGGSGGVLNLEEEYRLHEKPVPSSIDPSWLQLFPTVWAERAGMGLANQVPPVVVELRSGASPVAVRQYPMSKEAREGIRPHIQRFLDLGVLVPCQSPWNTPLLPVKKPGTNDYRPVQDLREINKRVQDIHPTVPNPYNLLSSLPPSHTWYSVLDLKDAFFCLKLHPNSQPLFAFEWRDPEKGNTGQLTWTRLPQGFKNSPTLFNEALHRDLAPFRALNPQVVLLQYVDDLLVAAPTYRDCKEGTQKLLQELSKLGYRVSAKKAQLCQKEVTYLGYLLKEGKRWLTPARKATVMKIPPPTTPRQVREFLGTAGFCRLWIPGFASLAAPLYPLTKPSIPFIWTEEHQKAFDRIKEALLSAPALALPDLTKPFTLYVDERAGVARGVLTQTLGPWRRPVAYLSKKLDPVASGWPTCLKAVAAVALLLKDADKLTLGQNVTVIASHSLESIVRQPPDRWMTNARMTHYQSLLLNERVSFAPPAVLNPATLLPVESEATPVHRCSEILAEETGTRRDLKDQPLPGVPAWYTDGSSFIAEGKRRAGAAIVDGKRTVWASSLPEGTSAQKAELVALTQALRLAEGKDINIYTDSRYAFATAHIHGAIYKQRGWLTSAGKDIKNKEEILALLEAIHLPKRVAIIHCPGHQKGNDPVATGNRRADEAAKQAALSTRVLAETTKPAGKRTADGSEFEKRTADGSEFESPKKKAKVE

SEQ ID NO: 7018 - protein, 2096 aa, synthetic construct
MPAAKRVKLDGGDKKYSIGLDIGTNSVGWAVITDEYKVPSKKFKVLGNTDRHSIKKNLIGALLFDSGETAEATRLKRTARRRYTRRKNRICYLQEIFSNEMAKVDDSFFHRLEESFLVEEDKKHERHPIFGNIVDEVAYHEKYPTIYHLRKKLVDSTDKADLRLIYLALAHMIKFRGHFLIEGDLNPDNSDVDKLFIQLVQTYNQLFEENPINASGVDAKAILSARLSKSRRLENLIAQLPGEKKNGLFGNLIALSLGLTPNFKSNFDLAEDAKLQLSKDTYDDDLDNLLAQIGDQYADLFLAAKNLSDAILLSDILRVNTEITKAPLSASMIKRYDEHHQDLTLLKALVRQQLPEKYKEIFFDQSKNGYAGYIDGGASQEEFYKFIKPILEKMDGTEELLVKLNREDLLRKQRTFDNGSIPHQIHLGELHAILRRQEDFYPFLKDNREKIEKILTFRIPYYVGPLARGNSRFAWMTRKSEETITPWNFEEVVDKGASAQSFIERMTNFDKNLPNEKVLPKHSLLYEYFTVYNELTKVKYVTEGMRKPAFLSGEQKKAIVDLLFKTNRKVTVKQLKEDYFKKIECFDSVEISGVEDRFNASLGTYHDLLKIIKDKDFLDNEENEDILEDIVLTLTLFEDREMIEERLKTYAHLFDDKVMKQLKRRRYTGWGRLSRKLINGIRDKQSGKTILDFLKSDGFANRNFMQLIHDDSLTFKEDIQKAQVSGQGDSLHEHIANLAGSPAIKKGILQTVKVVDELVKVMGRHKPENIVIEMARENQTTQKGQKNSRERMKRIEEGIKELGSQILKEHPVENTQLQNEKLYLYYLQNGRDMYVDQELDINRLSDYDVDHIVPQSFLKDDSIDNKVLTRSDKARGKSDNVPSEEVVKKMKNYWRQLLNAKLITQRKFDNLTKAERGGLSELDKAGFIKRQLVETRQITKHVAQILDSRMNTKYDENDKLIREVKVITLKSKLVSDFRKDFQFYKVREINNYHHAHDAYLNAVVGTALIKKYPKLESEFVYGDYKVYDVRKMIAKSEQEIGKATAKYFFYSNIMNFFKTEITLANGEIRKRPLIETNGETGEIVWDKGRDFATVRKVLSMPQVNIVKKTEVQTGGFSKESILPKRNSDKLIARKKDWDPKKYGGFDSPTVAYSVLVVAKVEKGKSKKLKSVKELLGITIMERSSFEKNPIDFLEAKGYKEVKKDLIIKLPKYSLFELENGRKRMLASAGELQKGNELALPSKYVNFLYLASHYEKLKGSPEDNEQKQLFVEQHKHYLDEIIEQISEFSKRVILADANLDKVLSAYNKHRDKPIREQAENIIHLFTLTNLGAPAAFKYFDTTIDRKRYTSTKEVLDATLIHQSITGLYETRIDLSQLGGDGGPAPGGSGGGGGTAPLEEEYRLFLEAPIQNVTLLEQWKREIPKVWAEINPPGLASTQAPIHVQLLSTALPVRVRQYPITLEAKRSLRETIRKFRAAGILRPVHSPWNTPLLPVRKSGTSEYRMVQDLREVNKRVETIHPTVPNPYTLLSLLPPDRIWYSVLDLKDAFFCIPLAPESQLIFAFEWADAEEGESGQLTWTRLPQGFKNSPTLFNEALNRDLQGFRLDHPSVSLLQYVDDLLIAADTQAACLSATRDLLMTLAELGYRVSGKKAQLCQEEVTYLGFKIHKGSRSLSNSRTQAILQIPVPKTKRQVREFLGTIGYCRLWIPGFAELAQPLYAATRPGNDPLVWGEKEEEAFQSLKLALTQPPALALPSLDKPFQLFVEETSGAAKGVLTQALGPWKRPVAYLSKRLDPVAAGWPRCLRAIAAAALLTREASKLTFGQDIEITSSHNLESLLRSPPDKWLTNARITQYQVLLLDPPRVRFKQTAALNPATLLPETDDTLPIHHCLDTLDSLTSTRPDLTDQPLAQAEATLFTDGSSYIRDGKRYAGAAVVTLDSVIWAEPLPIGTSAQKAELIALTKALEWSKDKSVNIYTDSRYAFATLHVHGMIYRERGWLTAGGKAIKNAPEILALLTAVWLPKRVAVMHCKGHQKDDAPTSTGNRRADEVAREVAIRPLSTQATISAGKRTADGSEFEKRTADGSEFESPKKKAKVE

SEQ ID NO: 7019 - protein, 2092 aa, synthetic construct
MPAAKRVKLDGGDKKYSIGLDIGTNSVGWAVITDEYKVPSKKFKVLGNTDRHSIKKNLIGALLFDSGETAEATRLKRTARRRYTRRKNRICYLQEIFSNEMAKVDDSFFHRLEESFLVEEDKKHERHPIFGNIVDEVAYHEKYPTIYHLRKKLVDSTDKADLRLIYLALAHMIKFRGHFLIEGDLNPDNSDVDKLFIQLVQTYNQLFEENPINASGVDAKAILSARLSKSRRLENLIAQLPGEKKNGLFGNLIALSLGLTPNFKSNFDLAEDAKLQLSKDTYDDDLDNLLAQIGDQYADLFLAAKNLSDAILLSDILRVNTEITKAPLSASMIKRYDEHHQDLTLLKALVRQQLPEKYKEIFFDQSKNGYAGYIDGGASQEEFYKFIKPILEKMDGTEELLVKLNREDLLRKQRTFDNGSIPHQIHLGELHAILRRQEDFYPFLKDNREKIEKILTFRIPYYVGPLARGNSRFAWMTRKSEETITPWNFEEVVDKGASAQSFIERMTNFDKNLPNEKVLPKHSLLYEYFTVYNELTKVKYVTEGMRKPAFLSGEQKKAIVDLLFKTNRKVTVKQLKEDYFKKIECFDSVEISGVEDRFNASLGTYHDLLKIIKDKDFLDNEENEDILEDIVLTLTLFEDREMIEERLKTYAHLFDDKVMKQLKRRRYTGWGRLSRKLINGIRDKQSGKTILDFLKSDGFANRNFMQLIHDDSLTFKEDIQKAQVSGQGDSLHEHIANLAGSPAIKKGILQTVKVVDELVKVMGRHKPENIVIEMARENQTTQKGQKNSRERMKRIEEGIKELGSQILKEHPVENTQLQNEKLYLYYLQNGRDMYVDQELDINRLSDYDVDHIVPQSFLKDDSIDNKVLTRSDKARGKSDNVPSEEVVKKMKNYWRQLLNAKLITQRKFDNLTKAERGGLSELDKAGFIKRQLVETRQITKHVAQILDSRMNTKYDENDKLIREVKVITLKSKLVSDFRKDFQFYKVREINNYHHAHDAYLNAVVGTALIKKYPKLESEFVYGDYKVYDVRKMIAKSEQEIGKATAKYFFYSNIMNFFKTEITLANGEIRKRPLIETNGETGEIVWDKGRDFATVRKVLSMPQVNIVKKTEVQTGGFSKESILPKRNSDKLIARKKDWDPKKYGGFDSPTVAYSVLVVAKVEKGKSKKLKSVKELLGITIMERSSFEKNPIDFLEAKGYKEVKKDLIIKLPKYSLFELENGRKRMLASAGELQKGNELALPSKYVNFLYLASHYEKLKGSPEDNEQKQLFVEQHKHYLDEIIEQISEFSKRVILADANLDKVLSAYNKHRDKPIREQAENIIHLFTLTNLGAPAAFKYFDTTIDRKRYTSTKEVLDATLIHQSITGLYETRIDLSQLGGDGGPAPGGSGGGGGVLNLEEEYRLHEKPVPSSIDPSWLQLFPTVWAERAGMGLANQVPPVVVELRSGASPVAVRQYPMSKEAREGIRPHIQKFLDLGVLVPCRSPWNTPLLPVKKPGTNDYRPVQDLREINKRVQDIHPTVPNPYNLLSSLPPSYTWYSVLDLKDAFFCLRLHPNSQPLFAFEWKDPEKGNTGQLTWTRLPQGFKNSPTLFNEALHRDLAPFRALNPQVVLLQYVDDLLVAAPTYEDCKKGTQKLLQELSKLGYRVSAKKAQLCQREVTYLGYLLKEGKRWLTPARKATVMKIPVPTTPRQVREFLGKAGFCRLFIPGFASLAAPLYPLTKPSIPFIWTEEHQQAFDHIKKALLSAPALALPDLTKPFTLYIDERAGVARGVLTQTLGPWRRPVAYLSKKLDPVASGWPTCLKAVAAVALLLKDADKLTLGQNVTVIASHSLESIVRQPPDRWMTNARMTHYQSLLLNERVSFAPPAVLNPATLLPVESEATPVHRCSEILAEETGTRRDLEDQPLPGVPTWYTDGSSFITEGKRRAGAPIVDGKRTVWASSLPEGTSAQKAELVALTQALRLAEGKNINIYTDSRYAFATAHIHGAIYKQRGWLTSAGKDIKNKEEILALLEAIHLPRRVAIIHCPGHQRGSNPVATGNRRADEAAKQAALSTRVLAGTTKPAGKRTADGSEFEKRTADGSEFESPKKKAKVE

SEQ ID NO: 7020 - protein, 2094 aa, synthetic construct
MPAAKRVKLDGGDKKYSIGLDIGTNSVGWAVITDEYKVPSKKFKVLGNTDRHSIKKNLIGALLFDSGETAEATRLKRTARRRYTRRKNRICYLQEIFSNEMAKVDDSFFHRLEESFLVEEDKKHERHPIFGNIVDEVAYHEKYPTIYHLRKKLVDSTDKADLRLIYLALAHMIKFRGHFLIEGDLNPDNSDVDKLFIQLVQTYNQLFEENPINASGVDAKAILSARLSKSRRLENLIAQLPGEKKNGLFGNLIALSLGLTPNFKSNFDLAEDAKLQLSKDTYDDDLDNLLAQIGDQYADLFLAAKNLSDAILLSDILRVNTEITKAPLSASMIKRYDEHHQDLTLLKALVRQQLPEKYKEIFFDQSKNGYAGYIDGGASQEEFYKFIKPILEKMDGTEELLVKLNREDLLRKQRTFDNGSIPHQIHLGELHAILRRQEDFYPFLKDNREKIEKILTFRIPYYVGPLARGNSRFAWMTRKSEETITPWNFEEVVDKGASAQSFIERMTNFDKNLPNEKVLPKHSLLYEYFTVYNELTKVKYVTEGMRKPAFLSGEQKKAIVDLLFKTNRKVTVKQLKEDYFKKIECFDSVEISGVEDRFNASLGTYHDLLKIIKDKDFLDNEENEDILEDIVLTLTLFEDREMIEERLKTYAHLFDDKVMKQLKRRRYTGWGRLSRKLINGIRDKQSGKTILDFLKSDGFANRNFMQLIHDDSLTFKEDIQKAQVSGQGDSLHEHIANLAGSPAIKKGILQTVKVVDELVKVMGRHKPENIVIEMARENQTTQKGQKNSRERMKRIEEGIKELGSQILKEHPVENTQLQNEKLYLYYLQNGRDMYVDQELDINRLSDYDVDHIVPQSFLKDDSIDNKVLTRSDKARGKSDNVPSEEVVKKMKNYWRQLLNAKLITQRKFDNLTKAERGGLSELDKAGFIKRQLVETRQITKHVAQILDSRMNTKYDENDKLIREVKVITLKSKLVSDFRKDFQFYKVREINNYHHAHDAYLNAVVGTALIKKYPKLESEFVYGDYKVYDVRKMIAKSEQEIGKATAKYFFYSNIMNFFKTEITLANGEIRKRPLIETNGETGEIVWDKGRDFATVRKVLSMPQVNIVKKTEVQTGGFSKESILPKRNSDKLIARKKDWDPKKYGGFDSPTVAYSVLVVAKVEKGKSKKLKSVKELLGITIMERSSFEKNPIDFLEAKGYKEVKKDLIIKLPKYSLFELENGRKRMLASAGELQKGNELALPSKYVNFLYLASHYEKLKGSPEDNEQKQLFVEQHKHYLDEIIEQISEFSKRVILADANLDKVLSAYNKHRDKPIREQAENIIHLFTLTNLGAPAAFKYFDTTIDRKRYTSTKEVLDATLIHQSITGLYETRIDLSQLGGDGGPAPGGSGGGGGTLNLEDEYRLYETSAEPEVSPGSTWLSDFPQAWAETGGMGLAVRQAPLIIPLKATSTPVSIKQYPMSQEAKLGIKPHIQRLLDQGILVPCQSPWNTPLLPVKKPGTNDYRPVQDLREVNKRVEDIHPTVPNPYNLLSGLPPSHRWYTVLDLKDAFFCLRLHPTSQPLFAFEWRDPGMGISGQLTWTRLPQGFKNSPTLFNEALHRDLADFRIQHPDLILLQYVDDILLAATSELDCQQGTRALLLTLGNLGYRASAKKAQLCQKQVKYLGYLLKEGQRWLTEARKETVMGQPTPKTPRQLREFLGKAGFCRLFIPGFAEMAAPLYPLTKPGTLFNWGPDQQKAYQEIKQALLTAPALGLPDLTKPFELFVDEKQGYAKGVLTQKLGPWRRPVAYLSKKLDPVAAGWPPCLRMVAAIAVLRKDAGKLTMGQPLVILAPHAVEALVKQPPDRWLSNARMTHYQAMLLDTDRVQFGPVVALNPATLLPLPEEGAPHDCLEILAETHGTRPDLTDQPIPDADHTWYTDGSSFLQEGQRKAGAAVTTETEVIWARALPAGTSAQRAELIALTQALKMAEGKRLNVYTDSRYAFATAHIHGEIYRRRGWLTSEGREIKNKSEILALLKALFLPKRLSIIHCLGHQKGDSAEARGNRLADQAAREAAIKTPPDTSTLLAGKRTADGSEFEKRTADGSEFESPKKKAKVE

SEQ ID NO: 7021 - protein, 2094 aa, synthetic construct
MPAAKRVKLDGGDKKYSIGLDIGTNSVGWAVITDEYKVPSKKFKVLGNTDRHSIKKNLIGALLFDSGETAEATRLKRTARRRYTRRKNRICYLQEIFSNEMAKVDDSFFHRLEESFLVEEDKKHERHPIFGNIVDEVAYHEKYPTIYHLRKKLVDSTDKADLRLIYLALAHMIKFRGHFLIEGDLNPDNSDVDKLFIQLVQTYNQLFEENPINASGVDAKAILSARLSKSRRLENLIAQLPGEKKNGLFGNLIALSLGLTPNFKSNFDLAEDAKLQLSKDTYDDDLDNLLAQIGDQYADLFLAAKNLSDAILLSDILRVNTEITKAPLSASMIKRYDEHHQDLTLLKALVRQQLPEKYKEIFFDQSKNGYAGYIDGGASQEEFYKFIKPILEKMDGTEELLVKLNREDLLRKQRTFDNGSIPHQIHLGELHAILRRQEDFYPFLKDNREKIEKILTFRIPYYVGPLARGNSRFAWMTRKSEETITPWNFEEVVDKGASAQSFIERMTNFDKNLPNEKVLPKHSLLYEYFTVYNELTKVKYVTEGMRKPAFLSGEQKKAIVDLLFKTNRKVTVKQLKEDYFKKIECFDSVEISGVEDRFNASLGTYHDLLKIIKDKDFLDNEENEDILEDIVLTLTLFEDREMIEERLKTYAHLFDDKVMKQLKRRRYTGWGRLSRKLINGIRDKQSGKTILDFLKSDGFANRNFMQLIHDDSLTFKEDIQKAQVSGQGDSLHEHIANLAGSPAIKKGILQTVKVVDELVKVMGRHKPENIVIEMARENQTTQKGQKNSRERMKRIEEGIKELGSQILKEHPVENTQLQNEKLYLYYLQNGRDMYVDQELDINRLSDYDVDHIVPQSFLKDDSIDNKVLTRSDKARGKSDNVPSEEVVKKMKNYWRQLLNAKLITQRKFDNLTKAERGGLSELDKAGFIKRQLVETRQITKHVAQILDSRMNTKYDENDKLIREVKVITLKSKLVSDFRKDFQFYKVREINNYHHAHDAYLNAVVGTALIKKYPKLESEFVYGDYKVYDVRKMIAKSEQEIGKATAKYFFYSNIMNFFKTEITLANGEIRKRPLIETNGETGEIVWDKGRDFATVRKVLSMPQVNIVKKTEVQTGGFSKESILPKRNSDKLIARKKDWDPKKYGGFDSPTVAYSVLVVAKVEKGKSKKLKSVKELLGITIMERSSFEKNPIDFLEAKGYKEVKKDLIIKLPKYSLFELENGRKRMLASAGELQKGNELALPSKYVNFLYLASHYEKLKGSPEDNEQKQLFVEQHKHYLDEIIEQISEFSKRVILADANLDKVLSAYNKHRDKPIREQAENIIHLFTLTNLGAPAAFKYFDTTIDRKRYTSTKEVLDATLIHQSITGLYETRIDLSQLGGDGGPAPGGSGGGGGTLGIEDEYRLHETSTEPDVSLGSTWLSDFPQAWAETGGMGLAVRQAPLIIPLKATSTPVSIQQYPMSHEARLGIKPHIQRLLDQGILVPCQSPWNTPLLPVKKPGTNDYRPVQDLREVNKRVEDIHPTVPNPYNLLSGLPPSHQWYTVLDLKDAFFCLRLHPTSQPLFAFEWRDPGMGISGQLTWTRLPQGFKNSPTLFDEALHRDLADFRIQHPDLILLQYVDDILLAATSELDCQQGTRALLQTLGDLGYRASAKKAQICQKQVKYLGYLLREGQRWLTEARKETVMGQPVPKTPRQLREFLGTAGFCRLWIPGFAEMAAPLYPLTKTGTLFSWGPDQQKAYQEIKQALLTAPALGLPDLTKPFELFVDEKQGYAKGVLTQKLGPWRRPVAYLSKKLDPVAAGWPPCLRMVAAIAVLTKDAGKLTMGQPLVILAPHAVEALVKQPPDRWLSNARMTHYQAMLLDTDRVQFGPVVALNPATLLPLPEEGAPHDCLEILAETHGTRPDLTDQPIPDADHTWYTDGSSFLQEGQRKAGAAVTTETEVIWAGALPAGTSAQRAELIALTQALKMAEGKRLNVYTDSRYAFATAHIHGEIYRRRGLLTSEGREIKNKSEILALLKALFLPKRLSIIHCLGHQKGDSAEARGNRLADQAAREAAIKTPPDTSTLLAGKRTADGSEFEKRTADGSEFESPKKKAKVE

SEQ ID NO: 7022 - protein, 2094 aa, synthetic construct
MPAAKRVKLDGGDKKYSIGLDIGTNSVGWAVITDEYKVPSKKFKVLGNTDRHSIKKNLIGALLFDSGETAEATRLKRTARRRYTRRKNRICYLQEIFSNEMAKVDDSFFHRLEESFLVEEDKKHERHPIFGNIVDEVAYHEKYPTIYHLRKKLVDSTDKADLRLIYLALAHMIKFRGHFLIEGDLNPDNSDVDKLFIQLVQTYNQLFEENPINASGVDAKAILSARLSKSRRLENLIAQLPGEKKNGLFGNLIALSLGLTPNFKSNFDLAEDAKLQLSKDTYDDDLDNLLAQIGDQYADLFLAAKNLSDAILLSDILRVNTEITKAPLSASMIKRYDEHHQDLTLLKALVRQQLPEKYKEIFFDQSKNGYAGYIDGGASQEEFYKFIKPILEKMDGTEELLVKLNREDLLRKQRTFDNGSIPHQIHLGELHAILRRQEDFYPFLKDNREKIEKILTFRIPYYVGPLARGNSRFAWMTRKSEETITPWNFEEVVDKGASAQSFIERMTNFDKNLPNEKVLPKHSLLYEYFTVYNELTKVKYVTEGMRKPAFLSGEQKKAIVDLLFKTNRKVTVKQLKEDYFKKIECFDSVEISGVEDRFNASLGTYHDLLKIIKDKDFLDNEENEDILEDIVLTLTLFEDREMIEERLKTYAHLFDDKVMKQLKRRRYTGWGRLSRKLINGIRDKQSGKTILDFLKSDGFANRNFMQLIHDDSLTFKEDIQKAQVSGQGDSLHEHIANLAGSPAIKKGILQTVKVVDELVKVMGRHKPENIVIEMARENQTTQKGQKNSRERMKRIEEGIKELGSQILKEHPVENTQLQNEKLYLYYLQNGRDMYVDQELDINRLSDYDVDHIVPQSFLKDDSIDNKVLTRSDKARGKSDNVPSEEVVKKMKNYWRQLLNAKLITQRKFDNLTKAERGGLSELDKAGFIKRQLVETRQITKHVAQILDSRMNTKYDENDKLIREVKVITLKSKLVSDFRKDFQFYKVREINNYHHAHDAYLNAVVGTALIKKYPKLESEFVYGDYKVYDVRKMIAKSEQEIGKATAKYFFYSNIMNFFKTEITLANGEIRKRPLIETNGETGEIVWDKGRDFATVRKVLSMPQVNIVKKTEVQTGGFSKESILPKRNSDKLIARKKDWDPKKYGGFDSPTVAYSVLVVAKVEKGKSKKLKSVKELLGITIMERSSFEKNPIDFLEAKGYKEVKKDLIIKLPKYSLFELENGRKRMLASAGELQKGNELALPSKYVNFLYLASHYEKLKGSPEDNEQKQLFVEQHKHYLDEIIEQISEFSKRVILADANLDKVLSAYNKHRDKPIREQAENIIHLFTLTNLGAPAAFKYFDTTIDRKRYTSTKEVLDATLIHQSITGLYETRIDLSQLGGDGGPAPGGSGGGGGTLNIEDEHRLHETSKEPDVSLGSTWLSDFPQAWAETGGMGLAVRQAPLIIPLKATSTPVSIKQYPMSQEARLGIKPHIQRLLDQGILVPCQSPWNTPLLPVKKPGTNDYRPVQDLREVNKRVEDIHPTVPNPYNLLSGLPPSHQWYTVLDLKDAFFCLRLHPTSQPLFAFEWRDPEMGISGQLTWTRLPQGFKNSPTLFDEALHRDLADFRIQHPDLILLQYVDDLLLAATSELDCQQGTRALLQTLGNLGYRASAKKAQICQKQVKYLGYLLKEGQRWLTEARKETVMGQPTPKTPRQLREFLGTAGFCRLWIPGFAEMAAPLYPLTKTGTLFNWGPDQQKAYQEIKQALLTAPALGLPDLTKPFELFVDEKQGYAKGVLTQKLGPWRRPVAYLSKKLDPVAAGWPPCLRMVAAIAVLTKDAGKLTMGQPLVILAPHAVEALVKQPPDRWLSNARMTHYQALLLDTDRVQFGPVVALNPATLLPLPEEGLQHNCLDILAEAHGTRPDLTDQPLPDADHTWYTDGSSLLQEGQRKAGAAVTTETEVIWAKALPAGTSAQRAELIALTQALKMAEGKKLNVYTDSRYAFATAHIHGEIYRRRGLLTSEGKEIKNKDEILALLKALFLPKRLSIIHCPGHQKGHSAEARGNRMADQAARKAAITETPDTSTLLAGKRTADGSEFEKRTADGSEFESPKKKAKVE

SEQ ID NO: 7023 - protein, 2088 aa, synthetic construct
MPAAKRVKLDGGDKKYSIGLDIGTNSVGWAVITDEYKVPSKKFKVLGNTDRHSIKKNLIGALLFDSGETAEATRLKRTARRRYTRRKNRICYLQEIFSNEMAKVDDSFFHRLEESFLVEEDKKHERHPIFGNIVDEVAYHEKYPTIYHLRKKLVDSTDKADLRLIYLALAHMIKFRGHFLIEGDLNPDNSDVDKLFIQLVQTYNQLFEENPINASGVDAKAILSARLSKSRRLENLIAQLPGEKKNGLFGNLIALSLGLTPNFKSNFDLAEDAKLQLSKDTYDDDLDNLLAQIGDQYADLFLAAKNLSDAILLSDILRVNTEITKAPLSASMIKRYDEHHQDLTLLKALVRQQLPEKYKEIFFDQSKNGYAGYIDGGASQEEFYKFIKPILEKMDGTEELLVKLNREDLLRKQRTFDNGSIPHQIHLGELHAILRRQEDFYPFLKDNREKIEKILTFRIPYYVGPLARGNSRFAWMTRKSEETITPWNFEEVVDKGASAQSFIERMTNFDKNLPNEKVLPKHSLLYEYFTVYNELTKVKYVTEGMRKPAFLSGEQKKAIVDLLFKTNRKVTVKQLKEDYFKKIECFDSVEISGVEDRFNASLGTYHDLLKIIKDKDFLDNEENEDILEDIVLTLTLFEDREMIEERLKTYAHLFDDKVMKQLKRRRYTGWGRLSRKLINGIRDKQSGKTILDFLKSDGFANRNFMQLIHDDSLTFKEDIQKAQVSGQGDSLHEHIANLAGSPAIKKGILQTVKVVDELVKVMGRHKPENIVIEMARENQTTQKGQKNSRERMKRIEEGIKELGSQILKEHPVENTQLQNEKLYLYYLQNGRDMYVDQELDINRLSDYDVDHIVPQSFLKDDSIDNKVLTRSDKARGKSDNVPSEEVVKKMKNYWRQLLNAKLITQRKFDNLTKAERGGLSELDKAGFIKRQLVETRQITKHVAQILDSRMNTKYDENDKLIREVKVITLKSKLVSDFRKDFQFYKVREINNYHHAHDAYLNAVVGTALIKKYPKLESEFVYGDYKVYDVRKMIAKSEQEIGKATAKYFFYSNIMNFFKTEITLANGEIRKRPLIETNGETGEIVWDKGRDFATVRKVLSMPQVNIVKKTEVQTGGFSKESILPKRNSDKLIARKKDWDPKKYGGFDSPTVAYSVLVVAKVEKGKSKKLKSVKELLGITIMERSSFEKNPIDFLEAKGYKEVKKDLIIKLPKYSLFELENGRKRMLASAGELQKGNELALPSKYVNFLYLASHYEKLKGSPEDNEQKQLFVEQHKHYLDEIIEQISEFSKRVILADANLDKVLSAYNKHRDKPIREQAENIIHLFTLTNLGAPAAFKYFDTTIDRKRYTSTKEVLDATLIHQSITGLYETRIDLSQLGGDGGPAPGGSGGGGGTLQLDDEYRLYSPLVKPDQNIQFWLEQFPQAWAETAGMGLAKQVPPQVIQLKASATPVSVRQYPLSKEAQEGIRPHVQRLIQQGILVPVQSPWNTPLLPVRKPGTNDYRPVQDLREVNKRVQDIHPTVPNPYNLLCALPPQRSWYTVLDLKDAFFCLRLHPTSQPLFAFEWRDPGTGRTGQLTWTRLPQGFKNSPTIFDEALHRDLANFRIQHPQVTLLQYVDDLLLAGATKQDCLEGTKALLLELSDLGYRASAKKAQICRREVTYLGYSLRDGQRWLTEARKKTVVQIPAPTTAKQVREFLGTAGFCRLWIPGFATLAAPLYPLTKEKGEFSWAPEHQKAFDAIKKALLSAPALALPDVTKPFTLYVDERKGVARGVLTQTLGPWRRPVAYLSKKLDPVASGWPVCLKAIAAVAILVKDADKLTLGQNITVIAPHALENIVRQPPDRWMTNARMTHYQSLLLTERVTFAPPAALNPATLLPEETDEPVTHDCHQLLIEETGVRKDLTDIPLTGEVLTWFTDGSSYVVEGKRMAGAAVVDGTRTIWASSLPEGTSAQKAELMALTQALRLAEGKSINIYTDSRYAFATAHVHGAIYKQRGLLTSAGREIKNKEEILSLLEALHLPKRLAIIHCPGHQKAKDPISRGNQMADRVAKQAAQGVNLLAGKRTADGSEFEKRTADGSEFESPKKKAKVE

SEQ ID NO: 7024 - protein, 2085 aa, synthetic construct
MPAAKRVKLDGGDKKYSIGLDIGTNSVGWAVITDEYKVPSKKFKVLGNTDRHSIKKNLIGALLFDSGETAEATRLKRTARRRYTRRKNRICYLQEIFSNEMAKVDDSFFHRLEESFLVEEDKKHERHPIFGNIVDEVAYHEKYPTIYHLRKKLVDSTDKADLRLIYLALAHMIKFRGHFLIEGDLNPDNSDVDKLFIQLVQTYNQLFEENPINASGVDAKAILSARLSKSRRLENLIAQLPGEKKNGLFGNLIALSLGLTPNFKSNFDLAEDAKLQLSKDTYDDDLDNLLAQIGDQYADLFLAAKNLSDAILLSDILRVNTEITKAPLSASMIKRYDEHHQDLTLLKALVRQQLPEKYKEIFFDQSKNGYAGYIDGGASQEEFYKFIKPILEKMDGTEELLVKLNREDLLRKQRTFDNGSIPHQIHLGELHAILRRQEDFYPFLKDNREKIEKILTFRIPYYVGPLARGNSRFAWMTRKSEETITPWNFEEVVDKGASAQSFIERMTNFDKNLPNEKVLPKHSLLYEYFTVYNELTKVKYVTEGMRKPAFLSGEQKKAIVDLLFKTNRKVTVKQLKEDYFKKIECFDSVEISGVEDRFNASLGTYHDLLKIIKDKDFLDNEENEDILEDIVLTLTLFEDREMIEERLKTYAHLFDDKVMKQLKRRRYTGWGRLSRKLINGIRDKQSGKTILDFLKSDGFANRNFMQLIHDDSLTFKEDIQKAQVSGQGDSLHEHIANLAGSPAIKKGILQTVKVVDELVKVMGRHKPENIVIEMARENQTTQKGQKNSRERMKRIEEGIKELGSQILKEHPVENTQLQNEKLYLYYLQNGRDMYVDQELDINRLSDYDVDHIVPQSFLKDDSIDNKVLTRSDKARGKSDNVPSEEVVKKMKNYWRQLLNAKLITQRKFDNLTKAERGGLSELDKAGFIKRQLVETRQITKHVAQILDSRMNTKYDENDKLIREVKVITLKSKLVSDFRKDFQFYKVREINNYHHAHDAYLNAVVGTALIKKYPKLESEFVYGDYKVYDVRKMIAKSEQEIGKATAKYFFYSNIMNFFKTEITLANGEIRKRPLIETNGETGEIVWDKGRDFATVRKVLSMPQVNIVKKTEVQTGGFSKESILPKRNSDKLIARKKDWDPKKYGGFDSPTVAYSVLVVAKVEKGKSKKLKSVKELLGITIMERSSFEKNPIDFLEAKGYKEVKKDLIIKLPKYSLFELENGRKRMLASAGELQKGNELALPSKYVNFLYLASHYEKLKGSPEDNEQKQLFVEQHKHYLDEIIEQISEFSKRVILADANLDKVLSAYNKHRDKPIREQAENIIHLFTLTNLGAPAAFKYFDTTIDRKRYTSTKEVLDATLIHQSITGLYETRIDLSQLGGDGGPAPGGSGGGGGIPWLMKKPLQLTTLVPLQEYEERLLKQTMLTGSYKEKLQSLFLKYDALWQHWENQVGHRRIKPHHIATGTVNPRPQKQYPINPKAKASIQTVINDLLKQGVLIQQNSIMNTPVYPVPKPDGKWRMVLDYREVNKTIPLIAAQNQHSAGILSSIFRGKYKTTLDLSNGFWAHSITPESYWLTAFTWLGQQYCWTRLPQGFLNSPALFNADVVDLLKEVPNVQVYVDDIYISHDDPREHLEQLEKVFSLLLNAGYVVSLKKSEIAQHEVEFLGFNITKEGRGLTETFKQKLLNITPPRDLKQLQSILGKLNFARNFIPNFSELVKPLYNIIATAPGKYITWTTDNSQQLQNIISMLNSAENLEERNPEVRLIMKVNTSPSAGYIRFYNEFAKRPIMYLNYVYTKAEVKFTNTEKLLTTIHKGLIKALDLGMGQEILVYSPIVSMTKIQKTPLPERKALPIRWITWMSYLEDPRIQFHYDKTLPELQQVPTVTDDIIAKIKHPSEFSMVFYTDGSAIKHPNVNKSHNAGMGIAQVQFKPEFTVINTWSIPLGDHTAQLAEVAAVEFACKKALKIDGPVLIVTDSFYVAESVNKELPYWQSNGFFNNKKKPLKHVSKWKSIADCIQLKPDIIIIHEKGHQPTASTFHTEGNNLADKLATQGSYVVNAGKRTADGSEFEKRTADGSEFESPKKKAKVE

SEQ ID NO: 7025 - protein, 2096 aa, synthetic construct
MPAAKRVKLDGGDKKYSIGLDIGTNSVGWAVITDEYKVPSKKFKVLGNTDRHSIKKNLIGALLFDSGETAEATRLKRTARRRYTRRKNRICYLQEIFSNEMAKVDDSFFHRLEESFLVEEDKKHERHPIFGNIVDEVAYHEKYPTIYHLRKKLVDSTDKADLRLIYLALAHMIKFRGHFLIEGDLNPDNSDVDKLFIQLVQTYNQLFEENPINASGVDAKAILSARLSKSRRLENLIAQLPGEKKNGLFGNLIALSLGLTPNFKSNFDLAEDAKLQLSKDTYDDDLDNLLAQIGDQYADLFLAAKNLSDAILLSDILRVNTEITKAPLSASMIKRYDEHHQDLTLLKALVRQQLPEKYKEIFFDQSKNGYAGYIDGGASQEEFYKFIKPILEKMDGTEELLVKLNREDLLRKQRTFDNGSIPHQIHLGELHAILRRQEDFYPFLKDNREKIEKILTFRIPYYVGPLARGNSRFAWMTRKSEETITPWNFEEVVDKGASAQSFIERMTNFDKNLPNEKVLPKHSLLYEYFTVYNELTKVKYVTEGMRKPAFLSGEQKKAIVDLLFKTNRKVTVKQLKEDYFKKIECFDSVEISGVEDRFNASLGTYHDLLKIIKDKDFLDNEENEDILEDIVLTLTLFEDREMIEERLKTYAHLFDDKVMKQLKRRRYTGWGRLSRKLINGIRDKQSGKTILDFLKSDGFANRNFMQLIHDDSLTFKEDIQKAQVSGQGDSLHEHIANLAGSPAIKKGILQTVKVVDELVKVMGRHKPENIVIEMARENQTTQKGQKNSRERMKRIEEGIKELGSQILKEHPVENTQLQNEKLYLYYLQNGRDMYVDQELDINRLSDYDVDHIVPQSFLKDDSIDNKVLTRSDKARGKSDNVPSEEVVKKMKNYWRQLLNAKLITQRKFDNLTKAERGGLSELDKAGFIKRQLVETRQITKHVAQILDSRMNTKYDENDKLIREVKVITLKSKLVSDFRKDFQFYKVREINNYHHAHDAYLNAVVGTALIKKYPKLESEFVYGDYKVYDVRKMIAKSEQEIGKATAKYFFYSNIMNFFKTEITLANGEIRKRPLIETNGETGEIVWDKGRDFATVRKVLSMPQVNIVKKTEVQTGGFSKESILPKRNSDKLIARKKDWDPKKYGGFDSPTVAYSVLVVAKVEKGKSKKLKSVKELLGITIMERSSFEKNPIDFLEAKGYKEVKKDLIIKLPKYSLFELENGRKRMLASAGELQKGNELALPSKYVNFLYLASHYEKLKGSPEDNEQKQLFVEQHKHYLDEIIEQISEFSKRVILADANLDKVLSAYNKHRDKPIREQAENIIHLFTLTNLGAPAAFKYFDTTIDRKRYTSTKEVLDATLIHQSITGLYETRIDLSQLGGDGGPAPGGGGGSGGTAPLEEEYRLFLEAPIQNVTLLEQWKREIPKVWAEINPPGLASTQAPIHVQLLSTALPVRVRQYPITLEAKRSLRETIRKFRAAGILRPVHSPWNTPLLPVRKSGTSEYRMVQDLREVNKRVETIHPTVPNPYTLLSLLPPDRIWYSVLDLKDAFFCIPLAPESQLIFAFEWADAEEGESGQLTWTRLPQGFKNSPTLFDEALNRDLQGFRLDHPSVSLLQYVDDLLIAADTQAACLSATRDLLMTLAELGYRVSGKKAQLCQEEVTYLGFKIHKGSRSLSNSRTQAILQIPVPKTKRQVREFLGTIGYCRLWIPGFAELAQPLYAATRGGNDPLVWGEKEEEAFQSLKLALTQPPALALPSLDKPFQLFVEETSGAAKGVLTQALGPWKRPVAYLSKRLDPVAAGWPRCLRAIAAAALLTREASKLTFGQDIEITSSHNLESLLRSPPDKWLTNARITQYQVLLLDPPRVRFKQTAALNPATLLPETDDTLPIHHCLDTLDSLTSTRPDLTDQPLAQAEATLFTDGSSYIRDGKRYAGAAVVTLDSVIWAEPLPIGTSAQKAELIALTKALEWSKDKSVNIYTDSRYAFATLHVHGMIYRERGLLTAGGKAIKNAPEILALLTAVWLPKRVAVMHCKGHQKDDAPTSTGNRRADEVAREVAIRPLSTQATISAGKRTADGSEFEKRTADGSEFESPKKKAKVE

SEQ ID NO: 7026 - protein, 2100 aa, synthetic construct
MPAAKRVKLDGGDKKYSIGLDIGTNSVGWAVITDEYKVPSKKFKVLGNTDRHSIKKNLIGALLFDSGETAEATRLKRTARRRYTRRKNRICYLQEIFSNEMAKVDDSFFHRLEESFLVEEDKKHERHPIFGNIVDEVAYHEKYPTIYHLRKKLVDSTDKADLRLIYLALAHMIKFRGHFLIEGDLNPDNSDVDKLFIQLVQTYNQLFEENPINASGVDAKAILSARLSKSRRLENLIAQLPGEKKNGLFGNLIALSLGLTPNFKSNFDLAEDAKLQLSKDTYDDDLDNLLAQIGDQYADLFLAAKNLSDAILLSDILRVNTEITKAPLSASMIKRYDEHHQDLTLLKALVRQQLPEKYKEIFFDQSKNGYAGYIDGGASQEEFYKFIKPILEKMDGTEELLVKLNREDLLRKQRTFDNGSIPHQIHLGELHAILRRQEDFYPFLKDNREKIEKILTFRIPYYVGPLARGNSRFAWMTRKSEETITPWNFEEVVDKGASAQSFIERMTNFDKNLPNEKVLPKHSLLYEYFTVYNELTKVKYVTEGMRKPAFLSGEQKKAIVDLLFKTNRKVTVKQLKEDYFKKIECFDSVEISGVEDRFNASLGTYHDLLKIIKDKDFLDNEENEDILEDIVLTLTLFEDREMIEERLKTYAHLFDDKVMKQLKRRRYTGWGRLSRKLINGIRDKQSGKTILDFLKSDGFANRNFMQLIHDDSLTFKEDIQKAQVSGQGDSLHEHIANLAGSPAIKKGILQTVKVVDELVKVMGRHKPENIVIEMARENQTTQKGQKNSRERMKRIEEGIKELGSQILKEHPVENTQLQNEKLYLYYLQNGRDMYVDQELDINRLSDYDVDHIVPQSFLKDDSIDNKVLTRSDKARGKSDNVPSEEVVKKMKNYWRQLLNAKLITQRKFDNLTKAERGGLSELDKAGFIKRQLVETRQITKHVAQILDSRMNTKYDENDKLIREVKVITLKSKLVSDFRKDFQFYKVREINNYHHAHDAYLNAVVGTALIKKYPKLESEFVYGDYKVYDVRKMIAKSEQEIGKATAKYFFYSNIMNFFKTEITLANGEIRKRPLIETNGETGEIVWDKGRDFATVRKVLSMPQVNIVKKTEVQTGGFSKESILPKRNSDKLIARKKDWDPKKYGGFDSPTVAYSVLVVAKVEKGKSKKLKSVKELLGITIMERSSFEKNPIDFLEAKGYKEVKKDLIIKLPKYSLFELENGRKRMLASAGELQKGNELALPSKYVNFLYLASHYEKLKGSPEDNEQKQLFVEQHKHYLDEIIEQISEFSKRVILADANLDKVLSAYNKHRDKPIREQAENIIHLFTLTNLGAPAAFKYFDTTIDRKRYTSTKEVLDATLIHQSITGLYETRIDLSQLGGDGGPAPGGGGGSGGTVSLQDEHRLFDIPVTTSLPDVWLQDFPQAWAETGGLGRAKCQAPIIIDLKPTAVPVSIKQYPMSLEAHMGIRQHIIKFLELGVLRPCRSPWNTPLLPVKKPGTQDYRPVQDLREINKRTVDIHPTVPNPYNLLSTLKPDYSWYTVLDLKDAFFCLPLAPQSQELFAFEWKDPERGISGQLTWTRLPQGFKNSPTLFNEALHRDLTDFRTQHPEVTLLQYVDDLLLAAPTKKACTQGTRHLLQELGEKGYRASAKKAQICQTKVTYLGYILSEGKRWLTPGRIETVARIPPPRNPREVREFLGTAGFCRLWIPGFAELAAPLYALTKPSTPFTWQTEHQLAFEALKKALLSAPALGLPDTSKPFTLFLDERQGIAKGVLTQKLGPWKRPVAYLSKKLDPVAAGWPPCLRIMAATAMLVKDSAKLTLGQPLTVITPHTLEAIVRQPPDRWITNARLTHYQALLLDTDRVQFGPPVTLNPATLLPVPENQPSPHDCRQVLAETHGTREDLKDQELPDADHTWYTDGSSYLDSGTRRAGAAVVDGHNTIWAQSLPPGTSAQKAELIALTKALELSKGKKANIYTDSRYAFATAHTHGSIYERRGWLTSEGKEIKNKAEIIALLKALFLPQEVAIIHCPGHQKGQDPVAVGNRQADRVARQAAMAEVLTLATEPDNTSHITAGKRTADGSEFEKRTADGSEFESPKKKAKVE

SEQ ID NO: 7027 - protein, 2171 aa, synthetic construct
MPAAKRVKLDGGDKKYSIGLDIGTNSVGWAVITDEYKVPSKKFKVLGNTDRHSIKKNLIGALLFDSGETAEATRLKRTARRRYTRRKNRICYLQEIFSNEMAKVDDSFFHRLEESFLVEEDKKHERHPIFGNIVDEVAYHEKYPTIYHLRKKLVDSTDKADLRLIYLALAHMIKFRGHFLIEGDLNPDNSDVDKLFIQLVQTYNQLFEENPINASGVDAKAILSARLSKSRRLENLIAQLPGEKKNGLFGNLIALSLGLTPNFKSNFDLAEDAKLQLSKDTYDDDLDNLLAQIGDQYADLFLAAKNLSDAILLSDILRVNTEITKAPLSASMIKRYDEHHQDLTLLKALVRQQLPEKYKEIFFDQSKNGYAGYIDGGASQEEFYKFIKPILEKMDGTEELLVKLNREDLLRKQRTFDNGSIPHQIHLGELHAILRRQEDFYPFLKDNREKIEKILTFRIPYYVGPLARGNSRFAWMTRKSEETITPWNFEEVVDKGASAQSFIERMTNFDKNLPNEKVLPKHSLLYEYFTVYNELTKVKYVTEGMRKPAFLSGEQKKAIVDLLFKTNRKVTVKQLKEDYFKKIECFDSVEISGVEDRFNASLGTYHDLLKIIKDKDFLDNEENEDILEDIVLTLTLFEDREMIEERLKTYAHLFDDKVMKQLKRRRYTGWGRLSRKLINGIRDKQSGKTILDFLKSDGFANRNFMQLIHDDSLTFKEDIQKAQVSGQGDSLHEHIANLAGSPAIKKGILQTVKVVDELVKVMGRHKPENIVIEMARENQTTQKGQKNSRERMKRIEEGIKELGSQILKEHPVENTQLQNEKLYLYYLQNGRDMYVDQELDINRLSDYDVDHIVPQSFLKDDSIDNKVLTRSDKARGKSDNVPSEEVVKKMKNYWRQLLNAKLITQRKFDNLTKAERGGLSELDKAGFIKRQLVETRQITKHVAQILDSRMNTKYDENDKLIREVKVITLKSKLVSDFRKDFQFYKVREINNYHHAHDAYLNAVVGTALIKKYPKLESEFVYGDYKVYDVRKMIAKSEQEIGKATAKYFFYSNIMNFFKTEITLANGEIRKRPLIETNGETGEIVWDKGRDFATVRKVLSMPQVNIVKKTEVQTGGFSKESILPKRNSDKLIARKKDWDPKKYGGFDSPTVAYSVLVVAKVEKGKSKKLKSVKELLGITIMERSSFEKNPIDFLEAKGYKEVKKDLIIKLPKYSLFELENGRKRMLASAGELQKGNELALPSKYVNFLYLASHYEKLKGSPEDNEQKQLFVEQHKHYLDEIIEQISEFSKRVILADANLDKVLSAYNKHRDKPIREQAENIIHLFTLTNLGAPAAFKYFDTTIDRKRYTSTKEVLDATLIHQSITGLYETRIDLSQLGGDGGPAPGGGGGSGGMDLLKPLTVERKGVKIKGYWNSQADITCVPKDLLQGEEPVRQQNVTTIHGTQEGDVYYVNLKIDGRRINTEVIGTTLDYAIITPGDVPWILKKPLELTIKLDLEEQQGTLLNNSILSKKGKEELKQLFEKYSALWQSWENQVGHRRIRPHKIATGTVKPTPQKQYHINPKAKPDIQIVINDLLKQGVLIQKESTMNTPVYPVPKPNGRWRMVLDYRAVNKVTPLIAVQNQHSYGILGSLFKGRYKTTIDLSNGFWAHPIVPEDYWITAFTWQGKQYCWTVLPQGFLNSPGLFTGDVVDLLQGIPNVEVYVDDVYISHDSEKEHLEYLDILFNRLKEAGYIISLKKSNIANSIVDFLGFQITNEGRGLTDTFKEKLENITAPTTLKQLQSILGLLNFARNFIPDFTELIAPLYALIPKSTKNYVPWQIEHSTTLETLITKLNGAEYLQGRKGDKTLIMKVNASYTTGYIRYYNEGEKKPISYVSIVFSKTELKFTELEKLLTTVHKGLLKALDLSMGQNIHVYSPIVSMQNIQKTPQTAKKALASRWLSWLSYLEDPRIRFFYDPQMPALKDLPAVDTGKDNKKHPSNFQHIFYTDGSAITSPTKEGHLNAGMGIVYFINKDGNLQKQQEWSISLGNHTAQFAEIAAFEFALKKCLPLGGNILVVTDSNYVAKAYNEELDVWASNGFVNNRKKPLKHISKWKSVADLKRLRPDVVVTHEPGHQKLDSSPHAYGNNLADQLATQASFKVHAGKRTADGSEFEKRTADGSEFESPKKKAKVE

SEQ ID NO: 7028 - protein, 2085 aa, synthetic construct
MPAAKRVKLDGGDKKYSIGLDIGTNSVGWAVITDEYKVPSKKFKVLGNTDRHSIKKNLIGALLFDSGETAEATRLKRTARRRYTRRKNRICYLQEIFSNEMAKVDDSFFHRLEESFLVEEDKKHERHPIFGNIVDEVAYHEKYPTIYHLRKKLVDSTDKADLRLIYLALAHMIKFRGHFLIEGDLNPDNSDVDKLFIQLVQTYNQLFEENPINASGVDAKAILSARLSKSRRLENLIAQLPGEKKNGLFGNLIALSLGLTPNFKSNFDLAEDAKLQLSKDTYDDDLDNLLAQIGDQYADLFLAAKNLSDAILLSDILRVNTEITKAPLSASMIKRYDEHHQDLTLLKALVRQQLPEKYKEIFFDQSKNGYAGYIDGGASQEEFYKFIKPILEKMDGTEELLVKLNREDLLRKQRTFDNGSIPHQIHLGELHAILRRQEDFYPFLKDNREKIEKILTFRIPYYVGPLARGNSRFAWMTRKSEETITPWNFEEVVDKGASAQSFIERMTNFDKNLPNEKVLPKHSLLYEYFTVYNELTKVKYVTEGMRKPAFLSGEQKKAIVDLLFKTNRKVTVKQLKEDYFKKIECFDSVEISGVEDRFNASLGTYHDLLKIIKDKDFLDNEENEDILEDIVLTLTLFEDREMIEERLKTYAHLFDDKVMKQLKRRRYTGWGRLSRKLINGIRDKQSGKTILDFLKSDGFANRNFMQLIHDDSLTFKEDIQKAQVSGQGDSLHEHIANLAGSPAIKKGILQTVKVVDELVKVMGRHKPENIVIEMARENQTTQKGQKNSRERMKRIEEGIKELGSQILKEHPVENTQLQNEKLYLYYLQNGRDMYVDQELDINRLSDYDVDHIVPQSFLKDDSIDNKVLTRSDKARGKSDNVPSEEVVKKMKNYWRQLLNAKLITQRKFDNLTKAERGGLSELDKAGFIKRQLVETRQITKHVAQILDSRMNTKYDENDKLIREVKVITLKSKLVSDFRKDFQFYKVREINNYHHAHDAYLNAVVGTALIKKYPKLESEFVYGDYKVYDVRKMIAKSEQEIGKATAKYFFYSNIMNFFKTEITLANGEIRKRPLIETNGETGEIVWDKGRDFATVRKVLSMPQVNIVKKTEVQTGGFSKESILPKRNSDKLIARKKDWDPKKYGGFDSPTVAYSVLVVAKVEKGKSKKLKSVKELLGITIMERSSFEKNPIDFLEAKGYKEVKKDLIIKLPKYSLFELENGRKRMLASAGELQKGNELALPSKYVNFLYLASHYEKLKGSPEDNEQKQLFVEQHKHYLDEIIEQISEFSKRVILADANLDKVLSAYNKHRDKPIREQAENIIHLFTLTNLGAPAAFKYFDTTIDRKRYTSTKEVLDATLIHQSITGLYETRIDLSQLGGDGGPAPGGGGGSGGVPWILKKPLELTIKLDLEEQQGTLLNNSILSKKGKEELKQLFEKYSALWQSWENQVGHRRIRPHKIATGTVKPTPQKQYHINPKAKPDIQIVINDLLKQGVLIQKESTMNTPVYPVPKPNGRWRMVLDYRAVNKVTPLIAVQNQHSYGILGSLFKGRYKTTIDLSNGFWAHPIVPEDYWITAFTWQGKQYCWTVLPQGFLNSPGLFTGDVVDLLQGIPNVEVYVDDVYISHDSEKEHLEYLDILFNRLKEAGYIISLKKSNIANSIVDFLGFQITNEGRGLTDTFKEKLENITAPTTLKQLQSILGLLNFARNFIPDFTELIAPLYALIPKSTKNYVPWQIEHSTTLETLITKLNGAEYLQGRKGDKTLIMKVNASYTTGYIRYYNEGEKKPISYVSIVFSKTELKFTELEKLLTTVHKGLLKALDLSMGQNIHVYSPIVSMQNIQKTPQTAKKALASRWLSWLSYLEDPRIRFFYDPQMPALKDLPAVDTGKDNKKHPSNFQHIFYTDGSAITSPTKEGHLNAGMGIVYFINKDGNLQKQQEWSISLGNHTAQFAEIAAFEFALKKCLPLGGNILVVTDSNYVAKAYNEELDVWASNGFVNNRKKPLKHISKWKSVADLKRLRPDVVVTHEPGHQKLDSSPHAYGNNLADQLATQASFKVHAGKRTADGSEFEKRTADGSEFESPKKKAKVE

SEQ ID NO: 7029 - protein, 2093 aa, synthetic construct
MPAAKRVKLDGGDKKYSIGLDIGTNSVGWAVITDEYKVPSKKFKVLGNTDRHSIKKNLIGALLFDSGETAEATRLKRTARRRYTRRKNRICYLQEIFSNEMAKVDDSFFHRLEESFLVEEDKKHERHPIFGNIVDEVAYHEKYPTIYHLRKKLVDSTDKADLRLIYLALAHMIKFRGHFLIEGDLNPDNSDVDKLFIQLVQTYNQLFEENPINASGVDAKAILSARLSKSRRLENLIAQLPGEKKNGLFGNLIALSLGLTPNFKSNFDLAEDAKLQLSKDTYDDDLDNLLAQIGDQYADLFLAAKNLSDAILLSDILRVNTEITKAPLSASMIKRYDEHHQDLTLLKALVRQQLPEKYKEIFFDQSKNGYAGYIDGGASQEEFYKFIKPILEKMDGTEELLVKLNREDLLRKQRTFDNGSIPHQIHLGELHAILRRQEDFYPFLKDNREKIEKILTFRIPYYVGPLARGNSRFAWMTRKSEETITPWNFEEVVDKGASAQSFIERMTNFDKNLPNEKVLPKHSLLYEYFTVYNELTKVKYVTEGMRKPAFLSGEQKKAIVDLLFKTNRKVTVKQLKEDYFKKIECFDSVEISGVEDRFNASLGTYHDLLKIIKDKDFLDNEENEDILEDIVLTLTLFEDREMIEERLKTYAHLFDDKVMKQLKRRRYTGWGRLSRKLINGIRDKQSGKTILDFLKSDGFANRNFMQLIHDDSLTFKEDIQKAQVSGQGDSLHEHIANLAGSPAIKKGILQTVKVVDELVKVMGRHKPENIVIEMARENQTTQKGQKNSRERMKRIEEGIKELGSQILKEHPVENTQLQNEKLYLYYLQNGRDMYVDQELDINRLSDYDVDHIVPQSFLKDDSIDNKVLTRSDKARGKSDNVPSEEVVKKMKNYWRQLLNAKLITQRKFDNLTKAERGGLSELDKAGFIKRQLVETRQITKHVAQILDSRMNTKYDENDKLIREVKVITLKSKLVSDFRKDFQFYKVREINNYHHAHDAYLNAVVGTALIKKYPKLESEFVYGDYKVYDVRKMIAKSEQEIGKATAKYFFYSNIMNFFKTEITLANGEIRKRPLIETNGETGEIVWDKGRDFATVRKVLSMPQVNIVKKTEVQTGGFSKESILPKRNSDKLIARKKDWDPKKYGGFDSPTVAYSVLVVAKVEKGKSKKLKSVKELLGITIMERSSFEKNPIDFLEAKGYKEVKKDLIIKLPKYSLFELENGRKRMLASAGELQKGNELALPSKYVNFLYLASHYEKLKGSPEDNEQKQLFVEQHKHYLDEIIEQISEFSKRVILADANLDKVLSAYNKHRDKPIREQAENIIHLFTLTNLGAPAAFKYFDTTIDRKRYTSTKEVLDATLIHQSITGLYETRIDLSQLGGDGGPAPGGGGGSGGTLQLEEEYRLFEPESTQKQEMDIWLKNFPQAWAETGGMGTAHCQAPVLIQLKATATPISIRQYPMPHEAYQGIKPHIRRMLDQGILKPCQSPWNTPLLPVKKPGTEDYRPVQDLREVNKRVEDIHPTVPNPYNLLSTLPPSHPWYTVLDLKDAFFCLRLHSESQLLFAFEWRDPEIGLSGQLTWTRLPQGFKNSPTLFNEALHSDLADFRVRYPALVLLQYVDDLLLAAATRTECLEGTKALLETLGNKGYRASAKKAQICLQEVTYLGYSLKDGQRWLTKARKEAILSIPVPKNSRQVREFLGTAGYCRLWIPGFAELAAPLYPLTRPGTLFQWGTEQQLAFEDIKKALLSSPALGLPDITKPFELFIDENSGFAKGVLVQKLGPWKRPVAYLSKKLDTVASGWPPCLRMVAAIAILVKDAGKLTLGQPLTILTSHPVEALVRQPPNKWLSNARMTHYQAMLLDAERVHFGPTVSLNPATLLPLPSGGNHHDCLQILAETHGTRPDLTDQPLPDADLTWYTDGSSFIRNGEREAGAAVTTESEVIWAAPLPPGTSAQRAELIALTQALKMAEGKKLTVYTDSRYAFATTHVHGEIYRRRGWLTSEGKEIKNKNEILALLEALFLPKRLSIIHCPGHQKGDSPQAKGNRLADDTAKKAATETHSSLTVLPAGKRTADGSEFEKRTADGSEFESPKKKAKVE

SEQ ID NO: 7030 - protein, 2125 aa, synthetic construct
MPAAKRVKLDGGDKKYSIGLDIGTNSVGWAVITDEYKVPSKKFKVLGNTDRHSIKKNLIGALLFDSGETAEATRLKRTARRRYTRRKNRICYLQEIFSNEMAKVDDSFFHRLEESFLVEEDKKHERHPIFGNIVDEVAYHEKYPTIYHLRKKLVDSTDKADLRLIYLALAHMIKFRGHFLIEGDLNPDNSDVDKLFIQLVQTYNQLFEENPINASGVDAKAILSARLSKSRRLENLIAQLPGEKKNGLFGNLIALSLGLTPNFKSNFDLAEDAKLQLSKDTYDDDLDNLLAQIGDQYADLFLAAKNLSDAILLSDILRVNTEITKAPLSASMIKRYDEHHQDLTLLKALVRQQLPEKYKEIFFDQSKNGYAGYIDGGASQEEFYKFIKPILEKMDGTEELLVKLNREDLLRKQRTFDNGSIPHQIHLGELHAILRRQEDFYPFLKDNREKIEKILTFRIPYYVGPLARGNSRFAWMTRKSEETITPWNFEEVVDKGASAQSFIERMTNFDKNLPNEKVLPKHSLLYEYFTVYNELTKVKYVTEGMRKPAFLSGEQKKAIVDLLFKTNRKVTVKQLKEDYFKKIECFDSVEISGVEDRFNASLGTYHDLLKIIKDKDFLDNEENEDILEDIVLTLTLFEDREMIEERLKTYAHLFDDKVMKQLKRRRYTGWGRLSRKLINGIRDKQSGKTILDFLKSDGFANRNFMQLIHDDSLTFKEDIQKAQVSGQGDSLHEHIANLAGSPAIKKGILQTVKVVDELVKVMGRHKPENIVIEMARENQTTQKGQKNSRERMKRIEEGIKELGSQILKEHPVENTQLQNEKLYLYYLQNGRDMYVDQELDINRLSDYDVDHIVPQSFLKDDSIDNKVLTRSDKARGKSDNVPSEEVVKKMKNYWRQLLNAKLITQRKFDNLTKAERGGLSELDKAGFIKRQLVETRQITKHVAQILDSRMNTKYDENDKLIREVKVITLKSKLVSDFRKDFQFYKVREINNYHHAHDAYLNAVVGTALIKKYPKLESEFVYGDYKVYDVRKMIAKSEQEIGKATAKYFFYSNIMNFFKTEITLANGEIRKRPLIETNGETGEIVWDKGRDFATVRKVLSMPQVNIVKKTEVQTGGFSKESILPKRNSDKLIARKKDWDPKKYGGFDSPTVAYSVLVVAKVEKGKSKKLKSVKELLGITIMERSSFEKNPIDFLEAKGYKEVKKDLIIKLPKYSLFELENGRKRMLASAGELQKGNELALPSKYVNFLYLASHYEKLKGSPEDNEQKQLFVEQHKHYLDEIIEQISEFSKRVILADANLDKVLSAYNKHRDKPIREQAENIIHLFTLTNLGAPAAFKYFDTTIDRKRYTSTKEVLDATLIHQSITGLYETRIDLSQLGGDGGPAPGGGGGSGGLLGRDLLTKLKAQIQFSTEGPQVTWEDRPAMCLVLNLEEEYRLHEKPVPPSIDPSWLQLFPMVWAEKAGMGLANQVPPVVVELKSDASPVAVRQYPMSKEAREGIRPHIQRFLDLGILVPCQSPWNTPLLPVKKPGTNDYRPVQDLREVNKRVQDIHPTVPNPYNLLSSLPPSHTWYSVLDLKDAFFCLKLHPNSQPLFAFEWRDPEKGNTGQLTWTRLPQGFKNSPTLFNEALHRDLASFRALNPQVVMLQYVDDLLVAAPTYRDCKEGTRRLLQELSKLGYRVSAKKAQLCREEVTYLGYLLKGGKRWLTPARKATVMKIPTPTTPRQVREFLGTAGFCRLWIPGFASLAAPLYPLTRPKVPFTWTEAHQEAFGRIKEALLSAPALALPDLTKPFALYVDEKEGVARGVLTQTLGPWRRPVAYLSKKLDPVASGWPTCLKAIAAVALLLKDADKLTLGQNVLVIAPHNLESIVRQPPDRWMTNARMTHYQSLLLNERVSFAPPAILNPATLLPVESDDTPIHICSEILAEETGTRPDLRDQPLPGVPAWYTDGSSFIMDGRRQAGAAIVDNKRTVWASNLPEGTSAQKAELIALTQALRLAEGKSINIYTDSRYAFATAHVHGAIYKQRGWLTSAGKDIKNKEEILALLEAIHLPKRVAIIHCPGHQRGTDPVATGNRKADEAAKQAAQSTRILTETTKNAGKRTADGSEFEKRTADGSEFESPKKKAKVE

SEQ ID NO: 7031 - protein, 2125 aa, synthetic construct
MPAAKRVKLDGGDKKYSIGLDIGTNSVGWAVITDEYKVPSKKFKVLGNTDRHSIKKNLIGALLFDSGETAEATRLKRTARRRYTRRKNRICYLQEIFSNEMAKVDDSFFHRLEESFLVEEDKKHERHPIFGNIVDEVAYHEKYPTIYHLRKKLVDSTDKADLRLIYLALAHMIKFRGHFLIEGDLNPDNSDVDKLFIQLVQTYNQLFEENPINASGVDAKAILSARLSKSRRLENLIAQLPGEKKNGLFGNLIALSLGLTPNFKSNFDLAEDAKLQLSKDTYDDDLDNLLAQIGDQYADLFLAAKNLSDAILLSDILRVNTEITKAPLSASMIKRYDEHHQDLTLLKALVRQQLPEKYKEIFFDQSKNGYAGYIDGGASQEEFYKFIKPILEKMDGTEELLVKLNREDLLRKQRTFDNGSIPHQIHLGELHAILRRQEDFYPFLKDNREKIEKILTFRIPYYVGPLARGNSRFAWMTRKSEETITPWNFEEVVDKGASAQSFIERMTNFDKNLPNEKVLPKHSLLYEYFTVYNELTKVKYVTEGMRKPAFLSGEQKKAIVDLLFKTNRKVTVKQLKEDYFKKIECFDSVEISGVEDRFNASLGTYHDLLKIIKDKDFLDNEENEDILEDIVLTLTLFEDREMIEERLKTYAHLFDDKVMKQLKRRRYTGWGRLSRKLINGIRDKQSGKTILDFLKSDGFANRNFMQLIHDDSLTFKEDIQKAQVSGQGDSLHEHIANLAGSPAIKKGILQTVKVVDELVKVMGRHKPENIVIEMARENQTTQKGQKNSRERMKRIEEGIKELGSQILKEHPVENTQLQNEKLYLYYLQNGRDMYVDQELDINRLSDYDVDHIVPQSFLKDDSIDNKVLTRSDKARGKSDNVPSEEVVKKMKNYWRQLLNAKLITQRKFDNLTKAERGGLSELDKAGFIKRQLVETRQITKHVAQILDSRMNTKYDENDKLIREVKVITLKSKLVSDFRKDFQFYKVREINNYHHAHDAYLNAVVGTALIKKYPKLESEFVYGDYKVYDVRKMIAKSEQEIGKATAKYFFYSNIMNFFKTEITLANGEIRKRPLIETNGETGEIVWDKGRDFATVRKVLSMPQVNIVKKTEVQTGGFSKESILPKRNSDKLIARKKDWDPKKYGGFDSPTVAYSVLVVAKVEKGKSKKLKSVKELLGITIMERSSFEKNPIDFLEAKGYKEVKKDLIIKLPKYSLFELENGRKRMLASAGELQKGNELALPSKYVNFLYLASHYEKLKGSPEDNEQKQLFVEQHKHYLDEIIEQISEFSKRVILADANLDKVLSAYNKHRDKPIREQAENIIHLFTLTNLGAPAAFKYFDTTIDRKRYTSTKEVLDATLIHQSITGLYETRIDLSQLGGDGGPAPGGGGGSGGLLGRDLLTKLKAQIQFSTEGPQVTWEDRPAMCLVLNLEEEYRLHEKPVPPSIDPSWLQLFPMVWAEKAGMGLANQVPPVVVELKSDASPVAVRQYPMSKEAREGIRPHIQRFLDLGILVPCQSPWNTPLLPVKKPGTNDYRPVQDLREVNKRVQDIHPTVPNPYNLLSSLPPSHTWYSVLDLKDAFFCLKLHPNSQPLFAFEWRDPEKGNTGQLTWTRLPQGFKNSPTLFNEALHRDLASFRALNPQVVMLQYVDDLLVAAPTYRDCKEGTRRLLQELSKLGYRVSAKKAQLCREEVTYLGYLLKGGKRWLTPARKATVMKIPTPTTPRQVREFLGKAGFCRLFIPGFASLAAPLYPLTRPKVPFTWTEAHQEAFGRIKEALLSAPALALPDLTKPFALYVDEKEGVARGVLTQTLGPWRRPVAYLSKKLDPVASGWPTCLKAIAAVALLLKDADKLTLGQNVLVIAPHNLESIVRQPPDRWMTNARMTHYQSLLLNERVSFAPPAILNPATLLPVESDDTPIHICSEILAEETGTRPDLRDQPLPGVPAWYTDGSSFIMDGRRQAGAAIVDNKRTVWASNLPEGTSAQKAELIALTQALRLAEGKSINIYTDSRYAFATAHVHGAIYKQRGWLTSAGKDIKNKEEILALLEAIHLPKRVAIIHCPGHQRGTDPVATGNRKADEAAKQAAQSTRILTETTKNAGKRTADGSEFEKRTADGSEFESPKKKAKVE

SEQ ID NO: 7032 - protein, 2094 aa, synthetic construct
MPAAKRVKLDGGDKKYSIGLDIGTNSVGWAVITDEYKVPSKKFKVLGNTDRHSIKKNLIGALLFDSGETAEATRLKRTARRRYTRRKNRICYLQEIFSNEMAKVDDSFFHRLEESFLVEEDKKHERHPIFGNIVDEVAYHEKYPTIYHLRKKLVDSTDKADLRLIYLALAHMIKFRGHFLIEGDLNPDNSDVDKLFIQLVQTYNQLFEENPINASGVDAKAILSARLSKSRRLENLIAQLPGEKKNGLFGNLIALSLGLTPNFKSNFDLAEDAKLQLSKDTYDDDLDNLLAQIGDQYADLFLAAKNLSDAILLSDILRVNTEITKAPLSASMIKRYDEHHQDLTLLKALVRQQLPEKYKEIFFDQSKNGYAGYIDGGASQEEFYKFIKPILEKMDGTEELLVKLNREDLLRKQRTFDNGSIPHQIHLGELHAILRRQEDFYPFLKDNREKIEKILTFRIPYYVGPLARGNSRFAWMTRKSEETITPWNFEEVVDKGASAQSFIERMTNFDKNLPNEKVLPKHSLLYEYFTVYNELTKVKYVTEGMRKPAFLSGEQKKAIVDLLFKTNRKVTVKQLKEDYFKKIECFDSVEISGVEDRFNASLGTYHDLLKIIKDKDFLDNEENEDILEDIVLTLTLFEDREMIEERLKTYAHLFDDKVMKQLKRRRYTGWGRLSRKLINGIRDKQSGKTILDFLKSDGFANRNFMQLIHDDSLTFKEDIQKAQVSGQGDSLHEHIANLAGSPAIKKGILQTVKVVDELVKVMGRHKPENIVIEMARENQTTQKGQKNSRERMKRIEEGIKELGSQILKEHPVENTQLQNEKLYLYYLQNGRDMYVDQELDINRLSDYDVDHIVPQSFLKDDSIDNKVLTRSDKARGKSDNVPSEEVVKKMKNYWRQLLNAKLITQRKFDNLTKAERGGLSELDKAGFIKRQLVETRQITKHVAQILDSRMNTKYDENDKLIREVKVITLKSKLVSDFRKDFQFYKVREINNYHHAHDAYLNAVVGTALIKKYPKLESEFVYGDYKVYDVRKMIAKSEQEIGKATAKYFFYSNIMNFFKTEITLANGEIRKRPLIETNGETGEIVWDKGRDFATVRKVLSMPQVNIVKKTEVQTGGFSKESILPKRNSDKLIARKKDWDPKKYGGFDSPTVAYSVLVVAKVEKGKSKKLKSVKELLGITIMERSSFEKNPIDFLEAKGYKEVKKDLIIKLPKYSLFELENGRKRMLASAGELQKGNELALPSKYVNFLYLASHYEKLKGSPEDNEQKQLFVEQHKHYLDEIIEQISEFSKRVILADANLDKVLSAYNKHRDKPIREQAENIIHLFTLTNLGAPAAFKYFDTTIDRKRYTSTKEVLDATLIHQSITGLYETRIDLSQLGGDGGPAPGGGGGSGGTLNLEDEYRLYETSAEPEVSPGSTWLSDFPQAWAETGGMGLAVRQAPLIIPLKATSTPVSIKQYPMSQEAKLGIKPHIQRLLDQGILVPCQSPWNTPLLPVKKPGTNDYRPVQDLREVNKRVEDIHPTVPNPYNLLSGLPPSHRWYTVLDLKDAFFCLRLHPTSQPLFAFEWRDPGMGISGQLTWTRLPQGFKNSPTLFNEALHRDLADFRIQHPDLILLQYVDDILLAATSELDCQQGTRALLLTLGNLGYRASAKKAQLCQKQVKYLGYLLKEGQRWLTEARKETVMGQPTPKTPRQLREFLGKAGFCRLFIPGFAEMAAPLYPLTKPGTLFNWGPDQQKAYQEIKQALLTAPALGLPDLTKPFELFVDEKQGYAKGVLTQKLGPWRRPVAYLSKKLDPVAAGWPPCLRMVAAIAVLRKDAGKLTMGQPLVILAPHAVEALVKQPPDRWLSNARMTHYQAMLLDTDRVQFGPVVALNPATLLPLPEEGAPHDCLEILAETHGTRPDLTDQPIPDADHTWYTDGSSFLQEGQRKAGAAVTTETEVIWARALPAGTSAQRAELIALTQALKMAEGKRLNVYTDSRYAFATAHIHGEIYRRRGWLTSEGREIKNKSEILALLKALFLPKRLSIIHCLGHQKGDSAEARGNRLADQAAREAAIKTPPDTSTLLAGKRTADGSEFEKRTADGSEFESPKKKAKVE

SEQ ID NO: 7033 - protein, 2094 aa, synthetic construct
MPAAKRVKLDGGDKKYSIGLDIGTNSVGWAVITDEYKVPSKKFKVLGNTDRHSIKKNLIGALLFDSGETAEATRLKRTARRRYTRRKNRICYLQEIFSNEMAKVDDSFFHRLEESFLVEEDKKHERHPIFGNIVDEVAYHEKYPTIYHLRKKLVDSTDKADLRLIYLALAHMIKFRGHFLIEGDLNPDNSDVDKLFIQLVQTYNQLFEENPINASGVDAKAILSARLSKSRRLENLIAQLPGEKKNGLFGNLIALSLGLTPNFKSNFDLAEDAKLQLSKDTYDDDLDNLLAQIGDQYADLFLAAKNLSDAILLSDILRVNTEITKAPLSASMIKRYDEHHQDLTLLKALVRQQLPEKYKEIFFDQSKNGYAGYIDGGASQEEFYKFIKPILEKMDGTEELLVKLNREDLLRKQRTFDNGSIPHQIHLGELHAILRRQEDFYPFLKDNREKIEKILTFRIPYYVGPLARGNSRFAWMTRKSEETITPWNFEEVVDKGASAQSFIERMTNFDKNLPNEKVLPKHSLLYEYFTVYNELTKVKYVTEGMRKPAFLSGEQKKAIVDLLFKTNRKVTVKQLKEDYFKKIECFDSVEISGVEDRFNASLGTYHDLLKIIKDKDFLDNEENEDILEDIVLTLTLFEDREMIEERLKTYAHLFDDKVMKQLKRRRYTGWGRLSRKLINGIRDKQSGKTILDFLKSDGFANRNFMQLIHDDSLTFKEDIQKAQVSGQGDSLHEHIANLAGSPAIKKGILQTVKVVDELVKVMGRHKPENIVIEMARENQTTQKGQKNSRERMKRIEEGIKELGSQILKEHPVENTQLQNEKLYLYYLQNGRDMYVDQELDINRLSDYDVDHIVPQSFLKDDSIDNKVLTRSDKARGKSDNVPSEEVVKKMKNYWRQLLNAKLITQRKFDNLTKAERGGLSELDKAGFIKRQLVETRQITKHVAQILDSRMNTKYDENDKLIREVKVITLKSKLVSDFRKDFQFYKVREINNYHHAHDAYLNAVVGTALIKKYPKLESEFVYGDYKVYDVRKMIAKSEQEIGKATAKYFFYSNIMNFFKTEITLANGEIRKRPLIETNGETGEIVWDKGRDFATVRKVLSMPQVNIVKKTEVQTGGFSKESILPKRNSDKLIARKKDWDPKKYGGFDSPTVAYSVLVVAKVEKGKSKKLKSVKELLGITIMERSSFEKNPIDFLEAKGYKEVKKDLIIKLPKYSLFELENGRKRMLASAGELQKGNELALPSKYVNFLYLASHYEKLKGSPEDNEQKQLFVEQHKHYLDEIIEQISEFSKRVILADANLDKVLSAYNKHRDKPIREQAENIIHLFTLTNLGAPAAFKYFDTTIDRKRYTSTKEVLDATLIHQSITGLYETRIDLSQLGGDGGPAPGGGGGSGGTLGIEDEYRLHETSTEPDVSLGSTWLSDFPQAWAETGGMGLAVRQAPLIIPLKATSTPVSIQQYPMSHEARLGIKPHIQRLLDQGILVPCQSPWNTPLLPVKKPGTNDYRPVQDLREVNKRVEDIHPTVPNPYNLLSGLPPSHQWYTVLDLKDAFFCLRLHPTSQPLFAFEWRDPGMGISGQLTWTRLPQGFKNSPTLFNEALHRDLADFRIQHPDLILLQYVDDILLAATSELDCQQGTRALLQTLGDLGYRASAKKAQICQKQVKYLGYLLREGQRWLTEARKETVMGQPVPKTPRQLREFLGTAGFCRLWIPGFAEMAAPLYPLTKPGTLFSWGPDQQKAYQEIKQALLTAPALGLPDLTKPFELFVDEKQGYAKGVLTQKLGPWRRPVAYLSKKLDPVAAGWPPCLRMVAAIAVLTKDAGKLTMGQPLVILAPHAVEALVKQPPDRWLSNARMTHYQAMLLDTDRVQFGPVVALNPATLLPLPEEGAPHDCLEILAETHGTRPDLTDQPIPDADHTWYTDGSSFLQEGQRKAGAAVTTETEVIWAGALPAGTSAQRAELIALTQALKMAEGKRLNVYTDSRYAFATAHIHGEIYRRRGWLTSEGREIKNKSEILALLKALFLPKRLSIIHCLGHQKGDSAEARGNRLADQAAREAAIKTPPDTSTLLAGKRTADGSEFEKRTADGSEFESPKKKAKVE

SEQ ID NO: 7034 - protein, 2094 aa, synthetic construct
MPAAKRVKLDGGDKKYSIGLDIGTNSVGWAVITDEYKVPSKKFKVLGNTDRHSIKKNLIGALLFDSGETAEATRLKRTARRRYTRRKNRICYLQEIFSNEMAKVDDSFFHRLEESFLVEEDKKHERHPIFGNIVDEVAYHEKYPTIYHLRKKLVDSTDKADLRLIYLALAHMIKFRGHFLIEGDLNPDNSDVDKLFIQLVQTYNQLFEENPINASGVDAKAILSARLSKSRRLENLIAQLPGEKKNGLFGNLIALSLGLTPNFKSNFDLAEDAKLQLSKDTYDDDLDNLLAQIGDQYADLFLAAKNLSDAILLSDILRVNTEITKAPLSASMIKRYDEHHQDLTLLKALVRQQLPEKYKEIFFDQSKNGYAGYIDGGASQEEFYKFIKPILEKMDGTEELLVKLNREDLLRKQRTFDNGSIPHQIHLGELHAILRRQEDFYPFLKDNREKIEKILTFRIPYYVGPLARGNSRFAWMTRKSEETITPWNFEEVVDKGASAQSFIERMTNFDKNLPNEKVLPKHSLLYEYFTVYNELTKVKYVTEGMRKPAFLSGEQKKAIVDLLFKTNRKVTVKQLKEDYFKKIECFDSVEISGVEDRFNASLGTYHDLLKIIKDKDFLDNEENEDILEDIVLTLTLFEDREMIEERLKTYAHLFDDKVMKQLKRRRYTGWGRLSRKLINGIRDKQSGKTILDFLKSDGFANRNFMQLIHDDSLTFKEDIQKAQVSGQGDSLHEHIANLAGSPAIKKGILQTVKVVDELVKVMGRHKPENIVIEMARENQTTQKGQKNSRERMKRIEEGIKELGSQILKEHPVENTQLQNEKLYLYYLQNGRDMYVDQELDINRLSDYDVDHIVPQSFLKDDSIDNKVLTRSDKARGKSDNVPSEEVVKKMKNYWRQLLNAKLITQRKFDNLTKAERGGLSELDKAGFIKRQLVETRQITKHVAQILDSRMNTKYDENDKLIREVKVITLKSKLVSDFRKDFQFYKVREINNYHHAHDAYLNAVVGTALIKKYPKLESEFVYGDYKVYDVRKMIAKSEQEIGKATAKYFFYSNIMNFFKTEITLANGEIRKRPLIETNGETGEIVWDKGRDFATVRKVLSMPQVNIVKKTEVQTGGFSKESILPKRNSDKLIARKKDWDPKKYGGFDSPTVAYSVLVVAKVEKGKSKKLKSVKELLGITIMERSSFEKNPIDFLEAKGYKEVKKDLIIKLPKYSLFELENGRKRMLASAGELQKGNELALPSKYVNFLYLASHYEKLKGSPEDNEQKQLFVEQHKHYLDEIIEQISEFSKRVILADANLDKVLSAYNKHRDKPIREQAENIIHLFTLTNLGAPAAFKYFDTTIDRKRYTSTKEVLDATLIHQSITGLYETRIDLSQLGGDGGPAPGGGGGSGGTLNIEDEYRLHETSKEPDVSLGSTWLSDFPQAWAETGGMGLAVRQAPLIIPLKATSTPVSIKQYPMSQEARLGIKPHIQRLLDQGILVPCQSPWNTPLLPVKKPGTNDYRPVQDLREVNKRVEDIHPTVPNPYNLLSGLPPSHQWYTVLDLKDAFFCLRLHPTSQPLFAFEWRDPEMGISGQLTWTRLPQGFKNSPTLFNEALHRDLAGFRIQHPDLILLQYVDDLLLAATSELDCQQGTRALLQTLGDLGYRASAKKAQICQKQVKYLGYLLKEGQRWLTEARKETVMGQPIPKTPRQLREFLGTAGFCRLWIPGFAEMAAPLYPLTKPGTLFNWGPDQQKAFQEIKQALLTAPALGLPDLTKPFELFVDEKQGYAKGVLTQKLGPWRRPVAYLSKKLDPVAAGWPPCLRMVAAIAVLTKDAGKLTMGQPLVILAPHAVEALVKQPPDRWLSNARMTHYQALLLDTDRVQFGPVVALNPATLLPLPEEGLQHDCLDILAEAHGTRSDLMDQPLPDADHTWYTDGSSFLQEGQRKAGAAVTTETEVIWARALPAGTSAQRAELIALTQALKMAEGKKLNVYTDSRYAFATAHIHGEIYRRRGWLTSEGKEIKNKDEILALLKALFLPKRLSIIHCPGHQKGNSAEARGNRMADQAAREVATRETPETSTLLAGKRTADGSEFEKRTADGSEFESPKKKAKVE

SEQ ID NO: 7035 - protein, 2094 aa, synthetic construct
MPAAKRVKLDGGDKKYSIGLDIGTNSVGWAVITDEYKVPSKKFKVLGNTDRHSIKKNLIGALLFDSGETAEATRLKRTARRRYTRRKNRICYLQEIFSNEMAKVDDSFFHRLEESFLVEEDKKHERHPIFGNIVDEVAYHEKYPTIYHLRKKLVDSTDKADLRLIYLALAHMIKFRGHFLIEGDLNPDNSDVDKLFIQLVQTYNQLFEENPINASGVDAKAILSARLSKSRRLENLIAQLPGEKKNGLFGNLIALSLGLTPNFKSNFDLAEDAKLQLSKDTYDDDLDNLLAQIGDQYADLFLAAKNLSDAILLSDILRVNTEITKAPLSASMIKRYDEHHQDLTLLKALVRQQLPEKYKEIFFDQSKNGYAGYIDGGASQEEFYKFIKPILEKMDGTEELLVKLNREDLLRKQRTFDNGSIPHQIHLGELHAILRRQEDFYPFLKDNREKIEKILTFRIPYYVGPLARGNSRFAWMTRKSEETITPWNFEEVVDKGASAQSFIERMTNFDKNLPNEKVLPKHSLLYEYFTVYNELTKVKYVTEGMRKPAFLSGEQKKAIVDLLFKTNRKVTVKQLKEDYFKKIECFDSVEISGVEDRFNASLGTYHDLLKIIKDKDFLDNEENEDILEDIVLTLTLFEDREMIEERLKTYAHLFDDKVMKQLKRRRYTGWGRLSRKLINGIRDKQSGKTILDFLKSDGFANRNFMQLIHDDSLTFKEDIQKAQVSGQGDSLHEHIANLAGSPAIKKGILQTVKVVDELVKVMGRHKPENIVIEMARENQTTQKGQKNSRERMKRIEEGIKELGSQILKEHPVENTQLQNEKLYLYYLQNGRDMYVDQELDINRLSDYDVDHIVPQSFLKDDSIDNKVLTRSDKARGKSDNVPSEEVVKKMKNYWRQLLNAKLITQRKFDNLTKAERGGLSELDKAGFIKRQLVETRQITKHVAQILDSRMNTKYDENDKLIREVKVITLKSKLVSDFRKDFQFYKVREINNYHHAHDAYLNAVVGTALIKKYPKLESEFVYGDYKVYDVRKMIAKSEQEIGKATAKYFFYSNIMNFFKTEITLANGEIRKRPLIETNGETGEIVWDKGRDFATVRKVLSMPQVNIVKKTEVQTGGFSKESILPKRNSDKLIARKKDWDPKKYGGFDSPTVAYSVLVVAKVEKGKSKKLKSVKELLGITIMERSSFEKNPIDFLEAKGYKEVKKDLIIKLPKYSLFELENGRKRMLASAGELQKGNELALPSKYVNFLYLASHYEKLKGSPEDNEQKQLFVEQHKHYLDEIIEQISEFSKRVILADANLDKVLSAYNKHRDKPIREQAENIIHLFTLTNLGAPAAFKYFDTTIDRKRYTSTKEVLDATLIHQSITGLYETRIDLSQLGGDGGPAPGGGGGSGGTLNIEDEYRLHETSKGPDVPLGSTWLSDFPQAWAETGGMGLAVRQAPLIIPLKATSTPVSIKQYPMSQEARLGIKPHIQRLLDQGILVPCQSPWNTPLLPVKKPGTNDYRPVQDLREVNKRVEDIHPTVPNPYNLLSGLPPSHQWYTVLDLKDAFFCLRLHPTSQSLFAFEWRDPEMGISGQLTWTRLPQGFKNSPTLFNEALHRDLADFRIQHPDLILLQYVDDLLLAATSELDCQQGTRALLQTLGDLGYRASAKKAQICQKQVKYLGYLLKEGQRWLTEARKETVMGQPTPKTPRQLREFLGKAGFCRLFIPGFAEMAAPLYPLTKPGTLFEWGPDQQKAYQEIKQALLTAPALGLPDLTKPFELFVDEKQGYAKGVLTQKLGPWRRPVAYLSKKLDPVAAGWPPCLRMVAAIAVLTKDAGKLTMGQPLVILAPHAVEALVKQPPDRWLSNARMTHYQALLLDTDRVQFGPIVALNPATLLPLPEEGLQHDCLDILAEAHGTRPDLTDQPLPDADHTWYTDGSSFLQEGQRKAGAAVTTETEVVWAKALPAGTSAQRAELIALTQALKMAEGKKLNVYTDSRYAFATAHIHGEIYRRRGWLTSEGKEIKNKDEILALLKALFLPKRLSIIHCPGHQKGNRAEARGNRMADQAAREVATRETPETSTLLAGKRTADGSEFEKRTADGSEFESPKKKAKVE

SEQ ID NO: 7036 - protein, 2094 aa, synthetic construct; identical to SEQ ID NO: 4521

SEQ ID NO: 7037 - protein, 2094 aa, synthetic construct
MPAAKRVKLDGGDKKYSIGLDIGTNSVGWAVITDEYKVPSKKFKVLGNTDRHSIKKNLIGALLFDSGETAEATRLKRTARRRYTRRKNRICYLQEIFSNEMAKVDDSFFHRLEESFLVEEDKKHERHPIFGNIVDEVAYHEKYPTIYHLRKKLVDSTDKADLRLIYLALAHMIKFRGHFLIEGDLNPDNSDVDKLFIQLVQTYNQLFEENPINASGVDAKAILSARLSKSRRLENLIAQLPGEKKNGLFGNLIALSLGLTPNFKSNFDLAEDAKLQLSKDTYDDDLDNLLAQIGDQYADLFLAAKNLSDAILLSDILRVNTEITKAPLSASMIKRYDEHHQDLTLLKALVRQQLPEKYKEIFFDQSKNGYAGYIDGGASQEEFYKFIKPILEKMDGTEELLVKLNREDLLRKQRTFDNGSIPHQIHLGELHAILRRQEDFYPFLKDNREKIEKILTFRIPYYVGPLARGNSRFAWMTRKSEETITPWNFEEVVDKGASAQSFIERMTNFDKNLPNEKVLPKHSLLYEYFTVYNELTKVKYVTEGMRKPAFLSGEQKKAIVDLLFKTNRKVTVKQLKEDYFKKIECFDSVEISGVEDRFNASLGTYHDLLKIIKDKDFLDNEENEDILEDIVLTLTLFEDREMIEERLKTYAHLFDDKVMKQLKRRRYTGWGRLSRKLINGIRDKQSGKTILDFLKSDGFANRNFMQLIHDDSLTFKEDIQKAQVSGQGDSLHEHIANLAGSPAIKKGILQTVKVVDELVKVMGRHKPENIVIEMARENQTTQKGQKNSRERMKRIEEGIKELGSQILKEHPVENTQLQNEKLYLYYLQNGRDMYVDQELDINRLSDYDVDHIVPQSFLKDDSIDNKVLTRSDKARGKSDNVPSEEVVKKMKNYWRQLLNAKLITQRKFDNLTKAERGGLSELDKAGFIKRQLVETRQITKHVAQILDSRMNTKYDENDKLIREVKVITLKSKLVSDFRKDFQFYKVREINNYHHAHDAYLNAVVGTALIKKYPKLESEFVYGDYKVYDVRKMIAKSEQEIGKATAKYFFYSNIMNFFKTEITLANGEIRKRPLIETNGETGEIVWDKGRDFATVRKVLSMPQVNIVKKTEVQTGGFSKESILPKRNSDKLIARKKDWDPKKYGGFDSPTVAYSVLVVAKVEKGKSKKLKSVKELLGITIMERSSFEKNPIDFLEAKGYKEVKKDLIIKLPKYSLFELENGRKRMLASAGELQKGNELALPSKYVNFLYLASHYEKLKGSPEDNEQKQLFVEQHKHYLDEIIEQISEFSKRVILADANLDKVLSAYNKHRDKPIREQAENIIHLFTLTNLGAPAAFKYFDTTIDRKRYTSTKEVLDATLIHQSITGLYETRIDLSQLGGDGGPAPGGGGGSGGTLNIEDEHRLHETSKEPDVSLGSTWLSDFPQAWAETGGMGLAVRQAPLIIPLKATSTPVSIKQYPMSQEARLGIKPHIQRLLDQGILVPCQSPWNTPLLPVKKPGTNDYRPVQDLREVNKRVEDIHPTVPNPYNLLSGLPPSHQWYTVLDLKDAFFCLRLHPTSQPLFAFEWRDPEMGISGQLTWTRLPQGFKNSPTLFDEALHRDLADFRIQHPDLILLQYVDDLLLAATSELDCQQGTRALLQTLGNLGYRASAKKAQICQKQVKYLGYLLKEGQRWLTEARKETVMGQPTPKTPRQLREFLGTAGFCRLWIPGFAEMAAPLYPLTKTGTLFNWGPDQQKAYQEIKQALLTAPALGLPDLTKPFELFVDEKQGYAKGVLTQKLGPWRRPVAYLSKKLDPVAAGWPPCLRMVAAIAVLTKDAGKLTMGQPLVILAPHAVEALVKQPPDRWLSNARMTHYQALLLDTDRVQFGPVVALNPATLLPLPEEGLQHNCLDILAEAHGTRPDLTDQPLPDADHTWYTDGSSLLQEGQRKAGAAVTTETEVIWAKALPAGTSAQRAELIALTQALKMAEGKKLNVYTDSRYAFATAHIHGEIYRRRGLLTSEGKEIKNKDEILALLKALFLPKRLSIIHCPGHQKGHSAEARGNRMADQAARKAAITETPDTSTLLAGKRTADGSEFEKRTADGSEFESPKKKAKVE

SEQ ID NO: 7038 - protein, 2094 aa, synthetic construct; identical to SEQ ID NO: 4521

SEQ ID NO: 7039 - protein, 2022 aa, synthetic construct
MPAAKRVKLDGGDKKYSIGLDIGTNSVGWAVITDEYKVPSKKFKVLGNTDRHSIKKNLIGALLFDSGETAEATRLKRTARRRYTRRKNRICYLQEIFSNEMAKVDDSFFHRLEESFLVEEDKKHERHPIFGNIVDEVAYHEKYPTIYHLRKKLVDSTDKADLRLIYLALAHMIKFRGHFLIEGDLNPDNSDVDKLFIQLVQTYNQLFEENPINASGVDAKAILSARLSKSRRLENLIAQLPGEKKNGLFGNLIALSLGLTPNFKSNFDLAEDAKLQLSKDTYDDDLDNLLAQIGDQYADLFLAAKNLSDAILLSDILRVNTEITKAPLSASMIKRYDEHHQDLTLLKALVRQQLPEKYKEIFFDQSKNGYAGYIDGGASQEEFYKFIKPILEKMDGTEELLVKLNREDLLRKQRTFDNGSIPHQIHLGELHAILRRQEDFYPFLKDNREKIEKILTFRIPYYVGPLARGNSRFAWMTRKSEETITPWNFEEVVDKGASAQSFIERMTNFDKNLPNEKVLPKHSLLYEYFTVYNELTKVKYVTEGMRKPAFLSGEQKKAIVDLLFKTNRKVTVKQLKEDYFKKIECFDSVEISGVEDRFNASLGTYHDLLKIIKDKDFLDNEENEDILEDIVLTLTLFEDREMIEERLKTYAHLFDDKVMKQLKRRRYTGWGRLSRKLINGIRDKQSGKTILDFLKSDGFANRNFMQLIHDDSLTFKEDIQKAQVSGQGDSLHEHIANLAGSPAIKKGILQTVKVVDELVKVMGRHKPENIVIEMARENQTTQKGQKNSRERMKRIEEGIKELGSQILKEHPVENTQLQNEKLYLYYLQNGRDMYVDQELDINRLSDYDVDHIVPQSFLKDDSIDNKVLTRSDKARGKSDNVPSEEVVKKMKNYWRQLLNAKLITQRKFDNLTKAERGGLSELDKAGFIKRQLVETRQITKHVAQILDSRMNTKYDENDKLIREVKVITLKSKLVSDFRKDFQFYKVREINNYHHAHDAYLNAVVGTALIKKYPKLESEFVYGDYKVYDVRKMIAKSEQEIGKATAKYFFYSNIMNFFKTEITLANGEIRKRPLIETNGETGEIVWDKGRDFATVRKVLSMPQVNIVKKTEVQTGGFSKESILPKRNSDKLIARKKDWDPKKYGGFDSPTVAYSVLVVAKVEKGKSKKLKSVKELLGITIMERSSFEKNPIDFLEAKGYKEVKKDLIIKLPKYSLFELENGRKRMLASAGELQKGNELALPSKYVNFLYLASHYEKLKGSPEDNEQKQLFVEQHKHYLDEIIEQISEFSKRVILADANLDKVLSAYNKHRDKPIREQAENIIHLFTLTNLGAPAAFKYFDTTIDRKRYTSTKEVLDATLIHQSITGLYETRIDLSQLGGDGGPAPGGGGGSGGGRDIMKDIKVRLMTDSPDDSQDLMIGAIESNLFADQISWKSDQPVWLNQWPLKQEKLQALQQLVTEQLQLGHLEESNSPWNTPVFVIKKKSGKWRLLQDLRAVNATMHDMGALQPGLPSPVAPPKGWEIIIIDLQDCFFNIKLHPEDCKRFAFSVPSPNFKRPYQRFQWKVLPQGMKNSPTLCQKFVDKAILTVRDKYQDSYIVHYMDDILLAHPSRSIVDEILTSMIQALNKHGLVVSTEKIQKYDNLKYLGTHIQGDSVSYQKLQIRTDKLRTLNDFQKLLGNINWIRPFLKLTTGELKPLFEILNPDSNPISTRKLTPEACKALQLMNERLSTARVKRLDLSQPWSLCILKTEYTPTACLWQDGVVEWIHLPHISPKVITPYDIFCTQLIIKGRHRSKELFSKDPDYIVVPYTKVQFDLLLQEKEDWPISLLGFLGEVHFHLPKDPLLTFTLQTAIIFPHMTSTTPLEKGIVIFTDGSANGRSVTYIQGREPIIKENTQNTAQQAEIVAVITAFEEVSQPFNLYTDSKYVTGLFPEIETATLSPRTKIYTELKHLQRLIHKRQEKFYIGHIRGHTGLPGPLAQGNAYADSLTRILTAGKRTADGSEFEKRTADGSEFESPKKKAKVE

SEQ ID NO: 7040 - protein, 2086 aa, synthetic construct
MPAAKRVKLDGGDKKYSIGLDIGTNSVGWAVITDEYKVPSKKFKVLGNTDRHSIKKNLIGALLFDSGETAEATRLKRTARRRYTRRKNRICYLQEIFSNEMAKVDDSFFHRLEESFLVEEDKKHERHPIFGNIVDEVAYHEKYPTIYHLRKKLVDSTDKADLRLIYLALAHMIKFRGHFLIEGDLNPDNSDVDKLFIQLVQTYNQLFEENPINASGVDAKAILSARLSKSRRLENLIAQLPGEKKNGLFGNLIALSLGLTPNFKSNFDLAEDAKLQLSKDTYDDDLDNLLAQIGDQYADLFLAAKNLSDAILLSDILRVNTEITKAPLSASMIKRYDEHHQDLTLLKALVRQQLPEKYKEIFFDQSKNGYAGYIDGGASQEEFYKFIKPILEKMDGTEELLVKLNREDLLRKQRTFDNGSIPHQIHLGELHAILRRQEDFYPFLKDNREKIEKILTFRIPYYVGPLARGNSRFAWMTRKSEETITPWNFEEVVDKGASAQSFIERMTNFDKNLPNEKVLPKHSLLYEYFTVYNELTKVKYVTEGMRKPAFLSGEQKKAIVDLLFKTNRKVTVKQLKEDYFKKIECFDSVEISGVEDRFNASLGTYHDLLKIIKDKDFLDNEENEDILEDIVLTLTLFEDREMIEERLKTYAHLFDDKVMKQLKRRRYTGWGRLSRKLINGIRDKQSGKTILDFLKSDGFANRNFMQLIHDDSLTFKEDIQKAQVSGQGDSLHEHIANLAGSPAIKKGILQTVKVVDELVKVMGRHKPENIVIEMARENQTTQKGQKNSRERMKRIEEGIKELGSQILKEHPVENTQLQNEKLYLYYLQNGRDMYVDQELDINRLSDYDVDHIVPQSFLKDDSIDNKVLTRSDKARGKSDNVPSEEVVKKMKNYWRQLLNAKLITQRKFDNLTKAERGGLSELDKAGFIKRQLVETRQITKHVAQILDSRMNTKYDENDKLIREVKVITLKSKLVSDFRKDFQFYKVREINNYHHAHDAYLNAVVGTALIKKYPKLESEFVYGDYKVYDVRKMIAKSEQEIGKATAKYFFYSNIMNFFKTEITLANGEIRKRPLIETNGETGEIVWDKGRDFATVRKVLSMPQVNIVKKTEVQTGGFSKESILPKRNSDKLIARKKDWDPKKYGGFDSPTVAYSVLVVAKVEKGKSKKLKSVKELLGITIMERSSFEKNPIDFLEAKGYKEVKKDLIIKLPKYSLFELENGRKRMLASAGELQKGNELALPSKYVNFLYLASHYEKLKGSPEDNEQKQLFVEQHKHYLDEIIEQISEFSKRVILADANLDKVLSAYNKHRDKPIREQAENIIHLFTLTNLGAPAAFKYFDTTIDRKRYTSTKEVLDATLIHQSITGLYETRIDLSQLGGDGGPAPGGGGGSGGLDDEYRLYSPLVKPDQNIQFWLEQFPQAWAETAGMGLAKQVPPQVIQLKASATPVSVRQYPLSKEAQEGIRPHVQRLIQQGILVPVQSPWNTPLLPVRKPGTNDYRPVQDLREVNKRVQDIHPTVPNPYNLLCALPPQRSWYTVLDLKDAFFCLRLHPTSQPLFAFEWRDPGTGRTGQLTWTRLPQGFKNSPTIFNEALHRDLANFRIQHPQVTLLQYVDDLLLAGATKQDCLEGTKALLLELSDLGYRASAKKAQICRREVTYLGYSLRDGQRWLTEARKKTVVQIPAPTTAKQVREFLGKAGFCRLFIPGFATLAAPLYPLTKPKGEFSWAPEHQKAFDAIKKALLSAPALALPDVTKPFTLYVDERKGVARGVLTQTLGPWRRPVAYLSKKLDPVASGWPVCLKAIAAVAILVKDADKLTLGQNITVIAPHALENIVRQPPDRWMTNARMTHYQSLLLTERVTFAPPAALNPATLLPEETDEPVTHDCHQLLIEETGVRKDLTDIPLTGEVLTWFTDGSSYVVEGKRMAGAAVVDGTRTIWASSLPEGTSAQKAELMALTQALRLAEGKSINIYTDSRYAFATAHVHGAIYKQRGWLTSAGREIKNKEEILSLLEALHLPKRLAIIHCPGHQKAKDPISRGNQMADRVAKQAAQGVNLLPAGKRTADGSEFEKRTADGSEFESPKKKAKVE

SEQ ID NO: 7041 - protein, 2174 aa, synthetic construct
MPAAKRVKLDGGDKKYSIGLDIGTNSVGWAVITDEYKVPSKKFKVLGNTDRHSIKKNLIGALLFDSGETAEATRLKRTARRRYTRRKNRICYLQEIFSNEMAKVDDSFFHRLEESFLVEEDKKHERHPIFGNIVDEVAYHEKYPTIYHLRKKLVDSTDKADLRLIYLALAHMIKFRGHFLIEGDLNPDNSDVDKLFIQLVQTYNQLFEENPINASGVDAKAILSARLSKSRRLENLIAQLPGEKKNGLFGNLIALSLGLTPNFKSNFDLAEDAKLQLSKDTYDDDLDNLLAQIGDQYADLFLAAKNLSDAILLSDILRVNTEITKAPLSASMIKRYDEHHQDLTLLKALVRQQLPEKYKEIFFDQSKNGYAGYIDGGASQEEFYKFIKPILEKMDGTEELLVKLNREDLLRKQRTFDNGSIPHQIHLGELHAILRRQEDFYPFLKDNREKIEKILTFRIPYYVGPLARGNSRFAWMTRKSEETITPWNFEEVVDKGASAQSFIERMTNFDKNLPNEKVLPKHSLLYEYFTVYNELTKVKYVTEGMRKPAFLSGEQKKAIVDLLFKTNRKVTVKQLKEDYFKKIECFDSVEISGVEDRFNASLGTYHDLLKIIKDKDFLDNEENEDILEDIVLTLTLFEDREMIEERLKTYAHLFDDKVMKQLKRRRYTGWGRLSRKLINGIRDKQSGKTILDFLKSDGFANRNFMQLIHDDSLTFKEDIQKAQVSGQGDSLHEHIANLAGSPAIKKGILQTVKVVDELVKVMGRHKPENIVIEMARENQTTQKGQKNSRERMKRIEEGIKELGSQILKEHPVENTQLQNEKLYLYYLQNGRDMYVDQELDINRLSDYDVDHIVPQSFLKDDSIDNKVLTRSDKARGKSDNVPSEEVVKKMKNYWRQLLNAKLITQRKFDNLTKAERGGLSELDKAGFIKRQLVETRQITKHVAQILDSRMNTKYDENDKLIREVKVITLKSKLVSDFRKDFQFYKVREINNYHHAHDAYLNAVVGTALIKKYPKLESEFVYGDYKVYDVRKMIAKSEQEIGKATAKYFFYSNIMNFFKTEITLANGEIRKRPLIETNGETGEIVWDKGRDFATVRKVLSMPQVNIVKKTEVQTGGFSKESILPKRNSDKLIARKKDWDPKKYGGFDSPTVAYSVLVVAKVEKGKSKKLKSVKELLGITIMERSSFEKNPIDFLEAKGYKEVKKDLIIKLPKYSLFELENGRKRMLASAGELQKGNELALPSKYVNFLYLASHYEKLKGSPEDNEQKQLFVEQHKHYLDEIIEQISEFSKRVILADANLDKVLSAYNKHRDKPIREQAENIIHLFTLTNLGAPAAFKYFDTTIDRKRYTSTKEVLDATLIHQSITGLYETRIDLSQLGGDGGPAPGGGGGSGGMDPLQLLQPLEAEIKGTKLKAHWNSGATITCVPEAFLEDERPIQTMLIKTIHGEKQQDVYYLTFKVQGRKVEAEVLASPYDYILLNPSDVPWLMKKPLQLTVLVPLHEYQERLLQQTALPKEQKELLQKLFLKYDALWQHWENQVGHRRIKPHNIATGTLAPRPQKQYPINPKAKPSIQIVIDDLLKQGVLIQQNSTMNTPVYPVPKPDGKWRMVLDYREVNKTIPLIAAQNQHSAGILSSIYRGKYKTTLDLTNGFWAHPITPESYWLTAFTWQGKQYCWTRLPQGFLNSPALFTADVVDLLKEIPNVQAYVDDIYISHDDPQEHLEQLEKIFSILLNAGYVVSLKKSEIAQREVEFLGFNITKEGRGLTDTFKQKLLNITPPKDLKQLQSILGLLNFARNFIPNYSELVKPLYTIVANANGKFISWTEDNSNQLQHIISVLNQADNLEERNPETRLIIKVNSSPSAGYIRYYNEGSKRPIMYVNYIFSKAEAKFTQTEKLLTTMHKGLIKAMDLAMGQEILVYSPIVSMTKIQRTPLPERKALPVRWITWMTYLEDPRIQFHYDKSLPELQQIPNVTEDVIAKTKHPSEFAMVFYTDGSAIKHPDVNKSHSAGMGIAQVQFIPEYKIVHQWSIPLGDHTAQLAEIAAVEFACKKALKISGPVLIVTDSFYVAESANKELPYWKSNGFLNNKKKPLRHVSKWKSIAECLQLKPDIIIMHEKGHQQPMTTLHTEGNNLADKLATQGSYVVHAGKRTADGSEFEKRTADGSEFESPKKKAKVE

SEQ ID NO: 7042 - protein, 2092 aa, synthetic construct
MPAAKRVKLDGGDKKYSIGLDIGTNSVGWAVITDEYKVPSKKFKVLGNTDRHSIKKNLIGALLFDSGETAEATRLKRTARRRYTRRKNRICYLQEIFSNEMAKVDDSFFHRLEESFLVEEDKKHERHPIFGNIVDEVAYHEKYPTIYHLRKKLVDSTDKADLRLIYLALAHMIKFRGHFLIEGDLNPDNSDVDKLFIQLVQTYNQLFEENPINASGVDAKAILSARLSKSRRLENLIAQLPGEKKNGLFGNLIALSLGLTPNFKSNFDLAEDAKLQLSKDTYDDDLDNLLAQIGDQYADLFLAAKNLSDAILLSDILRVNTEITKAPLSASMIKRYDEHHQDLTLLKALVRQQLPEKYKEIFFDQSKNGYAGYIDGGASQEEFYKFIKPILEKMDGTEELLVKLNREDLLRKQRTFDNGSIPHQIHLGELHAILRRQEDFYPFLKDNREKIEKILTFRIPYYVGPLARGNSRFAWMTRKSEETITPWNFEEVVDKGASAQSFIERMTNFDKNLPNEKVLPKHSLLYEYFTVYNELTKVKYVTEGMRKPAFLSGEQKKAIVDLLFKTNRKVTVKQLKEDYFKKIECFDSVEISGVEDRFNASLGTYHDLLKIIKDKDFLDNEENEDILEDIVLTLTLFEDREMIEERLKTYAHLFDDKVMKQLKRRRYTGWGRLSRKLINGIRDKQSGKTILDFLKSDGFANRNFMQLIHDDSLTFKEDIQKAQVSGQGDSLHEHIANLAGSPAIKKGILQTVKVVDELVKVMGRHKPENIVIEMARENQTTQKGQKNSRERMKRIEEGIKELGSQILKEHPVENTQLQNEKLYLYYLQNGRDMYVDQELDINRLSDYDVDHIVPQSFLKDDSIDNKVLTRSDKARGKSDNVPSEEVVKKMKNYWRQLLNAKLITQRKFDNLTKAERGGLSELDKAGFIKRQLVETRQITKHVAQILDSRMNTKYDENDKLIREVKVITLKSKLVSDFRKDFQFYKVREINNYHHAHDAYLNAVVGTALIKKYPKLESEFVYGDYKVYDVRKMIAKSEQEIGKATAKYFFYSNIMNFFKTEITLANGEIRKRPLIETNGETGEIVWDKGRDFATVRKVLSMPQVNIVKKTEVQTGGFSKESILPKRNSDKLIARKKDWDPKKYGGFDSPTVAYSVLVVAKVEKGKSKKLKSVKELLGITIMERSSFEKNPIDFLEAKGYKEVKKDLIIKLPKYSLFELENGRKRMLASAGELQKGNELALPSKYVNFLYLASHYEKLKGSPEDNEQKQLFVEQHKHYLDEIIEQISEFSKRVILADANLDKVLSAYNKHRDKPIREQAENIIHLFTLTNLGAPAAFKYFDTTIDRKRYTSTKEVLDATLIHQSITGLYETRIDLSQLGGDGGPAPGGGGGSGGVLNLEEEYRLHEKPVPSSIDPSWLQLFPTVWAERAGMGLANQVPPVVVELRSGASPVAVRQYPMSKEAREGIRPHIQRFLDLGVLVPCQSPWNTPLLPVKKPGTNDYRPVQDLREINKRVQDIHPTVPNPYNLLSSLPPSHTWYSVLDLKDAFFCLKLHPNSQPLFAFEWRDPEKGNTGQLTWTRLPQGFKNSPTLFDEALHRDLAPFRALNPQVVLLQYVDDLLVAAPTYRDCKEGTQKLLQELSKLGYRVSAKKAQLCQKEVTYLGYLLKEGKRWLTPARKATVMKIPPPTTPRQVREFLGTAGFCRLWIPGFASLAAPLYPLTKESIPFIWTEEHQKAFDRIKEALLSAPALALPDLTKPFTLYVDERAGVARGVLTQTLGPWRRPVAYLSKKLDPVASGWPTCLKAVAAVALLLKDADKLTLGQNVTVIASHSLESIVRQPPDRWMTNARMTHYQSLLLNERVSFAPPAVLNPATLLPVESEATPVHRCSEILAEETGTRRDLKDQPLPGVPAWYTDGSSFIAEGKRRAGAAIVDGKRTVWASSLPEGTSAQKAELVALTQALRLAEGKDINIYTDSRYAFATAHIHGAIYKQRGLLTSAGKDIKNKEEILALLEAIHLPKRVAIIHCPGHQKGNDPVATGNRRADEAAKQAALSTRVLAETTKPAGKRTADGSEFEKRTADGSEFESPKKKAKVE

SEQ ID NO: 7043 - protein, 2092 aa, synthetic construct
MPAAKRVKLDGGDKKYSIGLDIGTNSVGWAVITDEYKVPSKKFKVLGNTDRHSIKKNLIGALLFDSGETAEATRLKRTARRRYTRRKNRICYLQEIFSNEMAKVDDSFFHRLEESFLVEEDKKHERHPIFGNIVDEVAYHEKYPTIYHLRKKLVDSTDKADLRLIYLALAHMIKFRGHFLIEGDLNPDNSDVDKLFIQLVQTYNQLFEENPINASGVDAKAILSARLSKSRRLENLIAQLPGEKKNGLFGNLIALSLGLTPNFKSNFDLAEDAKLQLSKDTYDDDLDNLLAQIGDQYADLFLAAKNLSDAILLSDILRVNTEITKAPLSASMIKRYDEHHQDLTLLKALVRQQLPEKYKEIFFDQSKNGYAGYIDGGASQEEFYKFIKPILEKMDGTEELLVKLNREDLLRKQRTFDNGSIPHQIHLGELHAILRRQEDFYPFLKDNREKIEKILTFRIPYYVGPLARGNSRFAWMTRKSEETITPWNFEEVVDKGASAQSFIERMTNFDKNLPNEKVLPKHSLLYEYFTVYNELTKVKYVTEGMRKPAFLSGEQKKAIVDLLFKTNRKVTVKQLKEDYFKKIECFDSVEISGVEDRFNASLGTYHDLLKIIKDKDFLDNEENEDILEDIVLTLTLFEDREMIEERLKTYAHLFDDKVMKQLKRRRYTGWGRLSRKLINGIRDKQSGKTILDFLKSDGFANRNFMQLIHDDSLTFKEDIQKAQVSGQGDSLHEHIANLAGSPAIKKGILQTVKVVDELVKVMGRHKPENIVIEMARENQTTQKGQKNSRERMKRIEEGIKELGSQILKEHPVENTQLQNEKLYLYYLQNGRDMYVDQELDINRLSDYDVDHIVPQSFLKDDSIDNKVLTRSDKARGKSDNVPSEEVVKKMKNYWRQLLNAKLITQRKFDNLTKAERGGLSELDKAGFIKRQLVETRQITKHVAQILDSRMNTKYDENDKLIREVKVITLKSKLVSDFRKDFQFYKVREINNYHHAHDAYLNAVVGTALIKKYPKLESEFVYGDYKVYDVRKMIAKSEQEIGKATAKYFFYSNIMNFFKTEITLANGEIRKRPLIETNGETGEIVWDKGRDFATVRKVLSMPQVNIVKKTEVQTGGFSKESILPKRNSDKLIARKKDWDPKKYGGFDSPTVAYSVLVVAKVEKGKSKKLKSVKELLGITIMERSSFEKNPIDFLEAKGYKEVKKDLIIKLPKYSLFELENGRKRMLASAGELQKGNELALPSKYVNFLYLASHYEKLKGSPEDNEQKQLFVEQHKHYLDEIIEQISEFSKRVILADANLDKVLSAYNKHRDKPIREQAENIIHLFTLTNLGAPAAFKYFDTTIDRKRYTSTKEVLDATLIHQSITGLYETRIDLSQLGGDGGPAPGGGGGSGGVLNLEEEYRLHEKPVPSSIDPSWLQLFPTVWAERAGMGLANQVPPVVVELRSGASPVAVRQYPMSKEAREGIRPHIQRFLDLGVLVPCQSPWNTPLLPVKKPGTNDYRPVQDLREINKRVQDIHPTVPNPYNLLSSLPPSHTWYSVLDLKDAFFCLKLHPNSQPLFAFEWRDPEKGNTGQLTWTRLPQGFKNSPTLFNEALHRDLAPFRALNPQVVLLQYVDDLLVAAPTYRDCKEGTQKLLQELSKLGYRVSAKKAQLCQKEVTYLGYLLKEGKRWLTPARKATVMKIPPPTTPRQVREFLGKAGFCRLFIPGFASLAAPLYPLTKPSIPFIWTEEHQKAFDRIKEALLSAPALALPDLTKPFTLYVDERAGVARGVLTQTLGPWRRPVAYLSKKLDPVASGWPTCLKAVAAVALLLKDADKLTLGQNVTVIASHSLESIVRQPPDRWMTNARMTHYQSLLLNERVSFAPPAVLNPATLLPVESEATPVHRCSEILAEETGTRRDLKDQPLPGVPAWYTDGSSFIAEGKRRAGAAIVDGKRTVWASSLPEGTSAQKAELVALTQALRLAEGKDINIYTDSRYAFATAHIHGAIYKQRGWLTSAGKDIKNKEEILALLEAIHLPKRVAIIHCPGHQKGNDPVATGNRRADEAAKQAALSTRVLAETTKPAGKRTADGSEFEKRTADGSEFESPKKKAKVE

SEQ ID NO: 7044 - protein, 2094 aa, synthetic construct
MPAAKRVKLDGGDKKYSIGLDIGTNSVGWAVITDEYKVPSKKFKVLGNTDRHSIKKNLIGALLFDSGETAEATRLKRTARRRYTRRKNRICYLQEIFSNEMAKVDDSFFHRLEESFLVEEDKKHERHPIFGNIVDEVAYHEKYPTIYHLRKKLVDSTDKADLRLIYLALAHMIKFRGHFLIEGDLNPDNSDVDKLFIQLVQTYNQLFEENPINASGVDAKAILSARLSKSRRLENLIAQLPGEKKNGLFGNLIALSLGLTPNFKSNFDLAEDAKLQLSKDTYDDDLDNLLAQIGDQYADLFLAAKNLSDAILLSDILRVNTEITKAPLSASMIKRYDEHHQDLTLLKALVRQQLPEKYKEIFFDQSKNGYAGYIDGGASQEEFYKFIKPILEKMDGTEELLVKLNREDLLRKQRTFDNGSIPHQIHLGELHAILRRQEDFYPFLKDNREKIEKILTFRIPYYVGPLARGNSRFAWMTRKSEETITPWNFEEVVDKGASAQSFIERMTNFDKNLPNEKVLPKHSLLYEYFTVYNELTKVKYVTEGMRKPAFLSGEQKKAIVDLLFKTNRKVTVKQLKEDYFKKIECFDSVEISGVEDRFNASLGTYHDLLKIIKDKDFLDNEENEDILEDIVLTLTLFEDREMIEERLKTYAHLFDDKVMKQLKRRRYTGWGRLSRKLINGIRDKQSGKTILDFLKSDGFANRNFMQLIHDDSLTFKEDIQKAQVSGQGDSLHEHIANLAGSPAIKKGILQTVKVVDELVKVMGRHKPENIVIEMARENQTTQKGQKNSRERMKRIEEGIKELGSQILKEHPVENTQLQNEKLYLYYLQNGRDMYVDQELDINRLSDYDVDHIVPQSFLKDDSIDNKVLTRSDKARGKSDNVPSEEVVKKMKNYWRQLLNAKLITQRKFDNLTKAERGGLSELDKAGFIKRQLVETRQITKHVAQILDSRMNTKYDENDKLIREVKVITLKSKLVSDFRKDFQFYKVREINNYHHAHDAYLNAVVGTALIKKYPKLESEFVYGDYKVYDVRKMIAKSEQEIGKATAKYFFYSNIMNFFKTEITLANGEIRKRPLIETNGETGEIVWDKGRDFATVRKVLSMPQVNIVKKTEVQTGGFSKESILPKRNSDKLIARKKDWDPKKYGGFDSPTVAYSVLVVAKVEKGKSKKLKSVKELLGITIMERSSFEKNPIDFLEAKGYKEVKKDLIIKLPKYSLFELENGRKRMLASAGELQKGNELALPSKYVNFLYLASHYEKLKGSPEDNEQKQLFVEQHKHYLDEIIEQISEFSKRVILADANLDKVLSAYNKHRDKPIREQAENIIHLFTLTNLGAPAAFKYFDTTIDRKRYTSTKEVLDATLIHQSITGLYETRIDLSQLGGDGGPAPGGGGGSGGTLNIEDEYRLHETSKEPDVPLGSTWLSDFPQAWAETGGMGLAVRQAPLIIPLKATSTPVSIKQYPMSQEARLGIKPHIQRLLDQGILVPCQSPWNTPLLPVKKPGTNDYRPVQDLREVNKRVEDIHPTVPNPYNLLSGLPPSHQWYTVLDLKDAFFCLRLHPTSQPLFAFEWRDPEMGISGQLTWTRLPQGFKNSPTLFNEALHRDLADFRIQHPDLILLQYVDDLLLAATSEQDCQRGTRALLQTLGNLGYRASAKKAQICQKQVKYLGYLLKEGQRWLTEARKETVMGQPTPKTPRQLREFLGTAGFCRLWIPGFAEMAAPLYPLTKPGTLFNWGPDQQKAYQEIKQALLTAPALGLPDLTKPFELFVDEKQGYAKGVLTQKLGPWRRPVAYLSKKLDPVAAGWPPCLRMVAAIAVLTKDAGKLTMGQPLVILAPHAVEALVKQPPDRWLSNARMTHYQAMLLDTDRVQFGPVVALNPATLLPLPEKEAPHDCLEILAETHGTRPDLTDQPIPDADYTWYTDGSSFLQEGQRRAGAAVTTETEVIWARALPAGTSAQRAELIALTQALKMAEGKKLNVYTDSRYAFATAHVHGEIYRRRGWLTSEGREIKNKNEILALLKALFLPKRLSIIHCPGHQKGNSAEARGNRMADQAAREAAMKAVLETSTLLAGKRTADGSEFEKRTADGSEFESPKKKAKVE

SEQ ID NO: 7045 - protein, 2098 aa, synthetic construct
MPAAKRVKLDGGDKKYSIGLDIGTNSVGWAVITDEYKVPSKKFKVLGNTDRHSIKKNLIGALLFDSGETAEATRLKRTARRRYTRRKNRICYLQEIFSNEMAKVDDSFFHRLEESFLVEEDKKHERHPIFGNIVDEVAYHEKYPTIYHLRKKLVDSTDKADLRLIYLALAHMIKFRGHFLIEGDLNPDNSDVDKLFIQLVQTYNQLFEENPINASGVDAKAILSARLSKSRRLENLIAQLPGEKKNGLFGNLIALSLGLTPNFKSNFDLAEDAKLQLSKDTYDDDLDNLLAQIGDQYADLFLAAKNLSDAILLSDILRVNTEITKAPLSASMIKRYDEHHQDLTLLKALVRQQLPEKYKEIFFDQSKNGYAGYIDGGASQEEFYKFIKPILEKMDGTEELLVKLNREDLLRKQRTFDNGSIPHQIHLGELHAILRRQEDFYPFLKDNREKIEKILTFRIPYYVGPLARGNSRFAWMTRKSEETITPWNFEEVVDKGASAQSFIERMTNFDKNLPNEKVLPKHSLLYEYFTVYNELTKVKYVTEGMRKPAFLSGEQKKAIVDLLFKTNRKVTVKQLKEDYFKKIECFDSVEISGVEDRFNASLGTYHDLLKIIKDKDFLDNEENEDILEDIVLTLTLFEDREMIEERLKTYAHLFDDKVMKQLKRRRYTGWGRLSRKLINGIRDKQSGKTILDFLKSDGFANRNFMQLIHDDSLTFKEDIQKAQVSGQGDSLHEHIANLAGSPAIKKGILQTVKVVDELVKVMGRHKPENIVIEMARENQTTQKGQKNSRERMKRIEEGIKELGSQILKEHPVENTQLQNEKLYLYYLQNGRDMYVDQELDINRLSDYDVDHIVPQSFLKDDSIDNKVLTRSDKARGKSDNVPSEEVVKKMKNYWRQLLNAKLITQRKFDNLTKAERGGLSELDKAGFIKRQLVETRQITKHVAQILDSRMNTKYDENDKLIREVKVITLKSKLVSDFRKDFQFYKVREINNYHHAHDAYLNAVVGTALIKKYPKLESEFVYGDYKVYDVRKMIAKSEQEIGKATAKYFFYSNIMNFFKTEITLANGEIRKRPLIETNGETGEIVWDKGRDFATVRKVLSMPQVNIVKKTEVQTGGFSKESILPKRNSDKLIARKKDWDPKKYGGFDSPTVAYSVLVVAKVEKGKSKKLKSVKELLGITIMERSSFEKNPIDFLEAKGYKEVKKDLIIKLPKYSLFELENGRKRMLASAGELQKGNELALPSKYVNFLYLASHYEKLKGSPEDNEQKQLFVEQHKHYLDEIIEQISEFSKRVILADANLDKVLSAYNKHRDKPIREQAENIIHLFTLTNLGAPAAFKYFDTTIDRKRYTSTKEVLDATLIHQSITGLYETRIDLSQLGGDGGGGSGSSEAAAKGGTAPLEEEYRLFLEAPIQNVTLLEQWKREIPKVWAEINPPGLASTQAPIHVQLLSTALPVRVRQYPITLEAKRSLRETIRKFRAAGILRPVHSPWNTPLLPVRKSGTSEYRMVQDLREVNKRVETIHPTVPNPYTLLSLLPPDRIWYSVLDLKDAFFCIPLAPESQLIFAFEWADAEEGESGQLTWTRLPQGFKNSPTLFNEALNRDLQGFRLDHPSVSLLQYVDDLLIAADTQAACLSATRDLLMTLAELGYRVSGKKAQLCQEEVTYLGFKIHKGSRSLSNSRTQAILQIPVPKTKRQVREFLGTIGYCRLWIPGFAELAQPLYAATRPGNDPLVWGEKEEEAFQSLKLALTQPPALALPSLDKPFQLFVEETSGAAKGVLTQALGPWKRPVAYLSKRLDPVAAGWPRCLRAIAAAALLTREASKLTFGQDIEITSSHNLESLLRSPPDKWLTNARITQYQVLLLDPPRVRFKQTAALNPATLLPETDDTLPIHHCLDTLDSLTSTRPDLTDQPLAQAEATLFTDGSSYIRDGKRYAGAAVVTLDSVIWAEPLPIGTSAQKAELIALTKALEWSKDKSVNIYTDSRYAFATLHVHGMIYRERGWLTAGGKAIKNAPEILALLTAVWLPKRVAVMHCKGHQKDDAPTSTGNRRADEVAREVAIRPLSTQATISAGKRTADGSEFEKRTADGSEFESPKKKAKVE

SEQ ID NO: 7046 - protein, 2098 aa, synthetic construct
MPAAKRVKLDGGDKKYSIGLDIGTNSVGWAVITDEYKVPSKKFKVLGNTDRHSIKKNLIGALLFDSGETAEATRLKRTARRRYTRRKNRICYLQEIFSNEMAKVDDSFFHRLEESFLVEEDKKHERHPIFGNIVDEVAYHEKYPTIYHLRKKLVDSTDKADLRLIYLALAHMIKFRGHFLIEGDLNPDNSDVDKLFIQLVQTYNQLFEENPINASGVDAKAILSARLSKSRRLENLIAQLPGEKKNGLFGNLIALSLGLTPNFKSNFDLAEDAKLQLSKDTYDDDLDNLLAQIGDQYADLFLAAKNLSDAILLSDILRVNTEITKAPLSASMIKRYDEHHQDLTLLKALVRQQLPEKYKEIFFDQSKNGYAGYIDGGASQEEFYKFIKPILEKMDGTEELLVKLNREDLLRKQRTFDNGSIPHQIHLGELHAILRRQEDFYPFLKDNREKIEKILTFRIPYYVGPLARGNSRFAWMTRKSEETITPWNFEEVVDKGASAQSFIERMTNFDKNLPNEKVLPKHSLLYEYFTVYNELTKVKYVTEGMRKPAFLSGEQKKAIVDLLFKTNRKVTVKQLKEDYFKKIECFDSVEISGVEDRFNASLGTYHDLLKIIKDKDFLDNEENEDILEDIVLTLTLFEDREMIEERLKTYAHLFDDKVMKQLKRRRYTGWGRLSRKLINGIRDKQSGKTILDFLKSDGFANRNFMQLIHDDSLTFKEDIQKAQVSGQGDSLHEHIANLAGSPAIKKGILQTVKVVDELVKVMGRHKPENIVIEMARENQTTQKGQKNSRERMKRIEEGIKELGSQILKEHPVENTQLQNEKLYLYYLQNGRDMYVDQELDINRLSDYDVDHIVPQSFLKDDSIDNKVLTRSDKARGKSDNVPSEEVVKKMKNYWRQLLNAKLITQRKFDNLTKAERGGLSELDKAGFIKRQLVETRQITKHVAQILDSRMNTKYDENDKLIREVKVITLKSKLVSDFRKDFQFYKVREINNYHHAHDAYLNAVVGTALIKKYPKLESEFVYGDYKVYDVRKMIAKSEQEIGKATAKYFFYSNIMNFFKTEITLANGEIRKRPLIETNGETGEIVWDKGRDFATVRKVLSMPQVNIVKKTEVQTGGFSKESILPKRNSDKLIARKKDWDPKKYGGFDSPTVAYSVLVVAKVEKGKSKKLKSVKELLGITIMERSSFEKNPIDFLEAKGYKEVKKDLIIKLPKYSLFELENGRKRMLASAGELQKGNELALPSKYVNFLYLASHYEKLKGSPEDNEQKQLFVEQHKHYLDEIIEQISEFSKRVILADANLDKVLSAYNKHRDKPIREQAENIIHLFTLTNLGAPAAFKYFDTTIDRKRYTSTKEVLDATLIHQSITGLYETRIDLSQLGGDGGGGSGSSEAAAKGGTAPLEEEYRLFLEAPIQNVTLLEQWKREIPKVWAEINPPGLASTQAPIHVQLLSTALPVRVRQYPITLEAKRSLRETIRKFRAAGILRPVHSPWNTPLLPVRKSGTSEYRMVQDLREVNKRVETIHPTVPNPYTLLSLLPPDRIWYSVLDLKDAFFCIPLAPESQLIFAFEWADAEEGESGQLTWTRLPQGFKNSPTLFNEALNRDLQGFRLDHPSVSLLQYVDDLLIAADTQAACLSATRDLLMTLAELGYRVSGKKAQLCQEEVTYLGFKIHKGSRSLSNSRTQAILQIPVPKTKRQVREFLGKIGYCRLFIPGFAELAQPLYAATRPGNDPLVWGEKEEEAFQSLKLALTQPPALALPSLDKPFQLFVEETSGAAKGVLTQALGPWKRPVAYLSKRLDPVAAGWPRCLRAIAAAALLTREASKLTFGQDIEITSSHNLESLLRSPPDKWLTNARITQYQVLLLDPPRVRFKQTAALNPATLLPETDDTLPIHHCLDTLDSLTSTRPDLTDQPLAQAEATLFTDGSSYIRDGKRYAGAAVVTLDSVIWAEPLPIGTSAQKAELIALTKALEWSKDKSVNIYTDSRYAFATLHVHGMIYRERGWLTAGGKAIKNAPEILALLTAVWLPKRVAVMHCKGHQKDDAPTSTGNRRADEVAREVAIRPLSTQATISAGKRTADGSEFEKRTADGSEFESPKKKAKVE

SEQ ID NO: 7047 - protein, 2218 aa, synthetic construct
MPAAKRVKLDGGDKKYSIGLDIGTNSVGWAVITDEYKVPSKKFKVLGNTDRHSIKKNLIGALLFDSGETAEATRLKRTARRRYTRRKNRICYLQEIFSNEMAKVDDSFFHRLEESFLVEEDKKHERHPIFGNIVDEVAYHEKYPTIYHLRKKLVDSTDKADLRLIYLALAHMIKFRGHFLIEGDLNPDNSDVDKLFIQLVQTYNQLFEENPINASGVDAKAILSARLSKSRRLENLIAQLPGEKKNGLFGNLIALSLGLTPNFKSNFDLAEDAKLQLSKDTYDDDLDNLLAQIGDQYADLFLAAKNLSDAILLSDILRVNTEITKAPLSASMIKRYDEHHQDLTLLKALVRQQLPEKYKEIFFDQSKNGYAGYIDGGASQEEFYKFIKPILEKMDGTEELLVKLNREDLLRKQRTFDNGSIPHQIHLGELHAILRRQEDFYPFLKDNREKIEKILTFRIPYYVGPLARGNSRFAWMTRKSEETITPWNFEEVVDKGASAQSFIERMTNFDKNLPNEKVLPKHSLLYEYFTVYNELTKVKYVTEGMRKPAFLSGEQKKAIVDLLFKTNRKVTVKQLKEDYFKKIECFDSVEISGVEDRFNASLGTYHDLLKIIKDKDFLDNEENEDILEDIVLTLTLFEDREMIEERLKTYAHLFDDKVMKQLKRRRYTGWGRLSRKLINGIRDKQSGKTILDFLKSDGFANRNFMQLIHDDSLTFKEDIQKAQVSGQGDSLHEHIANLAGSPAIKKGILQTVKVVDELVKVMGRHKPENIVIEMARENQTTQKGQKNSRERMKRIEEGIKELGSQILKEHPVENTQLQNEKLYLYYLQNGRDMYVDQELDINRLSDYDVDHIVPQSFLKDDSIDNKVLTRSDKARGKSDNVPSEEVVKKMKNYWRQLLNAKLITQRKFDNLTKAERGGLSELDKAGFIKRQLVETRQITKHVAQILDSRMNTKYDENDKLIREVKVITLKSKLVSDFRKDFQFYKVREINNYHHAHDAYLNAVVGTALIKKYPKLESEFVYGDYKVYDVRKMIAKSEQEIGKATAKYFFYSNIMNFFKTEITLANGEIRKRPLIETNGETGEIVWDKGRDFATVRKVLSMPQVNIVKKTEVQTGGFSKESILPKRNSDKLIARKKDWDPKKYGGFDSPTVAYSVLVVAKVEKGKSKKLKSVKELLGITIMERSSFEKNPIDFLEAKGYKEVKKDLIIKLPKYSLFELENGRKRMLASAGELQKGNELALPSKYVNFLYLASHYEKLKGSPEDNEQKQLFVEQHKHYLDEIIEQISEFSKRVILADANLDKVLSAYNKHRDKPIREQAENIIHLFTLTNLGAPAAFKYFDTTIDRKRYTSTKEVLDATLIHQSITGLYETRIDLSQLGGDGGGGSGSSEAAAKGGTLGDQGSRGSDPLPEPRVTLTVEGIPTEFLVNTGAEHSVLTKPMGKMGSKRTVVAGATGSKVYPWTTKRLLKIGQKQVTHSFLVIPECPAPLLGRDLLTKLKAQIQFSTEGPQVTWEDRPAMCLVLNLEEEYRLHEKPVPPSIDPSWLQLFPMVWAEKAGMGLANQVPPVVVELKSDASPVAVRQYPMSKEAREGIRPHIQRFLDLGILVPCQSPWNTPLLPVKKPGTNDYRPVQDLREVNKRVQDIHPTVPNPYNLLSSLPPSHTWYSVLDLKDAFFCLKLHPNSQPLFAFEWRDPEKGNTGQLTWTRLPQGFKNSPTLFDEALHRDLASFRALNPQVVMLQYVDDLLVAAPTYRDCKEGTRRLLQELSKLGYRVSAKKAQLCREEVTYLGYLLKGGKRWLTPARKATVMKIPTPTTPRQVREFLGTAGFCRLWIPGFASLAAPLYPLTREKVPFTWTEAHQEAFGRIKEALLSAPALALPDLTKPFALYVDEKEGVARGVLTQTLGPWRRPVAYLSKKLDPVASGWPTCLKAIAAVALLLKDADKLTLGQNVLVIAPHNLESIVRQPPDRWMTNARMTHYQSLLLNERVSFAPPAILNPATLLPVESDDTPIHICSEILAEETGTRPDLRDQPLPGVPAWYTDGSSFIMDGRRQAGAAIVDNKRTVWASNLPEGTSAQKAELIALTQALRLAEGKSINIYTDSRYAFATAHVHGAIYKQRGLLTSAGKDIKNKEEILALLEAIHLPKRVAIIHCPGHQRGTDPVATGNRKADEAAKQAAQSTRILTETTKNAGKRTADGSEFEKRTADGSEFESPKKKAKVE

SEQ ID NO: 7048 - protein, 2096 aa, synthetic construct
MPAAKRVKLDGGDKKYSIGLDIGTNSVGWAVITDEYKVPSKKFKVLGNTDRHSIKKNLIGALLFDSGETAEATRLKRTARRRYTRRKNRICYLQEIFSNEMAKVDDSFFHRLEESFLVEEDKKHERHPIFGNIVDEVAYHEKYPTIYHLRKKLVDSTDKADLRLIYLALAHMIKFRGHFLIEGDLNPDNSDVDKLFIQLVQTYNQLFEENPINASGVDAKAILSARLSKSRRLENLIAQLPGEKKNGLFGNLIALSLGLTPNFKSNFDLAEDAKLQLSKDTYDDDLDNLLAQIGDQYADLFLAAKNLSDAILLSDILRVNTEITKAPLSASMIKRYDEHHQDLTLLKALVRQQLPEKYKEIFFDQSKNGYAGYIDGGASQEEFYKFIKPILEKMDGTEELLVKLNREDLLRKQRTFDNGSIPHQIHLGELHAILRRQEDFYPFLKDNREKIEKILTFRIPYYVGPLARGNSRFAWMTRKSEETITPWNFEEVVDKGASAQSFIERMTNFDKNLPNEKVLPKHSLLYEYFTVYNELTKVKYVTEGMRKPAFLSGEQKKAIVDLLFKTNRKVTVKQLKEDYFKKIECFDSVEISGVEDRFNASLGTYHDLLKIIKDKDFLDNEENEDILEDIVLTLTLFEDREMIEERLKTYAHLFDDKVMKQLKRRRYTGWGRLSRKLINGIRDKQSGKTILDFLKSDGFANRNFMQLIHDDSLTFKEDIQKAQVSGQGDSLHEHIANLAGSPAIKKGILQTVKVVDELVKVMGRHKPENIVIEMARENQTTQKGQKNSRERMKRIEEGIKELGSQILKEHPVENTQLQNEKLYLYYLQNGRDMYVDQELDINRLSDYDVDHIVPQSFLKDDSIDNKVLTRSDKARGKSDNVPSEEVVKKMKNYWRQLLNAKLITQRKFDNLTKAERGGLSELDKAGFIKRQLVETRQITKHVAQILDSRMNTKYDENDKLIREVKVITLKSKLVSDFRKDFQFYKVREINNYHHAHDAYLNAVVGTALIKKYPKLESEFVYGDYKVYDVRKMIAKSEQEIGKATAKYFFYSNIMNFFKTEITLANGEIRKRPLIETNGETGEIVWDKGRDFATVRKVLSMPQVNIVKKTEVQTGGFSKESILPKRNSDKLIARKKDWDPKKYGGFDSPTVAYSVLVVAKVEKGKSKKLKSVKELLGITIMERSSFEKNPIDFLEAKGYKEVKKDLIIKLPKYSLFELENGRKRMLASAGELQKGNELALPSKYVNFLYLASHYEKLKGSPEDNEQKQLFVEQHKHYLDEIIEQISEFSKRVILADANLDKVLSAYNKHRDKPIREQAENIIHLFTLTNLGAPAAFKYFDTTIDRKRYTSTKEVLDATLIHQSITGLYETRIDLSQLGGDGGGGSGSSEAAAKGGTLGIEDEYRLHETSTEPDVSLGSTWLSDFPQAWAETGGMGLAVRQAPLIIPLKATSTPVSIQQYPMSHEARLGIKPHIQRLLDQGILVPCQSPWNTPLLPVKKPGTNDYRPVQDLREVNKRVEDIHPTVPNPYNLLSGLPPSHQWYTVLDLKDAFFCLRLHPTSQPLFAFEWRDPGMGISGQLTWTRLPQGFKNSPTLFNEALHRDLADFRIQHPDLILLQYVDDILLAATSELDCQQGTRALLQTLGDLGYRASAKKAQICQKQVKYLGYLLREGQRWLTEARKETVMGQPVPKTPRQLREFLGTAGFCRLWIPGFAEMAAPLYPLTKPGTLFSWGPDQQKAYQEIKQALLTAPALGLPDLTKPFELFVDEKQGYAKGVLTQKLGPWRRPVAYLSKKLDPVAAGWPPCLRMVAAIAVLTKDAGKLTMGQPLVILAPHAVEALVKQPPDRWLSNARMTHYQAMLLDTDRVQFGPVVALNPATLLPLPEEGAPHDCLEILAETHGTRPDLTDQPIPDADHTWYTDGSSFLQEGQRKAGAAVTTETEVIWAGALPAGTSAQRAELIALTQALKMAEGKRLNVYTDSRYAFATAHIHGEIYRRRGWLTSEGREIKNKSEILALLKALFLPKRLSIIHCLGHQKGDSAEARGNRLADQAAREAAIKTPPDTSTLLAGKRTADGSEFEKRTADGSEFESPKKKAKVE

SEQ ID NO: 7049 - protein, 2096 aa, synthetic construct
MPAAKRVKLDGGDKKYSIGLDIGTNSVGWAVITDEYKVPSKKFKVLGNTDRHSIKKNLIGALLFDSGETAEATRLKRTARRRYTRRKNRICYLQEIFSNEMAKVDDSFFHRLEESFLVEEDKKHERHPIFGNIVDEVAYHEKYPTIYHLRKKLVDSTDKADLRLIYLALAHMIKFRGHFLIEGDLNPDNSDVDKLFIQLVQTYNQLFEENPINASGVDAKAILSARLSKSRRLENLIAQLPGEKKNGLFGNLIALSLGLTPNFKSNFDLAEDAKLQLSKDTYDDDLDNLLAQIGDQYADLFLAAKNLSDAILLSDILRVNTEITKAPLSASMIKRYDEHHQDLTLLKALVRQQLPEKYKEIFFDQSKNGYAGYIDGGASQEEFYKFIKPILEKMDGTEELLVKLNREDLLRKQRTFDNGSIPHQIHLGELHAILRRQEDFYPFLKDNREKIEKILTFRIPYYVGPLARGNSRFAWMTRKSEETITPWNFEEVVDKGASAQSFIERMTNFDKNLPNEKVLPKHSLLYEYFTVYNELTKVKYVTEGMRKPAFLSGEQKKAIVDLLFKTNRKVTVKQLKEDYFKKIECFDSVEISGVEDRFNASLGTYHDLLKIIKDKDFLDNEENEDILEDIVLTLTLFEDREMIEERLKTYAHLFDDKVMKQLKRRRYTGWGRLSRKLINGIRDKQSGKTILDFLKSDGFANRNFMQLIHDDSLTFKEDIQKAQVSGQGDSLHEHIANLAGSPAIKKGILQTVKVVDELVKVMGRHKPENIVIEMARENQTTQKGQKNSRERMKRIEEGIKELGSQILKEHPVENTQLQNEKLYLYYLQNGRDMYVDQELDINRLSDYDVDHIVPQSFLKDDSIDNKVLTRSDKARGKSDNVPSEEVVKKMKNYWRQLLNAKLITQRKFDNLTKAERGGLSELDKAGFIKRQLVETRQITKHVAQILDSRMNTKYDENDKLIREVKVITLKSKLVSDFRKDFQFYKVREINNYHHAHDAYLNAVVGTALIKKYPKLESEFVYGDYKVYDVRKMIAKSEQEIGKATAKYFFYSNIMNFFKTEITLANGEIRKRPLIETNGETGEIVWDKGRDFATVRKVLSMPQVNIVKKTEVQTGGFSKESILPKRNSDKLIARKKDWDPKKYGGFDSPTVAYSVLVVAKVEKGKSKKLKSVKELLGITIMERSSFEKNPIDFLEAKGYKEVKKDLIIKLPKYSLFELENGRKRMLASAGELQKGNELALPSKYVNFLYLASHYEKLKGSPEDNEQKQLFVEQHKHYLDEIIEQISEFSKRVILADANLDKVLSAYNKHRDKPIREQAENIIHLFTLTNLGAPAAFKYFDTTIDRKRYTSTKEVLDATLIHQSITGLYETRIDLSQLGGDGGGGSGSSEAAAKGGTLNIEDEYRLHEISTEPDVSPGSTWLSDFPQAWAETGGMGLAVRQAPLIIPLKATSTPVSIKQYPMSQEAKLGIKPHIQRLLDQGILVPCQSPWNTPLLPVKKPGTNDYRPVQGLREVNKRVEDIHPTVPNPYNLLSGLPTSHRWYTVLDLKDAFFCLRLHPTSQPLFASEWRDPGMGISGQLTWTRLPQGFKNSPTLFNEALHRGLADFRIQHPDLILLQYVDDLLLAATSELDCQQGTRALLKTLGNLGYRASAKKAQICQKQVKYLGYLLREGQRWLTEARKETVMGQPTPKTPRQLREFLGKAGFCRLFIPRFAEMAAPLYPLTKPGTLFNWGPDQQKAYHEIKQALLTAPALGLPDLTKPFELFVDEKQGYAKGVLTQKLGPWRRPVAYLSKKLDPVAAGWPPCLRMVAAIAVLTKDAGKLTMGQPLVILAPHAVEALVKQPPDRWLSNARMTHYQAMLLDTDRVQFGPVVALNPATLLPLPEEGAPHDCLEILAETHGTEPDLTDQPIPDADHTWYTDGSSFLQEGQRKAGAAVTTETEVIWARALPAGTSAQRAELIALTQALKMAEGKRLNVYTDSRYAFATAHIHGEIYKRRGWLTSEGREIKNKSEILALLKALFLPKRLSIIHCLGHQKGDSAEARGNRLADQAAREAAIKTPPDTSTLLAGKRTADGSEFEKRTADGSEFESPKKKAKVE

SEQ ID NO: 7050 - protein, 2090 aa, synthetic construct
MPAAKRVKLDGGDKKYSIGLDIGTNSVGWAVITDEYKVPSKKFKVLGNTDRHSIKKNLIGALLFDSGETAEATRLKRTARRRYTRRKNRICYLQEIFSNEMAKVDDSFFHRLEESFLVEEDKKHERHPIFGNIVDEVAYHEKYPTIYHLRKKLVDSTDKADLRLIYLALAHMIKFRGHFLIEGDLNPDNSDVDKLFIQLVQTYNQLFEENPINASGVDAKAILSARLSKSRRLENLIAQLPGEKKNGLFGNLIALSLGLTPNFKSNFDLAEDAKLQLSKDTYDDDLDNLLAQIGDQYADLFLAAKNLSDAILLSDILRVNTEITKAPLSASMIKRYDEHHQDLTLLKALVRQQLPEKYKEIFFDQSKNGYAGYIDGGASQEEFYKFIKPILEKMDGTEELLVKLNREDLLRKQRTFDNGSIPHQIHLGELHAILRRQEDFYPFLKDNREKIEKILTFRIPYYVGPLARGNSRFAWMTRKSEETITPWNFEEVVDKGASAQSFIERMTNFDKNLPNEKVLPKHSLLYEYFTVYNELTKVKYVTEGMRKPAFLSGEQKKAIVDLLFKTNRKVTVKQLKEDYFKKIECFDSVEISGVEDRFNASLGTYHDLLKIIKDKDFLDNEENEDILEDIVLTLTLFEDREMIEERLKTYAHLFDDKVMKQLKRRRYTGWGRLSRKLINGIRDKQSGKTILDFLKSDGFANRNFMQLIHDDSLTFKEDIQKAQVSGQGDSLHEHIANLAGSPAIKKGILQTVKVVDELVKVMGRHKPENIVIEMARENQTTQKGQKNSRERMKRIEEGIKELGSQILKEHPVENTQLQNEKLYLYYLQNGRDMYVDQELDINRLSDYDVDHIVPQSFLKDDSIDNKVLTRSDKARGKSDNVPSEEVVKKMKNYWRQLLNAKLITQRKFDNLTKAERGGLSELDKAGFIKRQLVETRQITKHVAQILDSRMNTKYDENDKLIREVKVITLKSKLVSDFRKDFQFYKVREINNYHHAHDAYLNAVVGTALIKKYPKLESEFVYGDYKVYDVRKMIAKSEQEIGKATAKYFFYSNIMNFFKTEITLANGEIRKRPLIETNGETGEIVWDKGRDFATVRKVLSMPQVNIVKKTEVQTGGFSKESILPKRNSDKLIARKKDWDPKKYGGFDSPTVAYSVLVVAKVEKGKSKKLKSVKELLGITIMERSSFEKNPIDFLEAKGYKEVKKDLIIKLPKYSLFELENGRKRMLASAGELQKGNELALPSKYVNFLYLASHYEKLKGSPEDNEQKQLFVEQHKHYLDEIIEQISEFSKRVILADANLDKVLSAYNKHRDKPIREQAENIIHLFTLTNLGAPAAFKYFDTTIDRKRYTSTKEVLDATLIHQSITGLYETRIDLSQLGGDGGGGSGSSEAAAKGGTLQLDDEYRLYSPLVKPDQNIQFWLEQFPQAWAETAGMGLAKQVPPQVIQLKASATPVSVRQYPLSKEAQEGIRPHVQRLIQQGILVPVQSPWNTPLLPVRKPGTNDYRPVQDLREVNKRVQDIHPTVPNPYNLLCALPPQRSWYTVLDLKDAFFCLRLHPTSQPLFAFEWRDPGTGRTGQLTWTRLPQGFKNSPTIFDEALHRDLANFRIQHPQVTLLQYVDDLLLAGATKQDCLEGTKALLLELSDLGYRASAKKAQICRREVTYLGYSLRDGQRWLTEARKKTVVQIPAPTTAKQVREFLGTAGFCRLWIPGFATLAAPLYPLTKEKGEFSWAPEHQKAFDAIKKALLSAPALALPDVTKPFTLYVDERKGVARGVLTQTLGPWRRPVAYLSKKLDPVASGWPVCLKAIAAVAILVKDADKLTLGQNITVIAPHALENIVRQPPDRWMTNARMTHYQSLLLTERVTFAPPAALNPATLLPEETDEPVTHDCHQLLIEETGVRKDLTDIPLTGEVLTWFTDGSSYVVEGKRMAGAAVVDGTRTIWASSLPEGTSAQKAELMALTQALRLAEGKSINIYTDSRYAFATAHVHGAIYKQRGLLTSAGREIKNKEEILSLLEALHLPKRLAIIHCPGHQKAKDPISRGNQMADRVAKQAAQGVNLLAGKRTADGSEFEKRTADGSEFESPKKKAKVE

SEQ ID NO: 7051 - protein, 2087 aa, synthetic construct
MPAAKRVKLDGGDKKYSIGLDIGTNSVGWAVITDEYKVPSKKFKVLGNTDRHSIKKNLIGALLFDSGETAEATRLKRTARRRYTRRKNRICYLQEIFSNEMAKVDDSFFHRLEESFLVEEDKKHERHPIFGNIVDEVAYHEKYPTIYHLRKKLVDSTDKADLRLIYLALAHMIKFRGHFLIEGDLNPDNSDVDKLFIQLVQTYNQLFEENPINASGVDAKAILSARLSKSRRLENLIAQLPGEKKNGLFGNLIALSLGLTPNFKSNFDLAEDAKLQLSKDTYDDDLDNLLAQIGDQYADLFLAAKNLSDAILLSDILRVNTEITKAPLSASMIKRYDEHHQDLTLLKALVRQQLPEKYKEIFFDQSKNGYAGYIDGGASQEEFYKFIKPILEKMDGTEELLVKLNREDLLRKQRTFDNGSIPHQIHLGELHAILRRQEDFYPFLKDNREKIEKILTFRIPYYVGPLARGNSRFAWMTRKSEETITPWNFEEVVDKGASAQSFIERMTNFDKNLPNEKVLPKHSLLYEYFTVYNELTKVKYVTEGMRKPAFLSGEQKKAIVDLLFKTNRKVTVKQLKEDYFKKIECFDSVEISGVEDRFNASLGTYHDLLKIIKDKDFLDNEENEDILEDIVLTLTLFEDREMIEERLKTYAHLFDDKVMKQLKRRRYTGWGRLSRKLINGIRDKQSGKTILDFLKSDGFANRNFMQLIHDDSLTFKEDIQKAQVSGQGDSLHEHIANLAGSPAIKKGILQTVKVVDELVKVMGRHKPENIVIEMARENQTTQKGQKNSRERMKRIEEGIKELGSQILKEHPVENTQLQNEKLYLYYLQNGRDMYVDQELDINRLSDYDVDHIVPQSFLKDDSIDNKVLTRSDKARGKSDNVPSEEVVKKMKNYWRQLLNAKLITQRKFDNLTKAERGGLSELDKAGFIKRQLVETRQITKHVAQILDSRMNTKYDENDKLIREVKVITLKSKLVSDFRKDFQFYKVREINNYHHAHDAYLNAVVGTALIKKYPKLESEFVYGDYKVYDVRKMIAKSEQEIGKATAKYFFYSNIMNFFKTEITLANGEIRKRPLIETNGETGEIVWDKGRDFATVRKVLSMPQVNIVKKTEVQTGGFSKESILPKRNSDKLIARKKDWDPKKYGGFDSPTVAYSVLVVAKVEKGKSKKLKSVKELLGITIMERSSFEKNPIDFLEAKGYKEVKKDLIIKLPKYSLFELENGRKRMLASAGELQKGNELALPSKYVNFLYLASHYEKLKGSPEDNEQKQLFVEQHKHYLDEIIEQISEFSKRVILADANLDKVLSAYNKHRDKPIREQAENIIHLFTLTNLGAPAAFKYFDTTIDRKRYTSTKEVLDATLIHQSITGLYETRIDLSQLGGDGGGGSGSSEAAAKGGIPWLMKKPLQLTTLVPLQEYEERLLKQTMLTGSYKEKLQSLFLKYDALWQHWENQVGHRRIKPHHIATGTVNPRPQKQYPINPKAKASIQTVINDLLKQGVLIQQNSIMNTPVYPVPKPDGKWRMVLDYREVNKTIPLIAAQNQHSAGILSSIFRGKYKTTLDLSNGFWAHSITPESYWLTAFTWLGQQYCWTRLPQGFLNSPALFNADVVDLLKEVPNVQVYVDDIYISHDDPREHLEQLEKVFSLLLNAGYVVSLKKSEIAQHEVEFLGFNITKEGRGLTETFKQKLLNITPPRDLKQLQSILGLLNFARNFIPNFSELVKPLYNIIATAPGKYITWTTDNSQQLQNIISMLNSAENLEERNPEVRLIMKVNTSPSAGYIRFYNEFAKRPIMYLNYVYTKAEVKFTNTEKLLTTIHKGLIKALDLGMGQEILVYSPIVSMTKIQKTPLPERKALPIRWITWMSYLEDPRIQFHYDKTLPELQQVPTVTDDIIAKIKHPSEFSMVFYTDGSAIKHPNVNKSHNAGMGIAQVQFKPEFTVINTWSIPLGDHTAQLAEVAAVEFACKKALKIDGPVLIVTDSFYVAESVNKELPYWQSNGFFNNKKKPLKHVSKWKSIADCIQLKPDIIIIHEKGHQPTASTFHTEGNNLADKLATQGSYVVNAGKRTADGSEFEKRTADGSEFESPKKKAKVE

SEQ ID NO: 7052 - protein, 2098 aa, synthetic construct
MPAAKRVKLDGGDKKYSIGLDIGTNSVGWAVITDEYKVPSKKFKVLGNTDRHSIKKNLIGALLFDSGETAEATRLKRTARRRYTRRKNRICYLQEIFSNEMAKVDDSFFHRLEESFLVEEDKKHERHPIFGNIVDEVAYHEKYPTIYHLRKKLVDSTDKADLRLIYLALAHMIKFRGHFLIEGDLNPDNSDVDKLFIQLVQTYNQLFEENPINASGVDAKAILSARLSKSRRLENLIAQLPGEKKNGLFGNLIALSLGLTPNFKSNFDLAEDAKLQLSKDTYDDDLDNLLAQIGDQYADLFLAAKNLSDAILLSDILRVNTEITKAPLSASMIKRYDEHHQDLTLLKALVRQQLPEKYKEIFFDQSKNGYAGYIDGGASQEEFYKFIKPILEKMDGTEELLVKLNREDLLRKQRTFDNGSIPHQIHLGELHAILRRQEDFYPFLKDNREKIEKILTFRIPYYVGPLARGNSRFAWMTRKSEETITPWNFEEVVDKGASAQSFIERMTNFDKNLPNEKVLPKHSLLYEYFTVYNELTKVKYVTEGMRKPAFLSGEQKKAIVDLLFKTNRKVTVKQLKEDYFKKIECFDSVEISGVEDRFNASLGTYHDLLKIIKDKDFLDNEENEDILEDIVLTLTLFEDREMIEERLKTYAHLFDDKVMKQLKRRRYTGWGRLSRKLINGIRDKQSGKTILDFLKSDGFANRNFMQLIHDDSLTFKEDIQKAQVSGQGDSLHEHIANLAGSPAIKKGILQTVKVVDELVKVMGRHKPENIVIEMARENQTTQKGQKNSRERMKRIEEGIKELGSQILKEHPVENTQLQNEKLYLYYLQNGRDMYVDQELDINRLSDYDVDHIVPQSFLKDDSIDNKVLTRSDKARGKSDNVPSEEVVKKMKNYWRQLLNAKLITQRKFDNLTKAERGGLSELDKAGFIKRQLVETRQITKHVAQILDSRMNTKYDENDKLIREVKVITLKSKLVSDFRKDFQFYKVREINNYHHAHDAYLNAVVGTALIKKYPKLESEFVYGDYKVYDVRKMIAKSEQEIGKATAKYFFYSNIMNFFKTEITLANGEIRKRPLIETNGETGEIVWDKGRDFATVRKVLSMPQVNIVKKTEVQTGGFSKESILPKRNSDKLIARKKDWDPKKYGGFDSPTVAYSVLVVAKVEKGKSKKLKSVKELLGITIMERSSFEKNPIDFLEAKGYKEVKKDLIIKLPKYSLFELENGRKRMLASAGELQKGNELALPSKYVNFLYLASHYEKLKGSPEDNEQKQLFVEQHKHYLDEIIEQISEFSKRVILADANLDKVLSAYNKHRDKPIREQAENIIHLFTLTNLGAPAAFKYFDTTIDRKRYTSTKEVLDATLIHQSITGLYETRIDLSQLGGDGGGGSEAAAKGSSGGTAPLEEEYRLFLEAPIQNVTLLEQWKREIPKVWAEINPPGLASTQAPIHVQLLSTALPVRVRQYPITLEAKRSLRETIRKFRAAGILRPVHSPWNTPLLPVRKSGTSEYRMVQDLREVNKRVETIHPTVPNPYTLLSLLPPDRIWYSVLDLKDAFFCIPLAPESQLIFAFEWADAEEGESGQLTWTRLPQGFKNSPTLFDEALNRDLQGFRLDHPSVSLLQYVDDLLIAADTQAACLSATRDLLMTLAELGYRVSGKKAQLCQEEVTYLGFKIHKGSRSLSNSRTQAILQIPVPKTKRQVREFLGTIGYCRLWIPGFAELAQPLYAATRGGNDPLVWGEKEEEAFQSLKLALTQPPALALPSLDKPFQLFVEETSGAAKGVLTQALGPWKRPVAYLSKRLDPVAAGWPRCLRAIAAAALLTREASKLTFGQDIEITSSHNLESLLRSPPDKWLTNARITQYQVLLLDPPRVRFKQTAALNPATLLPETDDTLPIHHCLDTLDSLTSTRPDLTDQPLAQAEATLFTDGSSYIRDGKRYAGAAVVTLDSVIWAEPLPIGTSAQKAELIALTKALEWSKDKSVNIYTDSRYAFATLHVHGMIYRERGLLTAGGKAIKNAPEILALLTAVWLPKRVAVMHCKGHQKDDAPTSTGNRRADEVAREVAIRPLSTQATISAGKRTADGSEFEKRTADGSEFESPKKKAKVE

SEQ ID NO: 7053 - protein, 2098 aa, synthetic construct
MPAAKRVKLDGGDKKYSIGLDIGTNSVGWAVITDEYKVPSKKFKVLGNTDRHSIKKNLIGALLFDSGETAEATRLKRTARRRYTRRKNRICYLQEIFSNEMAKVDDSFFHRLEESFLVEEDKKHERHPIFGNIVDEVAYHEKYPTIYHLRKKLVDSTDKADLRLIYLALAHMIKFRGHFLIEGDLNPDNSDVDKLFIQLVQTYNQLFEENPINASGVDAKAILSARLSKSRRLENLIAQLPGEKKNGLFGNLIALSLGLTPNFKSNFDLAEDAKLQLSKDTYDDDLDNLLAQIGDQYADLFLAAKNLSDAILLSDILRVNTEITKAPLSASMIKRYDEHHQDLTLLKALVRQQLPEKYKEIFFDQSKNGYAGYIDGGASQEEFYKFIKPILEKMDGTEELLVKLNREDLLRKQRTFDNGSIPHQIHLGELHAILRRQEDFYPFLKDNREKIEKILTFRIPYYVGPLARGNSRFAWMTRKSEETITPWNFEEVVDKGASAQSFIERMTNFDKNLPNEKVLPKHSLLYEYFTVYNELTKVKYVTEGMRKPAFLSGEQKKAIVDLLFKTNRKVTVKQLKEDYFKKIECFDSVEISGVEDRFNASLGTYHDLLKIIKDKDFLDNEENEDILEDIVLTLTLFEDREMIEERLKTYAHLFDDKVMKQLKRRRYTGWGRLSRKLINGIRDKQSGKTILDFLKSDGFANRNFMQLIHDDSLTFKEDIQKAQVSGQGDSLHEHIANLAGSPAIKKGILQTVKVVDELVKVMGRHKPENIVIEMARENQTTQKGQKNSRERMKRIEEGIKELGSQILKEHPVENTQLQNEKLYLYYLQNGRDMYVDQELDINRLSDYDVDHIVPQSFLKDDSIDNKVLTRSDKARGKSDNVPSEEVVKKMKNYWRQLLNAKLITQRKFDNLTKAERGGLSELDKAGFIKRQLVETRQITKHVAQILDSRMNTKYDENDKLIREVKVITLKSKLVSDFRKDFQFYKVREINNYHHAHDAYLNAVVGTALIKKYPKLESEFVYGDYKVYDVRKMIAKSEQEIGKATAKYFFYSNIMNFFKTEITLANGEIRKRPLIETNGETGEIVWDKGRDFATVRKVLSMPQVNIVKKTEVQTGGFSKESILPKRNSDKLIARKKDWDPKKYGGFDSPTVAYSVLVVAKVEKGKSKKLKSVKELLGITIMERSSFEKNPIDFLEAKGYKEVKKDLIIKLPKYSLFELENGRKRMLASAGELQKGNELALPSKYVNFLYLASHYEKLKGSPEDNEQKQLFVEQHKHYLDEIIEQISEFSKRVILADANLDKVLSAYNKHRDKPIREQAENIIHLFTLTNLGAPAAFKYFDTTIDRKRYTSTKEVLDATLIHQSITGLYETRIDLSQLGGDGGGGSEAAAKGSSGGTAPLEEEYRLFLEAPIQNVTLLEQWKREIPKVWAEINPPGLASTQAPIHVQLLSTALPVRVRQYPITLEAKRSLRETIRKFRAAGILRPVHSPWNTPLLPVRKSGTSEYRMVQDLREVNKRVETIHPTVPNPYTLLSLLPPDRIWYSVLDLKDAFFCIPLAPESQLIFAFEWADAEEGESGQLTWTRLPQGFKNSPTLFNEALNRDLQGFRLDHPSVSLLQYVDDLLIAADTQAACLSATRDLLMTLAELGYRVSGKKAQLCQEEVTYLGFKIHKGSRSLSNSRTQAILQIPVPKTKRQVREFLGTIGYCRLWIPGFAELAQPLYAATRPGNDPLVWGEKEEEAFQSLKLALTQPPALALPSLDKPFQLFVEETSGAAKGVLTQALGPWKRPVAYLSKRLDPVAAGWPRCLRAIAAAALLTREASKLTFGQDIEITSSHNLESLLRSPPDKWLTNARITQYQVLLLDPPRVRFKQTAALNPATLLPETDDTLPIHHCLDTLDSLTSTRPDLTDQPLAQAEATLFTDGSSYIRDGKRYAGAAVVTLDSVIWAEPLPIGTSAQKAELIALTKALEWSKDKSVNIYTDSRYAFATLHVHGMIYRERGWLTAGGKAIKNAPEILALLTAVWLPKRVAVMHCKGHQKDDAPTSTGNRRADEVAREVAIRPLSTQATISAGKRTADGSEFEKRTADGSEFESPKKKAKVE

SEQ ID NO: 7054 - protein, 2098 aa, synthetic construct
MPAAKRVKLDGGDKKYSIGLDIGTNSVGWAVITDEYKVPSKKFKVLGNTDRHSIKKNLIGALLFDSGETAEATRLKRTARRRYTRRKNRICYLQEIFSNEMAKVDDSFFHRLEESFLVEEDKKHERHPIFGNIVDEVAYHEKYPTIYHLRKKLVDSTDKADLRLIYLALAHMIKFRGHFLIEGDLNPDNSDVDKLFIQLVQTYNQLFEENPINASGVDAKAILSARLSKSRRLENLIAQLPGEKKNGLFGNLIALSLGLTPNFKSNFDLAEDAKLQLSKDTYDDDLDNLLAQIGDQYADLFLAAKNLSDAILLSDILRVNTEITKAPLSASMIKRYDEHHQDLTLLKALVRQQLPEKYKEIFFDQSKNGYAGYIDGGASQEEFYKFIKPILEKMDGTEELLVKLNREDLLRKQRTFDNGSIPHQIHLGELHAILRRQEDFYPFLKDNREKIEKILTFRIPYYVGPLARGNSRFAWMTRKSEETITPWNFEEVVDKGASAQSFIERMTNFDKNLPNEKVLPKHSLLYEYFTVYNELTKVKYVTEGMRKPAFLSGEQKKAIVDLLFKTNRKVTVKQLKEDYFKKIECFDSVEISGVEDRFNASLGTYHDLLKIIKDKDFLDNEENEDILEDIVLTLTLFEDREMIEERLKTYAHLFDDKVMKQLKRRRYTGWGRLSRKLINGIRDKQSGKTILDFLKSDGFANRNFMQLIHDDSLTFKEDIQKAQVSGQGDSLHEHIANLAGSPAIKKGILQTVKVVDELVKVMGRHKPENIVIEMARENQTTQKGQKNSRERMKRIEEGIKELGSQILKEHPVENTQLQNEKLYLYYLQNGRDMYVDQELDINRLSDYDVDHIVPQSFLKDDSIDNKVLTRSDKARGKSDNVPSEEVVKKMKNYWRQLLNAKLITQRKFDNLTKAERGGLSELDKAGFIKRQLVETRQITKHVAQILDSRMNTKYDENDKLIREVKVITLKSKLVSDFRKDFQFYKVREINNYHHAHDAYLNAVVGTALIKKYPKLESEFVYGDYKVYDVRKMIAKSEQEIGKATAKYFFYSNIMNFFKTEITLANGEIRKRPLIETNGETGEIVWDKGRDFATVRKVLSMPQVNIVKKTEVQTGGFSKESILPKRNSDKLIARKKDWDPKKYGGFDSPTVAYSVLVVAKVEKGKSKKLKSVKELLGITIMERSSFEKNPIDFLEAKGYKEVKKDLIIKLPKYSLFELENGRKRMLASAGELQKGNELALPSKYVNFLYLASHYEKLKGSPEDNEQKQLFVEQHKHYLDEIIEQISEFSKRVILADANLDKVLSAYNKHRDKPIREQAENIIHLFTLTNLGAPAAFKYFDTTIDRKRYTSTKEVLDATLIHQSITGLYETRIDLSQLGGDGGGGSEAAAKGSSGGTAPLEEEYRLFLEAPIQNVTLLEQWKREIPKVWAEINPPGLASTQAPIHVQLLSTALPVRVRQYPITLEAKRSLRETIRKFRAAGILRPVHSPWNTPLLPVRKSGTSEYRMVQDLREVNKRVETIHPTVPNPYTLLSLLPPDRIWYSVLDLKDAFFCIPLAPESQLIFAFEWADAEEGESGQLTWTRLPQGFKNSPTLFNEALNRDLQGFRLDHPSVSLLQYVDDLLIAADTQAACLSATRDLLMTLAELGYRVSGKKAQLCQEEVTYLGFKIHKGSRSLSNSRTQAILQIPVPKTKRQVREFLGKIGYCRLFIPGFAELAQPLYAATRPGNDPLVWGEKEEEAFQSLKLALTQPPALALPSLDKPFQLFVEETSGAAKGVLTQALGPWKRPVAYLSKRLDPVAAGWPRCLRAIAAAALLTREASKLTFGQDIEITSSHNLESLLRSPPDKWLTNARITQYQVLLLDPPRVRFKQTAALNPATLLPETDDTLPIHHCLDTLDSLTSTRPDLTDQPLAQAEATLFTDGSSYIRDGKRYAGAAVVTLDSVIWAEPLPIGTSAQKAELIALTKALEWSKDKSVNIYTDSRYAFATLHVHGMIYRERGWLTAGGKAIKNAPEILALLTAVWLPKRVAVMHCKGHQKDDAPTSTGNRRADEVAREVAIRPLSTQATISAGKRTADGSEFEKRTADGSEFESPKKKAKVE

SEQ ID NO: 7055 - protein, 2087 aa, synthetic construct
MPAAKRVKLDGGDKKYSIGLDIGTNSVGWAVITDEYKVPSKKFKVLGNTDRHSIKKNLIGALLFDSGETAEATRLKRTARRRYTRRKNRICYLQEIFSNEMAKVDDSFFHRLEESFLVEEDKKHERHPIFGNIVDEVAYHEKYPTIYHLRKKLVDSTDKADLRLIYLALAHMIKFRGHFLIEGDLNPDNSDVDKLFIQLVQTYNQLFEENPINASGVDAKAILSARLSKSRRLENLIAQLPGEKKNGLFGNLIALSLGLTPNFKSNFDLAEDAKLQLSKDTYDDDLDNLLAQIGDQYADLFLAAKNLSDAILLSDILRVNTEITKAPLSASMIKRYDEHHQDLTLLKALVRQQLPEKYKEIFFDQSKNGYAGYIDGGASQEEFYKFIKPILEKMDGTEELLVKLNREDLLRKQRTFDNGSIPHQIHLGELHAILRRQEDFYPFLKDNREKIEKILTFRIPYYVGPLARGNSRFAWMTRKSEETITPWNFEEVVDKGASAQSFIERMTNFDKNLPNEKVLPKHSLLYEYFTVYNELTKVKYVTEGMRKPAFLSGEQKKAIVDLLFKTNRKVTVKQLKEDYFKKIECFDSVEISGVEDRFNASLGTYHDLLKIIKDKDFLDNEENEDILEDIVLTLTLFEDREMIEERLKTYAHLFDDKVMKQLKRRRYTGWGRLSRKLINGIRDKQSGKTILDFLKSDGFANRNFMQLIHDDSLTFKEDIQKAQVSGQGDSLHEHIANLAGSPAIKKGILQTVKVVDELVKVMGRHKPENIVIEMARENQTTQKGQKNSRERMKRIEEGIKELGSQILKEHPVENTQLQNEKLYLYYLQNGRDMYVDQELDINRLSDYDVDHIVPQSFLKDDSIDNKVLTRSDKARGKSDNVPSEEVVKKMKNYWRQLLNAKLITQRKFDNLTKAERGGLSELDKAGFIKRQLVETRQITKHVAQILDSRMNTKYDENDKLIREVKVITLKSKLVSDFRKDFQFYKVREINNYHHAHDAYLNAVVGTALIKKYPKLESEFVYGDYKVYDVRKMIAKSEQEIGKATAKYFFYSNIMNFFKTEITLANGEIRKRPLIETNGETGEIVWDKGRDFATVRKVLSMPQVNIVKKTEVQTGGFSKESILPKRNSDKLIARKKDWDPKKYGGFDSPTVAYSVLVVAKVEKGKSKKLKSVKELLGITIMERSSFEKNPIDFLEAKGYKEVKKDLIIKLPKYSLFELENGRKRMLASAGELQKGNELALPSKYVNFLYLASHYEKLKGSPEDNEQKQLFVEQHKHYLDEIIEQISEFSKRVILADANLDKVLSAYNKHRDKPIREQAENIIHLFTLTNLGAPAAFKYFDTTIDRKRYTSTKEVLDATLIHQSITGLYETRIDLSQLGGDGGGGSEAAAKGSSGGVPWILKKPLELTIKLDLEEQQGTLLNNSILSKKGKEELKQLFEKYSALWQSWENQVGHRRIRPHKIATGTVKPTPQKQYHINPKAKPDIQIVINDLLKQGVLIQKESTMNTPVYPVPKPNGRWRMVLDYRAVNKVTPLIAVQNQHSYGILGSLFKGRYKTTIDLSNGFWAHPIVPEDYWITAFTWQGKQYCWTVLPQGFLNSPGLFTGDVVDLLQGIPNVEVYVDDVYISHDSEKEHLEYLDILFNRLKEAGYIISLKKSNIANSIVDFLGFQITNEGRGLTDTFKEKLENITAPTTLKQLQSILGLLNFARNFIPDFTELIAPLYALIPKSTKNYVPWQIEHSTTLETLITKLNGAEYLQGRKGDKTLIMKVNASYTTGYIRYYNEGEKKPISYVSIVFSKTELKFTELEKLLTTVHKGLLKALDLSMGQNIHVYSPIVSMQNIQKTPQTAKKALASRWLSWLSYLEDPRIRFFYDPQMPALKDLPAVDTGKDNKKHPSNFQHIFYTDGSAITSPTKEGHLNAGMGIVYFINKDGNLQKQQEWSISLGNHTAQFAEIAAFEFALKKCLPLGGNILVVTDSNYVAKAYNEELDVWASNGFVNNRKKPLKHISKWKSVADLKRLRPDVVVTHEPGHQKLDSSPHAYGNNLADQLATQASFKVHAGKRTADGSEFEKRTADGSEFESPKKKAKVE

SEQ ID NO: 7056 - protein, 2176 aa, synthetic construct
MPAAKRVKLDGGDKKYSIGLDIGTNSVGWAVITDEYKVPSKKFKVLGNTDRHSIKKNLIGALLFDSGETAEATRLKRTARRRYTRRKNRICYLQEIFSNEMAKVDDSFFHRLEESFLVEEDKKHERHPIFGNIVDEVAYHEKYPTIYHLRKKLVDSTDKADLRLIYLALAHMIKFRGHFLIEGDLNPDNSDVDKLFIQLVQTYNQLFEENPINASGVDAKAILSARLSKSRRLENLIAQLPGEKKNGLFGNLIALSLGLTPNFKSNFDLAEDAKLQLSKDTYDDDLDNLLAQIGDQYADLFLAAKNLSDAILLSDILRVNTEITKAPLSASMIKRYDEHHQDLTLLKALVRQQLPEKYKEIFFDQSKNGYAGYIDGGASQEEFYKFIKPILEKMDGTEELLVKLNREDLLRKQRTFDNGSIPHQIHLGELHAILRRQEDFYPFLKDNREKIEKILTFRIPYYVGPLARGNSRFAWMTRKSEETITPWNFEEVVDKGASAQSFIERMTNFDKNLPNEKVLPKHSLLYEYFTVYNELTKVKYVTEGMRKPAFLSGEQKKAIVDLLFKTNRKVTVKQLKEDYFKKIECFDSVEISGVEDRFNASLGTYHDLLKIIKDKDFLDNEENEDILEDIVLTLTLFEDREMIEERLKTYAHLFDDKVMKQLKRRRYTGWGRLSRKLINGIRDKQSGKTILDFLKSDGFANRNFMQLIHDDSLTFKEDIQKAQVSGQGDSLHEHIANLAGSPAIKKGILQTVKVVDELVKVMGRHKPENIVIEMARENQTTQKGQKNSRERMKRIEEGIKELGSQILKEHPVENTQLQNEKLYLYYLQNGRDMYVDQELDINRLSDYDVDHIVPQSFLKDDSIDNKVLTRSDKARGKSDNVPSEEVVKKMKNYWRQLLNAKLITQRKFDNLTKAERGGLSELDKAGFIKRQLVETRQITKHVAQILDSRMNTKYDENDKLIREVKVITLKSKLVSDFRKDFQFYKVREINNYHHAHDAYLNAVVGTALIKKYPKLESEFVYGDYKVYDVRKMIAKSEQEIGKATAKYFFYSNIMNFFKTEITLANGEIRKRPLIETNGETGEIVWDKGRDFATVRKVLSMPQVNIVKKTEVQTGGFSKESILPKRNSDKLIARKKDWDPKKYGGFDSPTVAYSVLVVAKVEKGKSKKLKSVKELLGITIMERSSFEKNPIDFLEAKGYKEVKKDLIIKLPKYSLFELENGRKRMLASAGELQKGNELALPSKYVNFLYLASHYEKLKGSPEDNEQKQLFVEQHKHYLDEIIEQISEFSKRVILADANLDKVLSAYNKHRDKPIREQAENIIHLFTLTNLGAPAAFKYFDTTIDRKRYTSTKEVLDATLIHQSITGLYETRIDLSQLGGDGGGGSEAAAKGSSGGMNPLQLLQPLPAEIKGTKLLAHWNSGATITCIPESFLEDEQPIKKTLIKTIHGEKQQNVYYVTFKVKGRKVEAEVIASPYEYILLSPTDVPWLTQQPLQLTILVPLQEYQEKILSKTALPEDQKQQLKTLFVKYDNLWQHWENQVGHRKIRPHNIATGDYPPRPQKQYPINPKAKPSIQIVIDDLLKQGVLTPQNSTMNTPVYPVPKPDGRWRMVLDYREVNKTIPLTAAQNQHSAGILATIVRQKYKTTLDLANGFWAHPITPESYWLTAFTWQGKQYCWTRLPQGFLNSPALFNADVVDLLKEIPNVQVYVDDIYLSHDDPKEHVQQLEKVFQILLQAGYVVSLKKSEIGQKTVEFLGFNITKEGRGLTDTFKTKLLNITPPKDLKQLQSILGKLNFARNFIPNFAELVQPLYNLIAPAKGKYIEWSEENTKQLNMVIEALNTASNLEERLPEQRLVIKVNTSPSAGYVRYYNETGKKPIMYLNYVFSKAELKFSMLEKLLTTMHKALIKAMDLAMGQEILVYSPIVSMTKIQKTPLPERKALPIRWITWMTYLEDPRIQFHYDKTLPELKHIPDVYTSSQSPVKHPSQYEGVFYTDGSAIKSPDPTKSNNAGMGIVHATYKPEYQVLNQWSIPLGNHTAQMAEIAAVEFACKKALKIPGPVLVITDSFYVAESANKELPYWKSNGFVNNKKKPLKHISKWKSIAECLSMKPDITIQHEKGISLQIPVFILKGNALADKLATQGSYVVNAGKRTADGSEFEKRTADGSEFESPKKKAKVE

SEQ ID NO: 7057 - protein, 2218 aa, synthetic construct
MPAAKRVKLDGGDKKYSIGLDIGTNSVGWAVITDEYKVPSKKFKVLGNTDRHSIKKNLIGALLFDSGETAEATRLKRTARRRYTRRKNRICYLQEIFSNEMAKVDDSFFHRLEESFLVEEDKKHERHPIFGNIVDEVAYHEKYPTIYHLRKKLVDSTDKADLRLIYLALAHMIKFRGHFLIEGDLNPDNSDVDKLFIQLVQTYNQLFEENPINASGVDAKAILSARLSKSRRLENLIAQLPGEKKNGLFGNLIALSLGLTPNFKSNFDLAEDAKLQLSKDTYDDDLDNLLAQIGDQYADLFLAAKNLSDAILLSDILRVNTEITKAPLSASMIKRYDEHHQDLTLLKALVRQQLPEKYKEIFFDQSKNGYAGYIDGGASQEEFYKFIKPILEKMDGTEELLVKLNREDLLRKQRTFDNGSIPHQIHLGELHAILRRQEDFYPFLKDNREKIEKILTFRIPYYVGPLARGNSRFAWMTRKSEETITPWNFEEVVDKGASAQSFIERMTNFDKNLPNEKVLPKHSLLYEYFTVYNELTKVKYVTEGMRKPAFLSGEQKKAIVDLLFKTNRKVTVKQLKEDYFKKIECFDSVEISGVEDRFNASLGTYHDLLKIIKDKDFLDNEENEDILEDIVLTLTLFEDREMIEERLKTYAHLFDDKVMKQLKRRRYTGWGRLSRKLINGIRDKQSGKTILDFLKSDGFANRNFMQLIHDDSLTFKEDIQKAQVSGQGDSLHEHIANLAGSPAIKKGILQTVKVVDELVKVMGRHKPENIVIEMARENQTTQKGQKNSRERMKRIEEGIKELGSQILKEHPVENTQLQNEKLYLYYLQNGRDMYVDQELDINRLSDYDVDHIVPQSFLKDDSIDNKVLTRSDKARGKSDNVPSEEVVKKMKNYWRQLLNAKLITQRKFDNLTKAERGGLSELDKAGFIKRQLVETRQITKHVAQILDSRMNTKYDENDKLIREVKVITLKSKLVSDFRKDFQFYKVREINNYHHAHDAYLNAVVGTALIKKYPKLESEFVYGDYKVYDVRKMIAKSEQEIGKATAKYFFYSNIMNFFKTEITLANGEIRKRPLIETNGETGEIVWDKGRDFATVRKVLSMPQVNIVKKTEVQTGGFSKESILPKRNSDKLIARKKDWDPKKYGGFDSPTVAYSVLVVAKVEKGKSKKLKSVKELLGITIMERSSFEKNPIDFLEAKGYKEVKKDLIIKLPKYSLFELENGRKRMLASAGELQKGNELALPSKYVNFLYLASHYEKLKGSPEDNEQKQLFVEQHKHYLDEIIEQISEFSKRVILADANLDKVLSAYNKHRDKPIREQAENIIHLFTLTNLGAPAAFKYFDTTIDRKRYTSTKEVLDATLIHQSITGLYETRIDLSQLGGDGGGGSEAAAKGSSGGTLGDQGSRGSDPLPEPRVTLTVEGIPTEFLVNTGAEHSVLTKPMGKMGSKRTVVAGATGSKVYPWTTKRLLKIGQKQVTHSFLVIPECPAPLLGRDLLTKLKAQIQFSTEGPQVTWEDRPAMCLVLNLEEEYRLHEKPVPPSIDPSWLQLFPMVWAEKAGMGLANQVPPVVVELKSDASPVAVRQYPMSKEAREGIRPHIQRFLDLGILVPCQSPWNTPLLPVKKPGTNDYRPVQDLREVNKRVQDIHPTVPNPYNLLSSLPPSHTWYSVLDLKDAFFCLKLHPNSQPLFAFEWRDPEKGNTGQLTWTRLPQGFKNSPTLFDEALHRDLASFRALNPQVVMLQYVDDLLVAAPTYRDCKEGTRRLLQELSKLGYRVSAKKAQLCREEVTYLGYLLKGGKRWLTPARKATVMKIPTPTTPRQVREFLGTAGFCRLWIPGFASLAAPLYPLTREKVPFTWTEAHQEAFGRIKEALLSAPALALPDLTKPFALYVDEKEGVARGVLTQTLGPWRRPVAYLSKKLDPVASGWPTCLKAIAAVALLLKDADKLTLGQNVLVIAPHNLESIVRQPPDRWMTNARMTHYQSLLLNERVSFAPPAILNPATLLPVESDDTPIHICSEILAEETGTRPDLRDQPLPGVPAWYTDGSSFIMDGRRQAGAAIVDNKRTVWASNLPEGTSAQKAELIALTQALRLAEGKSINIYTDSRYAFATAHVHGAIYKQRGLLTSAGKDIKNKEEILALLEAIHLPKRVAIIHCPGHQRGTDPVATGNRKADEAAKQAAQSTRILTETTKNAGKRTADGSEFEKRTADGSEFESPKKKAKVE

SEQ ID NO: 7058 - protein, 2127 aa, synthetic construct
MPAAKRVKLDGGDKKYSIGLDIGTNSVGWAVITDEYKVPSKKFKVLGNTDRHSIKKNLIGALLFDSGETAEATRLKRTARRRYTRRKNRICYLQEIFSNEMAKVDDSFFHRLEESFLVEEDKKHERHPIFGNIVDEVAYHEKYPTIYHLRKKLVDSTDKADLRLIYLALAHMIKFRGHFLIEGDLNPDNSDVDKLFIQLVQTYNQLFEENPINASGVDAKAILSARLSKSRRLENLIAQLPGEKKNGLFGNLIALSLGLTPNFKSNFDLAEDAKLQLSKDTYDDDLDNLLAQIGDQYADLFLAAKNLSDAILLSDILRVNTEITKAPLSASMIKRYDEHHQDLTLLKALVRQQLPEKYKEIFFDQSKNGYAGYIDGGASQEEFYKFIKPILEKMDGTEELLVKLNREDLLRKQRTFDNGSIPHQIHLGELHAILRRQEDFYPFLKDNREKIEKILTFRIPYYVGPLARGNSRFAWMTRKSEETITPWNFEEVVDKGASAQSFIERMTNFDKNLPNEKVLPKHSLLYEYFTVYNELTKVKYVTEGMRKPAFLSGEQKKAIVDLLFKTNRKVTVKQLKEDYFKKIECFDSVEISGVEDRFNASLGTYHDLLKIIKDKDFLDNEENEDILEDIVLTLTLFEDREMIEERLKTYAHLFDDKVMKQLKRRRYTGWGRLSRKLINGIRDKQSGKTILDFLKSDGFANRNFMQLIHDDSLTFKEDIQKAQVSGQGDSLHEHIANLAGSPAIKKGILQTVKVVDELVKVMGRHKPENIVIEMARENQTTQKGQKNSRERMKRIEEGIKELGSQILKEHPVENTQLQNEKLYLYYLQNGRDMYVDQELDINRLSDYDVDHIVPQSFLKDDSIDNKVLTRSDKARGKSDNVPSEEVVKKMKNYWRQLLNAKLITQRKFDNLTKAERGGLSELDKAGFIKRQLVETRQITKHVAQILDSRMNTKYDENDKLIREVKVITLKSKLVSDFRKDFQFYKVREINNYHHAHDAYLNAVVGTALIKKYPKLESEFVYGDYKVYDVRKMIAKSEQEIGKATAKYFFYSNIMNFFKTEITLANGEIRKRPLIETNGETGEIVWDKGRDFATVRKVLSMPQVNIVKKTEVQTGGFSKESILPKRNSDKLIARKKDWDPKKYGGFDSPTVAYSVLVVAKVEKGKSKKLKSVKELLGITIMERSSFEKNPIDFLEAKGYKEVKKDLIIKLPKYSLFELENGRKRMLASAGELQKGNELALPSKYVNFLYLASHYEKLKGSPEDNEQKQLFVEQHKHYLDEIIEQISEFSKRVILADANLDKVLSAYNKHRDKPIREQAENIIHLFTLTNLGAPAAFKYFDTTIDRKRYTSTKEVLDATLIHQSITGLYETRIDLSQLGGDGGGGSEAAAKGSSGGLLGRDLLTKLKAQIQFSTEGPQVTWEDRPAMCLVLNLEEEYRLHEKPVPPSIDPSWLQLFPMVWAEKAGMGLANQVPPVVVELKSDASPVAVRQYPMSKEAREGIRPHIQRFLDLGILVPCQSPWNTPLLPVKKPGTNDYRPVQDLREVNKRVQDIHPTVPNPYNLLSSLPPSHTWYSVLDLKDAFFCLKLHPNSQPLFAFEWRDPEKGNTGQLTWTRLPQGFKNSPTLFNEALHRDLASFRALNPQVVMLQYVDDLLVAAPTYRDCKEGTRRLLQELSKLGYRVSAKKAQLCREEVTYLGYLLKGGKRWLTPARKATVMKIPTPTTPRQVREFLGTAGFCRLWIPGFASLAAPLYPLTRPKVPFTWTEAHQEAFGRIKEALLSAPALALPDLTKPFALYVDEKEGVARGVLTQTLGPWRRPVAYLSKKLDPVASGWPTCLKAIAAVALLLKDADKLTLGQNVLVIAPHNLESIVRQPPDRWMTNARMTHYQSLLLNERVSFAPPAILNPATLLPVESDDTPIHICSEILAEETGTRPDLRDQPLPGVPAWYTDGSSFIMDGRRQAGAAIVDNKRTVWASNLPEGTSAQKAELIALTQALRLAEGKSINIYTDSRYAFATAHVHGAIYKQRGWLTSAGKDIKNKEEILALLEAIHLPKRVAIIHCPGHQRGTDPVATGNRKADEAAKQAAQSTRILTETTKNAGKRTADGSEFEKRTADGSEFESPKKKAKVE

SEQ ID NO: 7059 - protein, 2096 aa, synthetic construct
MPAAKRVKLDGGDKKYSIGLDIGTNSVGWAVITDEYKVPSKKFKVLGNTDRHSIKKNLIGALLFDSGETAEATRLKRTARRRYTRRKNRICYLQEIFSNEMAKVDDSFFHRLEESFLVEEDKKHERHPIFGNIVDEVAYHEKYPTIYHLRKKLVDSTDKADLRLIYLALAHMIKFRGHFLIEGDLNPDNSDVDKLFIQLVQTYNQLFEENPINASGVDAKAILSARLSKSRRLENLIAQLPGEKKNGLFGNLIALSLGLTPNFKSNFDLAEDAKLQLSKDTYDDDLDNLLAQIGDQYADLFLAAKNLSDAILLSDILRVNTEITKAPLSASMIKRYDEHHQDLTLLKALVRQQLPEKYKEIFFDQSKNGYAGYIDGGASQEEFYKFIKPILEKMDGTEELLVKLNREDLLRKQRTFDNGSIPHQIHLGELHAILRRQEDFYPFLKDNREKIEKILTFRIPYYVGPLARGNSRFAWMTRKSEETITPWNFEEVVDKGASAQSFIERMTNFDKNLPNEKVLPKHSLLYEYFTVYNELTKVKYVTEGMRKPAFLSGEQKKAIVDLLFKTNRKVTVKQLKEDYFKKIECFDSVEISGVEDRFNASLGTYHDLLKIIKDKDFLDNEENEDILEDIVLTLTLFEDREMIEERLKTYAHLFDDKVMKQLKRRRYTGWGRLSRKLINGIRDKQSGKTILDFLKSDGFANRNFMQLIHDDSLTFKEDIQKAQVSGQGDSLHEHIANLAGSPAIKKGILQTVKVVDELVKVMGRHKPENIVIEMARENQTTQKGQKNSRERMKRIEEGIKELGSQILKEHPVENTQLQNEKLYLYYLQNGRDMYVDQELDINRLSDYDVDHIVPQSFLKDDSIDNKVLTRSDKARGKSDNVPSEEVVKKMKNYWRQLLNAKLITQRKFDNLTKAERGGLSELDKAGFIKRQLVETRQITKHVAQILDSRMNTKYDENDKLIREVKVITLKSKLVSDFRKDFQFYKVREINNYHHAHDAYLNAVVGTALIKKYPKLESEFVYGDYKVYDVRKMIAKSEQEIGKATAKYFFYSNIMNFFKTEITLANGEIRKRPLIETNGETGEIVWDKGRDFATVRKVLSMPQVNIVKKTEVQTGGFSKESILPKRNSDKLIARKKDWDPKKYGGFDSPTVAYSVLVVAKVEKGKSKKLKSVKELLGITIMERSSFEKNPIDFLEAKGYKEVKKDLIIKLPKYSLFELENGRKRMLASAGELQKGNELALPSKYVNFLYLASHYEKLKGSPEDNEQKQLFVEQHKHYLDEIIEQISEFSKRVILADANLDKVLSAYNKHRDKPIREQAENIIHLFTLTNLGAPAAFKYFDTTIDRKRYTSTKEVLDATLIHQSITGLYETRIDLSQLGGDGGGGSEAAAKGSSGGTLGIEDEYRLHETSTEPDVSLGSTWLSDFPQAWAETGGMGLAVRQAPLIIPLKATSTPVSIQQYPMSHEARLGIKPHIQRLLDQGILVPCQSPWNTPLLPVKKPGTNDYRPVQDLREVNKRVEDIHPTVPNPYNLLSGLPPSHQWYTVLDLKDAFFCLRLHPTSQPLFAFEWRDPGMGISGQLTWTRLPQGFKNSPTLFDEALHRDLADFRIQHPDLILLQYVDDILLAATSELDCQQGTRALLQTLGDLGYRASAKKAQICQKQVKYLGYLLREGQRWLTEARKETVMGQPVPKTPRQLREFLGTAGFCRLWIPGFAEMAAPLYPLTKTGTLFSWGPDQQKAYQEIKQALLTAPALGLPDLTKPFELFVDEKQGYAKGVLTQKLGPWRRPVAYLSKKLDPVAAGWPPCLRMVAAIAVLTKDAGKLTMGQPLVILAPHAVEALVKQPPDRWLSNARMTHYQAMLLDTDRVQFGPVVALNPATLLPLPEEGAPHDCLEILAETHGTRPDLTDQPIPDADHTWYTDGSSFLQEGQRKAGAAVTTETEVIWAGALPAGTSAQRAELIALTQALKMAEGKRLNVYTDSRYAFATAHIHGEIYRRRGLLTSEGREIKNKSEILALLKALFLPKRLSIIHCLGHQKGDSAEARGNRLADQAAREAAIKTPPDTSTLLAGKRTADGSEFEKRTADGSEFESPKKKAKVE

SEQ ID NO: 7060 - protein, 2096 aa, synthetic construct
MPAAKRVKLDGGDKKYSIGLDIGTNSVGWAVITDEYKVPSKKFKVLGNTDRHSIKKNLIGALLFDSGETAEATRLKRTARRRYTRRKNRICYLQEIFSNEMAKVDDSFFHRLEESFLVEEDKKHERHPIFGNIVDEVAYHEKYPTIYHLRKKLVDSTDKADLRLIYLALAHMIKFRGHFLIEGDLNPDNSDVDKLFIQLVQTYNQLFEENPINASGVDAKAILSARLSKSRRLENLIAQLPGEKKNGLFGNLIALSLGLTPNFKSNFDLAEDAKLQLSKDTYDDDLDNLLAQIGDQYADLFLAAKNLSDAILLSDILRVNTEITKAPLSASMIKRYDEHHQDLTLLKALVRQQLPEKYKEIFFDQSKNGYAGYIDGGASQEEFYKFIKPILEKMDGTEELLVKLNREDLLRKQRTFDNGSIPHQIHLGELHAILRRQEDFYPFLKDNREKIEKILTFRIPYYVGPLARGNSRFAWMTRKSEETITPWNFEEVVDKGASAQSFIERMTNFDKNLPNEKVLPKHSLLYEYFTVYNELTKVKYVTEGMRKPAFLSGEQKKAIVDLLFKTNRKVTVKQLKEDYFKKIECFDSVEISGVEDRFNASLGTYHDLLKIIKDKDFLDNEENEDILEDIVLTLTLFEDREMIEERLKTYAHLFDDKVMKQLKRRRYTGWGRLSRKLINGIRDKQSGKTILDFLKSDGFANRNFMQLIHDDSLTFKEDIQKAQVSGQGDSLHEHIANLAGSPAIKKGILQTVKVVDELVKVMGRHKPENIVIEMARENQTTQKGQKNSRERMKRIEEGIKELGSQILKEHPVENTQLQNEKLYLYYLQNGRDMYVDQELDINRLSDYDVDHIVPQSFLKDDSIDNKVLTRSDKARGKSDNVPSEEVVKKMKNYWRQLLNAKLITQRKFDNLTKAERGGLSELDKAGFIKRQLVETRQITKHVAQILDSRMNTKYDENDKLIREVKVITLKSKLVSDFRKDFQFYKVREINNYHHAHDAYLNAVVGTALIKKYPKLESEFVYGDYKVYDVRKMIAKSEQEIGKATAKYFFYSNIMNFFKTEITLANGEIRKRPLIETNGETGEIVWDKGRDFATVRKVLSMPQVNIVKKTEVQTGGFSKESILPKRNSDKLIARKKDWDPKKYGGFDSPTVAYSVLVVAKVEKGKSKKLKSVKELLGITIMERSSFEKNPIDFLEAKGYKEVKKDLIIKLPKYSLFELENGRKRMLASAGELQKGNELALPSKYVNFLYLASHYEKLKGSPEDNEQKQLFVEQHKHYLDEIIEQISEFSKRVILADANLDKVLSAYNKHRDKPIREQAENIIHLFTLTNLGAPAAFKYFDTTIDRKRYTSTKEVLDATLIHQSITGLYETRIDLSQLGGDGGGGSEAAAKGSSGGTLNIEDEYRLHETSKGPDVPLGSTWLSDFPQAWAETGGMGLAVRQAPLIIPLKATSTPVSIKQYPMSQEARLGIKPHIQRLLDQGILVPCQSPWNTPLLPVKKPGTNDYRPVQDLREVNKRVEDIHPTVPNPYNLLSGLPPSHQWYTVLDLKDAFFCLRLHPTSQSLFAFEWRDPEMGISGQLTWTRLPQGFKNSPTLFNEALHRDLADFRIQHPDLILLQYVDDLLLAATSELDCQQGTRALLQTLGDLGYRASAKKAQICQKQVKYLGYLLKEGQRWLTEARKETVMGQPTPKTPRQLREFLGTAGFCRLWIPGFAEMAAPLYPLTKPGTLFEWGPDQQKAYQEIKQALLTAPALGLPDLTKPFELFVDEKQGYAKGVLTQKLGPWRRPVAYLSKKLDPVAAGWPPCLRMVAAIAVLTKDAGKLTMGQPLVILAPHAVEALVKQPPDRWLSNARMTHYQALLLDTDRVQFGPIVALNPATLLPLPEEGLQHDCLDILAEAHGTRPDLTDQPLPDADHTWYTDGSSFLQEGQRKAGAAVTTETEVVWAKALPAGTSAQRAELIALTQALKMAEGKKLNVYTDSRYAFATAHIHGEIYRRRGWLTSEGKEIKNKDEILALLKALFLPKRLSIIHCPGHQKGNRAEARGNRMADQAAREVATRETPETSTLLAGKRTADGSEFEKRTADGSEFESPKKKAKVE

SEQ ID NO: 7061 - protein, 2116 aa, synthetic construct
MPAAKRVKLDGGDKKYSIGLDIGTNSVGWAVITDEYKVPSKKFKVLGNTDRHSIKKNLIGALLFDSGETAEATRLKRTARRRYTRRKNRICYLQEIFSNEMAKVDDSFFHRLEESFLVEEDKKHERHPIFGNIVDEVAYHEKYPTIYHLRKKLVDSTDKADLRLIYLALAHMIKFRGHFLIEGDLNPDNSDVDKLFIQLVQTYNQLFEENPINASGVDAKAILSARLSKSRRLENLIAQLPGEKKNGLFGNLIALSLGLTPNFKSNFDLAEDAKLQLSKDTYDDDLDNLLAQIGDQYADLFLAAKNLSDAILLSDILRVNTEITKAPLSASMIKRYDEHHQDLTLLKALVRQQLPEKYKEIFFDQSKNGYAGYIDGGASQEEFYKFIKPILEKMDGTEELLVKLNREDLLRKQRTFDNGSIPHQIHLGELHAILRRQEDFYPFLKDNREKIEKILTFRIPYYVGPLARGNSRFAWMTRKSEETITPWNFEEVVDKGASAQSFIERMTNFDKNLPNEKVLPKHSLLYEYFTVYNELTKVKYVTEGMRKPAFLSGEQKKAIVDLLFKTNRKVTVKQLKEDYFKKIECFDSVEISGVEDRFNASLGTYHDLLKIIKDKDFLDNEENEDILEDIVLTLTLFEDREMIEERLKTYAHLFDDKVMKQLKRRRYTGWGRLSRKLINGIRDKQSGKTILDFLKSDGFANRNFMQLIHDDSLTFKEDIQKAQVSGQGDSLHEHIANLAGSPAIKKGILQTVKVVDELVKVMGRHKPENIVIEMARENQTTQKGQKNSRERMKRIEEGIKELGSQILKEHPVENTQLQNEKLYLYYLQNGRDMYVDQELDINRLSDYDVDHIVPQSFLKDDSIDNKVLTRSDKARGKSDNVPSEEVVKKMKNYWRQLLNAKLITQRKFDNLTKAERGGLSELDKAGFIKRQLVETRQITKHVAQILDSRMNTKYDENDKLIREVKVITLKSKLVSDFRKDFQFYKVREINNYHHAHDAYLNAVVGTALIKKYPKLESEFVYGDYKVYDVRKMIAKSEQEIGKATAKYFFYSNIMNFFKTEITLANGEIRKRPLIETNGETGEIVWDKGRDFATVRKVLSMPQVNIVKKTEVQTGGFSKESILPKRNSDKLIARKKDWDPKKYGGFDSPTVAYSVLVVAKVEKGKSKKLKSVKELLGITIMERSSFEKNPIDFLEAKGYKEVKKDLIIKLPKYSLFELENGRKRMLASAGELQKGNELALPSKYVNFLYLASHYEKLKGSPEDNEQKQLFVEQHKHYLDEIIEQISEFSKRVILADANLDKVLSAYNKHRDKPIREQAENIIHLFTLTNLGAPAAFKYFDTTIDRKRYTSTKEVLDATLIHQSITGLYETRIDLSQLGGDGGGGSEAAAKGSSGGWVQEISDSRPMLHIYLNGRRFLGLLNTGADKTCIAGRDWPANWPIHQTESSLQGLGMACGVARSSQPLRWQHEDKSGIIHPFVIPTLPFTLWGRDIMKDIKVRLMTDSPDDSQDLMIGAIESNLFADQISWKSDQPVWLNQWPLKQEKLQALQQLVTEQLQLGHLEESNSPWNTPVFVIKKKSGKWRLLQDLRAVNATMHDMGALQPGLPSPVAVPKGWEIIIIDLQDCFFNIKLHPEDCKRFAFSVPSPNFKRPYQRFQWKVLPQGMKNSPTLCQKFVDKAILTVRDKYQDSYIVHYMDDILLAHPSRSIVDEILTSMIQALNKHGLVVSTEKIQKYDNLKYLGTHIQGDSVSYQKLQIRTDKLRTLNDFQKLLGNINWIRPFLKLTTGELKPLFEILNGDSNPISTRKLTPEACKALQLMNERLSTARVKRLDLSQPWSLCILKTEYTPTACLWQDGVVEWIHLPHISPKVITPYDIFCTQLIIKGRHRSKELFSKDPDYIVVPYTKVQFDLLLQEKEDWPISLLGFLGEVHFHLPKDPLLTFTLQTAIIFPHMTSTTPLEKGIVIFTDGSANGRSVTYIQGREPIIKENTQNTAQQAEIVAVITAFEEVSQPFNLYTDSKYVTGLFPEIETATLSPRTKIYTELKHLQRLIHKRQEKFYIGHIRGHTGLPGPLAQGNAYADSLTRILTAGKRTADGSEFEKRTADGSEFESPKKKAKVE

SEQ ID NO: 7062 - protein, 2090 aa, synthetic construct
MPAAKRVKLDGGDKKYSIGLDIGTNSVGWAVITDEYKVPSKKFKVLGNTDRHSIKKNLIGALLFDSGETAEATRLKRTARRRYTRRKNRICYLQEIFSNEMAKVDDSFFHRLEESFLVEEDKKHERHPIFGNIVDEVAYHEKYPTIYHLRKKLVDSTDKADLRLIYLALAHMIKFRGHFLIEGDLNPDNSDVDKLFIQLVQTYNQLFEENPINASGVDAKAILSARLSKSRRLENLIAQLPGEKKNGLFGNLIALSLGLTPNFKSNFDLAEDAKLQLSKDTYDDDLDNLLAQIGDQYADLFLAAKNLSDAILLSDILRVNTEITKAPLSASMIKRYDEHHQDLTLLKALVRQQLPEKYKEIFFDQSKNGYAGYIDGGASQEEFYKFIKPILEKMDGTEELLVKLNREDLLRKQRTFDNGSIPHQIHLGELHAILRRQEDFYPFLKDNREKIEKILTFRIPYYVGPLARGNSRFAWMTRKSEETITPWNFEEVVDKGASAQSFIERMTNFDKNLPNEKVLPKHSLLYEYFTVYNELTKVKYVTEGMRKPAFLSGEQKKAIVDLLFKTNRKVTVKQLKEDYFKKIECFDSVEISGVEDRFNASLGTYHDLLKIIKDKDFLDNEENEDILEDIVLTLTLFEDREMIEERLKTYAHLFDDKVMKQLKRRRYTGWGRLSRKLINGIRDKQSGKTILDFLKSDGFANRNFMQLIHDDSLTFKEDIQKAQVSGQGDSLHEHIANLAGSPAIKKGILQTVKVVDELVKVMGRHKPENIVIEMARENQTTQKGQKNSRERMKRIEEGIKELGSQILKEHPVENTQLQNEKLYLYYLQNGRDMYVDQELDINRLSDYDVDHIVPQSFLKDDSIDNKVLTRSDKARGKSDNVPSEEVVKKMKNYWRQLLNAKLITQRKFDNLTKAERGGLSELDKAGFIKRQLVETRQITKHVAQILDSRMNTKYDENDKLIREVKVITLKSKLVSDFRKDFQFYKVREINNYHHAHDAYLNAVVGTALIKKYPKLESEFVYGDYKVYDVRKMIAKSEQEIGKATAKYFFYSNIMNFFKTEITLANGEIRKRPLIETNGETGEIVWDKGRDFATVRKVLSMPQVNIVKKTEVQTGGFSKESILPKRNSDKLIARKKDWDPKKYGGFDSPTVAYSVLVVAKVEKGKSKKLKSVKELLGITIMERSSFEKNPIDFLEAKGYKEVKKDLIIKLPKYSLFELENGRKRMLASAGELQKGNELALPSKYVNFLYLASHYEKLKGSPEDNEQKQLFVEQHKHYLDEIIEQISEFSKRVILADANLDKVLSAYNKHRDKPIREQAENIIHLFTLTNLGAPAAFKYFDTTIDRKRYTSTKEVLDATLIHQSITGLYETRIDLSQLGGDGGGGSEAAAKGSSGGTLQLDDEYRLYSPLVKPDQNIQFWLEQFPQAWAETAGMGLAKQVPPQVIQLKASATPVSVRQYPLSKEAQEGIRPHVQRLIQQGILVPVQSPWNTPLLPVRKPGTNDYRPVQDLREVNKRVQDIHPTVPNPYNLLCALPPQRSWYTVLDLKDAFFCLRLHPTSQPLFAFEWRDPGTGRTGQLTWTRLPQGFKNSPTIFDEALHRDLANFRIQHPQVTLLQYVDDLLLAGATKQDCLEGTKALLLELSDLGYRASAKKAQICRREVTYLGYSLRDGQRWLTEARKKTVVQIPAPTTAKQVREFLGTAGFCRLWIPGFATLAAPLYPLTKEKGEFSWAPEHQKAFDAIKKALLSAPALALPDVTKPFTLYVDERKGVARGVLTQTLGPWRRPVAYLSKKLDPVASGWPVCLKAIAAVAILVKDADKLTLGQNITVIAPHALENIVRQPPDRWMTNARMTHYQSLLLTERVTFAPPAALNPATLLPEETDEPVTHDCHQLLIEETGVRKDLTDIPLTGEVLTWFTDGSSYVVEGKRMAGAAVVDGTRTIWASSLPEGTSAQKAELMALTQALRLAEGKSINIYTDSRYAFATAHVHGAIYKQRGLLTSAGREIKNKEEILSLLEALHLPKRLAIIHCPGHQKAKDPISRGNQMADRVAKQAAQGVNLLAGKRTADGSEFEKRTADGSEFESPKKKAKVE

SEQ ID NO: 7063 - protein, 2090 aa, synthetic construct; identical to SEQ ID NO: 7062

SEQ ID NO: 7064 - protein, 2094 aa, synthetic construct
MPAAKRVKLDGGDKKYSIGLDIGTNSVGWAVITDEYKVPSKKFKVLGNTDRHSIKKNLIGALLFDSGETAEATRLKRTARRRYTRRKNRICYLQEIFSNEMAKVDDSFFHRLEESFLVEEDKKHERHPIFGNIVDEVAYHEKYPTIYHLRKKLVDSTDKADLRLIYLALAHMIKFRGHFLIEGDLNPDNSDVDKLFIQLVQTYNQLFEENPINASGVDAKAILSARLSKSRRLENLIAQLPGEKKNGLFGNLIALSLGLTPNFKSNFDLAEDAKLQLSKDTYDDDLDNLLAQIGDQYADLFLAAKNLSDAILLSDILRVNTEITKAPLSASMIKRYDEHHQDLTLLKALVRQQLPEKYKEIFFDQSKNGYAGYIDGGASQEEFYKFIKPILEKMDGTEELLVKLNREDLLRKQRTFDNGSIPHQIHLGELHAILRRQEDFYPFLKDNREKIEKILTFRIPYYVGPLARGNSRFAWMTRKSEETITPWNFEEVVDKGASAQSFIERMTNFDKNLPNEKVLPKHSLLYEYFTVYNELTKVKYVTEGMRKPAFLSGEQKKAIVDLLFKTNRKVTVKQLKEDYFKKIECFDSVEISGVEDRFNASLGTYHDLLKIIKDKDFLDNEENEDILEDIVLTLTLFEDREMIEERLKTYAHLFDDKVMKQLKRRRYTGWGRLSRKLINGIRDKQSGKTILDFLKSDGFANRNFMQLIHDDSLTFKEDIQKAQVSGQGDSLHEHIANLAGSPAIKKGILQTVKVVDELVKVMGRHKPENIVIEMARENQTTQKGQKNSRERMKRIEEGIKELGSQILKEHPVENTQLQNEKLYLYYLQNGRDMYVDQELDINRLSDYDVDHIVPQSFLKDDSIDNKVLTRSDKARGKSDNVPSEEVVKKMKNYWRQLLNAKLITQRKFDNLTKAERGGLSELDKAGFIKRQLVETRQITKHVAQILDSRMNTKYDENDKLIREVKVITLKSKLVSDFRKDFQFYKVREINNYHHAHDAYLNAVVGTALIKKYPKLESEFVYGDYKVYDVRKMIAKSEQEIGKATAKYFFYSNIMNFFKTEITLANGEIRKRPLIETNGETGEIVWDKGRDFATVRKVLSMPQVNIVKKTEVQTGGFSKESILPKRNSDKLIARKKDWDPKKYGGFDSPTVAYSVLVVAKVEKGKSKKLKSVKELLGITIMERSSFEKNPIDFLEAKGYKEVKKDLIIKLPKYSLFELENGRKRMLASAGELQKGNELALPSKYVNFLYLASHYEKLKGSPEDNEQKQLFVEQHKHYLDEIIEQISEFSKRVILADANLDKVLSAYNKHRDKPIREQAENIIHLFTLTNLGAPAAFKYFDTTIDRKRYTSTKEVLDATLIHQSITGLYETRIDLSQLGGDGGGGSEAAAKGSSGGVLNLEEEYRLHEKPVPSSIDPSWLQLFPTVWAERAGMGLANQVPPVVVELRSGASPVAVRQYPMSKEAREGIRPHIQRFLDLGVLVPCQSPWNTPLLPVKKPGTNDYRPVQDLREINKRVQDIHPTVPNPYNLLSSLPPSHTWYSVLDLKDAFFCLKLHPNSQPLFAFEWRDPEKGNTGQLTWTRLPQGFKNSPTLFNEALHRDLAPFRALNPQVVLLQYVDDLLVAAPTYRDCKEGTQKLLQELSKLGYRVSAKKAQLCQKEVTYLGYLLKEGKRWLTPARKATVMKIPPPTTPRQVREFLGTAGFCRLWIPGFASLAAPLYPLTKPSIPFIWTEEHQKAFDRIKEALLSAPALALPDLTKPFTLYVDERAGVARGVLTQTLGPWRRPVAYLSKKLDPVASGWPTCLKAVAAVALLLKDADKLTLGQNVTVIASHSLESIVRQPPDRWMTNARMTHYQSLLLNERVSFAPPAVLNPATLLPVESEATPVHRCSEILAEETGTRRDLKDQPLPGVPAWYTDGSSFIAEGKRRAGAAIVDGKRTVWASSLPEGTSAQKAELVALTQALRLAEGKDINIYTDSRYAFATAHIHGAIYKQRGWLTSAGKDIKNKEEILALLEAIHLPKRVAIIHCPGHQKGNDPVATGNRRADEAAKQAALSTRVLAETTKPAGKRTADGSEFEKRTADGSEFESPKKKAKVE

SEQ ID NO: 7065 - protein, 2094 aa, synthetic construct
MPAAKRVKLDGGDKKYSIGLDIGTNSVGWAVITDEYKVPSKKFKVLGNTDRHSIKKNLIGALLFDSGETAEATRLKRTARRRYTRRKNRICYLQEIFSNEMAKVDDSFFHRLEESFLVEEDKKHERHPIFGNIVDEVAYHEKYPTIYHLRKKLVDSTDKADLRLIYLALAHMIKFRGHFLIEGDLNPDNSDVDKLFIQLVQTYNQLFEENPINASGVDAKAILSARLSKSRRLENLIAQLPGEKKNGLFGNLIALSLGLTPNFKSNFDLAEDAKLQLSKDTYDDDLDNLLAQIGDQYADLFLAAKNLSDAILLSDILRVNTEITKAPLSASMIKRYDEHHQDLTLLKALVRQQLPEKYKEIFFDQSKNGYAGYIDGGASQEEFYKFIKPILEKMDGTEELLVKLNREDLLRKQRTFDNGSIPHQIHLGELHAILRRQEDFYPFLKDNREKIEKILTFRIPYYVGPLARGNSRFAWMTRKSEETITPWNFEEVVDKGASAQSFIERMTNFDKNLPNEKVLPKHSLLYEYFTVYNELTKVKYVTEGMRKPAFLSGEQKKAIVDLLFKTNRKVTVKQLKEDYFKKIECFDSVEISGVEDRFNASLGTYHDLLKIIKDKDFLDNEENEDILEDIVLTLTLFEDREMIEERLKTYAHLFDDKVMKQLKRRRYTGWGRLSRKLINGIRDKQSGKTILDFLKSDGFANRNFMQLIHDDSLTFKEDIQKAQVSGQGDSLHEHIANLAGSPAIKKGILQTVKVVDELVKVMGRHKPENIVIEMARENQTTQKGQKNSRERMKRIEEGIKELGSQILKEHPVENTQLQNEKLYLYYLQNGRDMYVDQELDINRLSDYDVDHIVPQSFLKDDSIDNKVLTRSDKARGKSDNVPSEEVVKKMKNYWRQLLNAKLITQRKFDNLTKAERGGLSELDKAGFIKRQLVETRQITKHVAQILDSRMNTKYDENDKLIREVKVITLKSKLVSDFRKDFQFYKVREINNYHHAHDAYLNAVVGTALIKKYPKLESEFVYGDYKVYDVRKMIAKSEQEIGKATAKYFFYSNIMNFFKTEITLANGEIRKRPLIETNGETGEIVWDKGRDFATVRKVLSMPQVNIVKKTEVQTGGFSKESILPKRNSDKLIARKKDWDPKKYGGFDSPTVAYSVLVVAKVEKGKSKKLKSVKELLGITIMERSSFEKNPIDFLEAKGYKEVKKDLIIKLPKYSLFELENGRKRMLASAGELQKGNELALPSKYVNFLYLASHYEKLKGSPEDNEQKQLFVEQHKHYLDEIIEQISEFSKRVILADANLDKVLSAYNKHRDKPIREQAENIIHLFTLTNLGAPAAFKYFDTTIDRKRYTSTKEVLDATLIHQSITGLYETRIDLSQLGGDGGGGSEAAAKGSSGGVLNLEEEYRLHEKPVPSSIDPSWLQLFPTVWAERAGMGLANQVPPVVVELRSGASPVAVRQYPMSKEAREGIRPHIQRFLDLGVLVPCQSPWNTPLLPVKKPGTNDYRPVQDLREINKRVQDIHPTVPNPYNLLSSLPPSHTWYSVLDLKDAFFCLKLHPNSQPLFAFEWRDPEKGNTGQLTWTRLPQGFKNSPTLFNEALHRDLAPFRALNPQVVLLQYVDDLLVAAPTYRDCKEGTQKLLQELSKLGYRVSAKKAQLCQKEVTYLGYLLKEGKRWLTPARKATVMKIPPPTTPRQVREFLGKAGFCRLFIPGFASLAAPLYPLTKPSIPFIWTEEHQKAFDRIKEALLSAPALALPDLTKPFTLYVDERAGVARGVLTQTLGPWRRPVAYLSKKLDPVASGWPTCLKAVAAVALLLKDADKLTLGQNVTVIASHSLESIVRQPPDRWMTNARMTHYQSLLLNERVSFAPPAVLNPATLLPVESEATPVHRCSEILAEETGTRRDLKDQPLPGVPAWYTDGSSFIAEGKRRAGAAIVDGKRTVWASSLPEGTSAQKAELVALTQALRLAEGKDINIYTDSRYAFATAHIHGAIYKQRGWLTSAGKDIKNKEEILALLEAIHLPKRVAIIHCPGHQKGNDPVATGNRRADEAAKQAALSTRVLAETTKPAGKRTADGSEFEKRTADGSEFESPKKKAKVE

SEQ ID NO: 7066 - protein, 2096 aa, synthetic construct
MPAAKRVKLDGGDKKYSIGLDIGTNSVGWAVITDEYKVPSKKFKVLGNTDRHSIKKNLIGALLFDSGETAEATRLKRTARRRYTRRKNRICYLQEIFSNEMAKVDDSFFHRLEESFLVEEDKKHERHPIFGNIVDEVAYHEKYPTIYHLRKKLVDSTDKADLRLIYLALAHMIKFRGHFLIEGDLNPDNSDVDKLFIQLVQTYNQLFEENPINASGVDAKAILSARLSKSRRLENLIAQLPGEKKNGLFGNLIALSLGLTPNFKSNFDLAEDAKLQLSKDTYDDDLDNLLAQIGDQYADLFLAAKNLSDAILLSDILRVNTEITKAPLSASMIKRYDEHHQDLTLLKALVRQQLPEKYKEIFFDQSKNGYAGYIDGGASQEEFYKFIKPILEKMDGTEELLVKLNREDLLRKQRTFDNGSIPHQIHLGELHAILRRQEDFYPFLKDNREKIEKILTFRIPYYVGPLARGNSRFAWMTRKSEETITPWNFEEVVDKGASAQSFIERMTNFDKNLPNEKVLPKHSLLYEYFTVYNELTKVKYVTEGMRKPAFLSGEQKKAIVDLLFKTNRKVTVKQLKEDYFKKIECFDSVEISGVEDRFNASLGTYHDLLKIIKDKDFLDNEENEDILEDIVLTLTLFEDREMIEERLKTYAHLFDDKVMKQLKRRRYTGWGRLSRKLINGIRDKQSGKTILDFLKSDGFANRNFMQLIHDDSLTFKEDIQKAQVSGQGDSLHEHIANLAGSPAIKKGILQTVKVVDELVKVMGRHKPENIVIEMARENQTTQKGQKNSRERMKRIEEGIKELGSQILKEHPVENTQLQNEKLYLYYLQNGRDMYVDQELDINRLSDYDVDHIVPQSFLKDDSIDNKVLTRSDKARGKSDNVPSEEVVKKMKNYWRQLLNAKLITQRKFDNLTKAERGGLSELDKAGFIKRQLVETRQITKHVAQILDSRMNTKYDENDKLIREVKVITLKSKLVSDFRKDFQFYKVREINNYHHAHDAYLNAVVGTALIKKYPKLESEFVYGDYKVYDVRKMIAKSEQEIGKATAKYFFYSNIMNFFKTEITLANGEIRKRPLIETNGETGEIVWDKGRDFATVRKVLSMPQVNIVKKTEVQTGGFSKESILPKRNSDKLIARKKDWDPKKYGGFDSPTVAYSVLVVAKVEKGKSKKLKSVKELLGITIMERSSFEKNPIDFLEAKGYKEVKKDLIIKLPKYSLFELENGRKRMLASAGELQKGNELALPSKYVNFLYLASHYEKLKGSPEDNEQKQLFVEQHKHYLDEIIEQISEFSKRVILADANLDKVLSAYNKHRDKPIREQAENIIHLFTLTNLGAPAAFKYFDTTIDRKRYTSTKEVLDATLIHQSITGLYETRIDLSQLGGDGGGGSEAAAKGSSGGTLNIEDEYRLHETSKEPDVPLGSTWLSDFPQAWAETGGMGLAVRQAPLIIPLKATSTPVSIKQYPMSQEARLGIKPHIQRLLDQGILVPCQSPWNTPLLPVKKPGTNDYRPVQDLREVNKRVEDIHPTVPNPYNLLSGLPPSHQWYTVLDLKDAFFCLRLHPTSQPLFAFEWRDPEMGISGQLTWTRLPQGFKNSPTLFNEALHRDLADFRIQHPDLILLQYVDDLLLAATSEQDCQRGTRALLQTLGNLGYRASAKKAQICQKQVKYLGYLLKEGQRWLTEARKETVMGQPTPKTPRQLREFLGTAGFCRLWIPGFAEMAAPLYPLTKPGTLFNWGPDQQKAYQEIKQALLTAPALGLPDLTKPFELFVDEKQGYAKGVLTQKLGPWRRPVAYLSKKLDPVAAGWPPCLRMVAAIAVLTKDAGKLTMGQPLVILAPHAVEALVKQPPDRWLSNARMTHYQAMLLDTDRVQFGPVVALNPATLLPLPEKEAPHDCLEILAETHGTRPDLTDQPIPDADYTWYTDGSSFLQEGQRRAGAAVTTETEVIWARALPAGTSAQRAELIALTQALKMAEGKKLNVYTDSRYAFATAHVHGEIYRRRGWLTSEGREIKNKNEILALLKALFLPKRLSIIHCPGHQKGNSAEARGNRMADQAAREAAMKAVLETSTLLAGKRTADGSEFEKRTADGSEFESPKKKAKVE

SEQ ID NO: 7067 - protein, 2096 aa, synthetic construct; identical to SEQ ID NO: 4522

SEQ ID NO: 7068 - protein, 2098 aa, synthetic construct
MPAAKRVKLDGGDKKYSIGLDIGTNSVGWAVITDEYKVPSKKFKVLGNTDRHSIKKNLIGALLFDSGETAEATRLKRTARRRYTRRKNRICYLQEIFSNEMAKVDDSFFHRLEESFLVEEDKKHERHPIFGNIVDEVAYHEKYPTIYHLRKKLVDSTDKADLRLIYLALAHMIKFRGHFLIEGDLNPDNSDVDKLFIQLVQTYNQLFEENPINASGVDAKAILSARLSKSRRLENLIAQLPGEKKNGLFGNLIALSLGLTPNFKSNFDLAEDAKLQLSKDTYDDDLDNLLAQIGDQYADLFLAAKNLSDAILLSDILRVNTEITKAPLSASMIKRYDEHHQDLTLLKALVRQQLPEKYKEIFFDQSKNGYAGYIDGGASQEEFYKFIKPILEKMDGTEELLVKLNREDLLRKQRTFDNGSIPHQIHLGELHAILRRQEDFYPFLKDNREKIEKILTFRIPYYVGPLARGNSRFAWMTRKSEETITPWNFEEVVDKGASAQSFIERMTNFDKNLPNEKVLPKHSLLYEYFTVYNELTKVKYVTEGMRKPAFLSGEQKKAIVDLLFKTNRKVTVKQLKEDYFKKIECFDSVEISGVEDRFNASLGTYHDLLKIIKDKDFLDNEENEDILEDIVLTLTLFEDREMIEERLKTYAHLFDDKVMKQLKRRRYTGWGRLSRKLINGIRDKQSGKTILDFLKSDGFANRNFMQLIHDDSLTFKEDIQKAQVSGQGDSLHEHIANLAGSPAIKKGILQTVKVVDELVKVMGRHKPENIVIEMARENQTTQKGQKNSRERMKRIEEGIKELGSQILKEHPVENTQLQNEKLYLYYLQNGRDMYVDQELDINRLSDYDVDHIVPQSFLKDDSIDNKVLTRSDKARGKSDNVPSEEVVKKMKNYWRQLLNAKLITQRKFDNLTKAERGGLSELDKAGFIKRQLVETRQITKHVAQILDSRMNTKYDENDKLIREVKVITLKSKLVSDFRKDFQFYKVREINNYHHAHDAYLNAVVGTALIKKYPKLESEFVYGDYKVYDVRKMIAKSEQEIGKATAKYFFYSNIMNFFKTEITLANGEIRKRPLIETNGETGEIVWDKGRDFATVRKVLSMPQVNIVKKTEVQTGGFSKESILPKRNSDKLIARKKDWDPKKYGGFDSPTVAYSVLVVAKVEKGKSKKLKSVKELLGITIMERSSFEKNPIDFLEAKGYKEVKKDLIIKLPKYSLFELENGRKRMLASAGELQKGNELALPSKYVNFLYLASHYEKLKGSPEDNEQKQLFVEQHKHYLDEIIEQISEFSKRVILADANLDKVLSAYNKHRDKPIREQAENIIHLFTLTNLGAPAAFKYFDTTIDRKRYTSTKEVLDATLIHQSITGLYETRIDLSQLGGDGGGSSGGSEAAAKGGTAPLEEEYRLFLEAPIQNVTLLEQWKREIPKVWAEINPPGLASTQAPIHVQLLSTALPVRVRQYPITLEAKRSLRETIRKFRAAGILRPVHSPWNTPLLPVRKSGTSEYRMVQDLREVNKRVETIHPTVPNPYTLLSLLPPDRIWYSVLDLKDAFFCIPLAPESQLIFAFEWADAEEGESGQLTWTRLPQGFKNSPTLFNEALNRDLQGFRLDHPSVSLLQYVDDLLIAADTQAACLSATRDLLMTLAELGYRVSGKKAQLCQEEVTYLGFKIHKGSRSLSNSRTQAILQIPVPKTKRQVREFLGTIGYCRLWIPGFAELAQPLYAATRPGNDPLVWGEKEEEAFQSLKLALTQPPALALPSLDKPFQLFVEETSGAAKGVLTQALGPWKRPVAYLSKRLDPVAAGWPRCLRAIAAAALLTREASKLTFGQDIEITSSHNLESLLRSPPDKWLTNARITQYQVLLLDPPRVRFKQTAALNPATLLPETDDTLPIHHCLDTLDSLTSTRPDLTDQPLAQAEATLFTDGSSYIRDGKRYAGAAVVTLDSVIWAEPLPIGTSAQKAELIALTKALEWSKDKSVNIYTDSRYAFATLHVHGMIYRERGWLTAGGKAIKNAPEILALLTAVWLPKRVAVMHCKGHQKDDAPTSTGNRRADEVAREVAIRPLSTQATISAGKRTADGSEFEKRTADGSEFESPKKKAKVE

SEQ ID NO: 7069 - protein, 2098 aa, synthetic construct
MPAAKRVKLDGGDKKYSIGLDIGTNSVGWAVITDEYKVPSKKFKVLGNTDRHSIKKNLIGALLFDSGETAEATRLKRTARRRYTRRKNRICYLQEIFSNEMAKVDDSFFHRLEESFLVEEDKKHERHPIFGNIVDEVAYHEKYPTIYHLRKKLVDSTDKADLRLIYLALAHMIKFRGHFLIEGDLNPDNSDVDKLFIQLVQTYNQLFEENPINASGVDAKAILSARLSKSRRLENLIAQLPGEKKNGLFGNLIALSLGLTPNFKSNFDLAEDAKLQLSKDTYDDDLDNLLAQIGDQYADLFLAAKNLSDAILLSDILRVNTEITKAPLSASMIKRYDEHHQDLTLLKALVRQQLPEKYKEIFFDQSKNGYAGYIDGGASQEEFYKFIKPILEKMDGTEELLVKLNREDLLRKQRTFDNGSIPHQIHLGELHAILRRQEDFYPFLKDNREKIEKILTFRIPYYVGPLARGNSRFAWMTRKSEETITPWNFEEVVDKGASAQSFIERMTNFDKNLPNEKVLPKHSLLYEYFTVYNELTKVKYVTEGMRKPAFLSGEQKKAIVDLLFKTNRKVTVKQLKEDYFKKIECFDSVEISGVEDRFNASLGTYHDLLKIIKDKDFLDNEENEDILEDIVLTLTLFEDREMIEERLKTYAHLFDDKVMKQLKRRRYTGWGRLSRKLINGIRDKQSGKTILDFLKSDGFANRNFMQLIHDDSLTFKEDIQKAQVSGQGDSLHEHIANLAGSPAIKKGILQTVKVVDELVKVMGRHKPENIVIEMARENQTTQKGQKNSRERMKRIEEGIKELGSQILKEHPVENTQLQNEKLYLYYLQNGRDMYVDQELDINRLSDYDVDHIVPQSFLKDDSIDNKVLTRSDKARGKSDNVPSEEVVKKMKNYWRQLLNAKLITQRKFDNLTKAERGGLSELDKAGFIKRQLVETRQITKHVAQILDSRMNTKYDENDKLIREVKVITLKSKLVSDFRKDFQFYKVREINNYHHAHDAYLNAVVGTALIKKYPKLESEFVYGDYKVYDVRKMIAKSEQEIGKATAKYFFYSNIMNFFKTEITLANGEIRKRPLIETNGETGEIVWDKGRDFATVRKVLSMPQVNIVKKTEVQTGGFSKESILPKRNSDKLIARKKDWDPKKYGGFDSPTVAYSVLVVAKVEKGKSKKLKSVKELLGITIMERSSFEKNPIDFLEAKGYKEVKKDLIIKLPKYSLFELENGRKRMLASAGELQKGNELALPSKYVNFLYLASHYEKLKGSPEDNEQKQLFVEQHKHYLDEIIEQISEFSKRVILADANLDKVLSAYNKHRDKPIREQAENIIHLFTLTNLGAPAAFKYFDTTIDRKRYTSTKEVLDATLIHQSITGLYETRIDLSQLGGDGGGSSGGSEAAAKGGTAPLEEEYRLFLEAPIQNVTLLEQWKREIPKVWAEINPPGLASTQAPIHVQLLSTALPVRVRQYPITLEAKRSLRETIRKFRAAGILRPVHSPWNTPLLPVRKSGTSEYRMVQDLREVNKRVETIHPTVPNPYTLLSLLPPDRIWYSVLDLKDAFFCIPLAPESQLIFAFEWADAEEGESGQLTWTRLPQGFKNSPTLFNEALNRDLQGFRLDHPSVSLLQYVDDLLIAADTQAACLSATRDLLMTLAELGYRVSGKKAQLCQEEVTYLGFKIHKGSRSLSNSRTQAILQIPVPKTKRQVREFLGKIGYCRLFIPGFAELAQPLYAATRPGNDPLVWGEKEEEAFQSLKLALTQPPALALPSLDKPFQLFVEETSGAAKGVLTQALGPWKRPVAYLSKRLDPVAAGWPRCLRAIAAAALLTREASKLTFGQDIEITSSHNLESLLRSPPDKWLTNARITQYQVLLLDPPRVRFKQTAALNPATLLPETDDTLPIHHCLDTLDSLTSTRPDLTDQPLAQAEATLFTDGSSYIRDGKRYAGAAVVTLDSVIWAEPLPIGTSAQKAELIALTKALEWSKDKSVNIYTDSRYAFATLHVHGMIYRERGWLTAGGKAIKNAPEILALLTAVWLPKRVAVMHCKGHQKDDAPTSTGNRRADEVAREVAIRPLSTQATISAGKRTADGSEFEKRTADGSEFESPKKKAKVE

SEQ ID NO: 7070 - protein, 2095 aa, synthetic construct
MPAAKRVKLDGGDKKYSIGLDIGTNSVGWAVITDEYKVPSKKFKVLGNTDRHSIKKNLIGALLFDSGETAEATRLKRTARRRYTRRKNRICYLQEIFSNEMAKVDDSFFHRLEESFLVEEDKKHERHPIFGNIVDEVAYHEKYPTIYHLRKKLVDSTDKADLRLIYLALAHMIKFRGHFLIEGDLNPDNSDVDKLFIQLVQTYNQLFEENPINASGVDAKAILSARLSKSRRLENLIAQLPGEKKNGLFGNLIALSLGLTPNFKSNFDLAEDAKLQLSKDTYDDDLDNLLAQIGDQYADLFLAAKNLSDAILLSDILRVNTEITKAPLSASMIKRYDEHHQDLTLLKALVRQQLPEKYKEIFFDQSKNGYAGYIDGGASQEEFYKFIKPILEKMDGTEELLVKLNREDLLRKQRTFDNGSIPHQIHLGELHAILRRQEDFYPFLKDNREKIEKILTFRIPYYVGPLARGNSRFAWMTRKSEETITPWNFEEVVDKGASAQSFIERMTNFDKNLPNEKVLPKHSLLYEYFTVYNELTKVKYVTEGMRKPAFLSGEQKKAIVDLLFKTNRKVTVKQLKEDYFKKIECFDSVEISGVEDRFNASLGTYHDLLKIIKDKDFLDNEENEDILEDIVLTLTLFEDREMIEERLKTYAHLFDDKVMKQLKRRRYTGWGRLSRKLINGIRDKQSGKTILDFLKSDGFANRNFMQLIHDDSLTFKEDIQKAQVSGQGDSLHEHIANLAGSPAIKKGILQTVKVVDELVKVMGRHKPENIVIEMARENQTTQKGQKNSRERMKRIEEGIKELGSQILKEHPVENTQLQNEKLYLYYLQNGRDMYVDQELDINRLSDYDVDHIVPQSFLKDDSIDNKVLTRSDKARGKSDNVPSEEVVKKMKNYWRQLLNAKLITQRKFDNLTKAERGGLSELDKAGFIKRQLVETRQITKHVAQILDSRMNTKYDENDKLIREVKVITLKSKLVSDFRKDFQFYKVREINNYHHAHDAYLNAVVGTALIKKYPKLESEFVYGDYKVYDVRKMIAKSEQEIGKATAKYFFYSNIMNFFKTEITLANGEIRKRPLIETNGETGEIVWDKGRDFATVRKVLSMPQVNIVKKTEVQTGGFSKESILPKRNSDKLIARKKDWDPKKYGGFDSPTVAYSVLVVAKVEKGKSKKLKSVKELLGITIMERSSFEKNPIDFLEAKGYKEVKKDLIIKLPKYSLFELENGRKRMLASAGELQKGNELALPSKYVNFLYLASHYEKLKGSPEDNEQKQLFVEQHKHYLDEIIEQISEFSKRVILADANLDKVLSAYNKHRDKPIREQAENIIHLFTLTNLGAPAAFKYFDTTIDRKRYTSTKEVLDATLIHQSITGLYETRIDLSQLGGDGGGSSGGSEAAAKGGTLQLEEEYRLFEPESTQKQEMDIWLKNFPQAWAETGGMGTAHCQAPVLIQLKATATPISIRQYPMPHEAYQGIKPHIRRMLDQGILKPCQSPWNTPLLPVKKPGTEDYRPVQDLREVNKRVEDIHPTVPNPYNLLSTLPPSHPWYTVLDLKDAFFCLRLHSESQLLFAFEWRDPEIGLSGQLTWTRLPQGFKNSPTLFNEALHSDLADFRVRYPALVLLQYVDDLLLAAATRTECLEGTKALLETLGNKGYRASAKKAQICLQEVTYLGYSLKDGQRWLTKARKEAILSIPVPKNSRQVREFLGTAGYCRLWIPGFAELAAPLYPLTRPGTLFQWGTEQQLAFEDIKKALLSSPALGLPDITKPFELFIDENSGFAKGVLVQKLGPWKRPVAYLSKKLDTVASGWPPCLRMVAAIAILVKDAGKLTLGQPLTILTSHPVEALVRQPPNKWLSNARMTHYQAMLLDAERVHFGPTVSLNPATLLPLPSGGNHHDCLQILAETHGTRPDLTDQPLPDADLTWYTDGSSFIRNGEREAGAAVTTESEVIWAAPLPPGTSAQRAELIALTQALKMAEGKKLTVYTDSRYAFATTHVHGEIYRRRGWLTSEGKEIKNKNEILALLEALFLPKRLSIIHCPGHQKGDSPQAKGNRLADDTAKKAATETHSSLTVLPAGKRTADGSEFEKRTADGSEFESPKKKAKVE

SEQ ID NO: 7071 - protein, 2094 aa, synthetic construct
MPAAKRVKLDGGDKKYSIGLDIGTNSVGWAVITDEYKVPSKKFKVLGNTDRHSIKKNLIGALLFDSGETAEATRLKRTARRRYTRRKNRICYLQEIFSNEMAKVDDSFFHRLEESFLVEEDKKHERHPIFGNIVDEVAYHEKYPTIYHLRKKLVDSTDKADLRLIYLALAHMIKFRGHFLIEGDLNPDNSDVDKLFIQLVQTYNQLFEENPINASGVDAKAILSARLSKSRRLENLIAQLPGEKKNGLFGNLIALSLGLTPNFKSNFDLAEDAKLQLSKDTYDDDLDNLLAQIGDQYADLFLAAKNLSDAILLSDILRVNTEITKAPLSASMIKRYDEHHQDLTLLKALVRQQLPEKYKEIFFDQSKNGYAGYIDGGASQEEFYKFIKPILEKMDGTEELLVKLNREDLLRKQRTFDNGSIPHQIHLGELHAILRRQEDFYPFLKDNREKIEKILTFRIPYYVGPLARGNSRFAWMTRKSEETITPWNFEEVVDKGASAQSFIERMTNFDKNLPNEKVLPKHSLLYEYFTVYNELTKVKYVTEGMRKPAFLSGEQKKAIVDLLFKTNRKVTVKQLKEDYFKKIECFDSVEISGVEDRFNASLGTYHDLLKIIKDKDFLDNEENEDILEDIVLTLTLFEDREMIEERLKTYAHLFDDKVMKQLKRRRYTGWGRLSRKLINGIRDKQSGKTILDFLKSDGFANRNFMQLIHDDSLTFKEDIQKAQVSGQGDSLHEHIANLAGSPAIKKGILQTVKVVDELVKVMGRHKPENIVIEMARENQTTQKGQKNSRERMKRIEEGIKELGSQILKEHPVENTQLQNEKLYLYYLQNGRDMYVDQELDINRLSDYDVDHIVPQSFLKDDSIDNKVLTRSDKARGKSDNVPSEEVVKKMKNYWRQLLNAKLITQRKFDNLTKAERGGLSELDKAGFIKRQLVETRQITKHVAQILDSRMNTKYDENDKLIREVKVITLKSKLVSDFRKDFQFYKVREINNYHHAHDAYLNAVVGTALIKKYPKLESEFVYGDYKVYDVRKMIAKSEQEIGKATAKYFFYSNIMNFFKTEITLANGEIRKRPLIETNGETGEIVWDKGRDFATVRKVLSMPQVNIVKKTEVQTGGFSKESILPKRNSDKLIARKKDWDPKKYGGFDSPTVAYSVLVVAKVEKGKSKKLKSVKELLGITIMERSSFEKNPIDFLEAKGYKEVKKDLIIKLPKYSLFELENGRKRMLASAGELQKGNELALPSKYVNFLYLASHYEKLKGSPEDNEQKQLFVEQHKHYLDEIIEQISEFSKRVILADANLDKVLSAYNKHRDKPIREQAENIIHLFTLTNLGAPAAFKYFDTTIDRKRYTSTKEVLDATLIHQSITGLYETRIDLSQLGGDGGGSSGGSEAAAKGGVLNLEEEYRLHEKPVPSSIDPSWLQLFPTVWAERAGMGLANQVPPVVVELRSGASPVAVRQYPMSKEAREGIRPHIQKFLDLGVLVPCRSPWNTPLLPVKKPGTNDYRPVQDLREINKRVQDIHPTVPNPYNLLSSLPPSYTWYSVLDLKDAFFCLRLHPNSQPLFAFEWKDPEKGNTGQLTWTRLPQGFKNSPTLFNEALHRDLAPFRALNPQVVLLQYVDDLLVAAPTYEDCKKGTQKLLQELSKLGYRVSAKKAQLCQREVTYLGYLLKEGKRWLTPARKATVMKIPVPTTPRQVREFLGKAGFCRLFIPGFASLAAPLYPLTKPSIPFIWTEEHQQAFDHIKKALLSAPALALPDLTKPFTLYIDERAGVARGVLTQTLGPWRRPVAYLSKKLDPVASGWPTCLKAVAAVALLLKDADKLTLGQNVTVIASHSLESIVRQPPDRWMTNARMTHYQSLLLNERVSFAPPAVLNPATLLPVESEATPVHRCSEILAEETGTRRDLEDQPLPGVPTWYTDGSSFITEGKRRAGAPIVDGKRTVWASSLPEGTSAQKAELVALTQALRLAEGKNINIYTDSRYAFATAHIHGAIYKQRGWLTSAGKDIKNKEEILALLEAIHLPRRVAIIHCPGHQRGSNPVATGNRRADEAAKQAALSTRVLAGTTKPAGKRTADGSEFEKRTADGSEFESPKKKAKVE

SEQ ID NO: 7072 - protein, 2127 aa, synthetic construct
MPAAKRVKLDGGDKKYSIGLDIGTNSVGWAVITDEYKVPSKKFKVLGNTDRHSIKKNLIGALLFDSGETAEATRLKRTARRRYTRRKNRICYLQEIFSNEMAKVDDSFFHRLEESFLVEEDKKHERHPIFGNIVDEVAYHEKYPTIYHLRKKLVDSTDKADLRLIYLALAHMIKFRGHFLIEGDLNPDNSDVDKLFIQLVQTYNQLFEENPINASGVDAKAILSARLSKSRRLENLIAQLPGEKKNGLFGNLIALSLGLTPNFKSNFDLAEDAKLQLSKDTYDDDLDNLLAQIGDQYADLFLAAKNLSDAILLSDILRVNTEITKAPLSASMIKRYDEHHQDLTLLKALVRQQLPEKYKEIFFDQSKNGYAGYIDGGASQEEFYKFIKPILEKMDGTEELLVKLNREDLLRKQRTFDNGSIPHQIHLGELHAILRRQEDFYPFLKDNREKIEKILTFRIPYYVGPLARGNSRFAWMTRKSEETITPWNFEEVVDKGASAQSFIERMTNFDKNLPNEKVLPKHSLLYEYFTVYNELTKVKYVTEGMRKPAFLSGEQKKAIVDLLFKTNRKVTVKQLKEDYFKKIECFDSVEISGVEDRFNASLGTYHDLLKIIKDKDFLDNEENEDILEDIVLTLTLFEDREMIEERLKTYAHLFDDKVMKQLKRRRYTGWGRLSRKLINGIRDKQSGKTILDFLKSDGFANRNFMQLIHDDSLTFKEDIQKAQVSGQGDSLHEHIANLAGSPAIKKGILQTVKVVDELVKVMGRHKPENIVIEMARENQTTQKGQKNSRERMKRIEEGIKELGSQILKEHPVENTQLQNEKLYLYYLQNGRDMYVDQELDINRLSDYDVDHIVPQSFLKDDSIDNKVLTRSDKARGKSDNVPSEEVVKKMKNYWRQLLNAKLITQRKFDNLTKAERGGLSELDKAGFIKRQLVETRQITKHVAQILDSRMNTKYDENDKLIREVKVITLKSKLVSDFRKDFQFYKVREINNYHHAHDAYLNAVVGTALIKKYPKLESEFVYGDYKVYDVRKMIAKSEQEIGKATAKYFFYSNIMNFFKTEITLANGEIRKRPLIETNGETGEIVWDKGRDFATVRKVLSMPQVNIVKKTEVQTGGFSKESILPKRNSDKLIARKKDWDPKKYGGFDSPTVAYSVLVVAKVEKGKSKKLKSVKELLGITIMERSSFEKNPIDFLEAKGYKEVKKDLIIKLPKYSLFELENGRKRMLASAGELQKGNELALPSKYVNFLYLASHYEKLKGSPEDNEQKQLFVEQHKHYLDEIIEQISEFSKRVILADANLDKVLSAYNKHRDKPIREQAENIIHLFTLTNLGAPAAFKYFDTTIDRKRYTSTKEVLDATLIHQSITGLYETRIDLSQLGGDGGGSSGGSEAAAKGGLLGRDLLTKLKAQIQFSTEGPQVTWEDRPAMCLVLNLEEEYRLHEKPVPPSIDPSWLQLFPMVWAEKAGMGLANQVPPVVVELKSDASPVAVRQYPMSKEAREGIRPHIQRFLDLGILVPCQSPWNTPLLPVKKPGTNDYRPVQDLREVNKRVQDIHPTVPNPYNLLSSLPPSHTWYSVLDLKDAFFCLKLHPNSQPLFAFEWRDPEKGNTGQLTWTRLPQGFKNSPTLFNEALHRDLASFRALNPQVVMLQYVDDLLVAAPTYRDCKEGTRRLLQELSKLGYRVSAKKAQLCREEVTYLGYLLKGGKRWLTPARKATVMKIPTPTTPRQVREFLGTAGFCRLWIPGFASLAAPLYPLTRPKVPFTWTEAHQEAFGRIKEALLSAPALALPDLTKPFALYVDEKEGVARGVLTQTLGPWRRPVAYLSKKLDPVASGWPTCLKAIAAVALLLKDADKLTLGQNVLVIAPHNLESIVRQPPDRWMTNARMTHYQSLLLNERVSFAPPAILNPATLLPVESDDTPIHICSEILAEETGTRPDLRDQPLPGVPAWYTDGSSFIMDGRRQAGAAIVDNKRTVWASNLPEGTSAQKAELIALTQALRLAEGKSINIYTDSRYAFATAHVHGAIYKQRGWLTSAGKDIKNKEEILALLEAIHLPKRVAIIHCPGHQRGTDPVATGNRKADEAAKQAAQSTRILTETTKNAGKRTADGSEFEKRTADGSEFESPKKKAKVE

SEQ ID NO: 7073 - protein, 2218 aa, synthetic construct
MPAAKRVKLDGGDKKYSIGLDIGTNSVGWAVITDEYKVPSKKFKVLGNTDRHSIKKNLIGALLFDSGETAEATRLKRTARRRYTRRKNRICYLQEIFSNEMAKVDDSFFHRLEESFLVEEDKKHERHPIFGNIVDEVAYHEKYPTIYHLRKKLVDSTDKADLRLIYLALAHMIKFRGHFLIEGDLNPDNSDVDKLFIQLVQTYNQLFEENPINASGVDAKAILSARLSKSRRLENLIAQLPGEKKNGLFGNLIALSLGLTPNFKSNFDLAEDAKLQLSKDTYDDDLDNLLAQIGDQYADLFLAAKNLSDAILLSDILRVNTEITKAPLSASMIKRYDEHHQDLTLLKALVRQQLPEKYKEIFFDQSKNGYAGYIDGGASQEEFYKFIKPILEKMDGTEELLVKLNREDLLRKQRTFDNGSIPHQIHLGELHAILRRQEDFYPFLKDNREKIEKILTFRIPYYVGPLARGNSRFAWMTRKSEETITPWNFEEVVDKGASAQSFIERMTNFDKNLPNEKVLPKHSLLYEYFTVYNELTKVKYVTEGMRKPAFLSGEQKKAIVDLLFKTNRKVTVKQLKEDYFKKIECFDSVEISGVEDRFNASLGTYHDLLKIIKDKDFLDNEENEDILEDIVLTLTLFEDREMIEERLKTYAHLFDDKVMKQLKRRRYTGWGRLSRKLINGIRDKQSGKTILDFLKSDGFANRNFMQLIHDDSLTFKEDIQKAQVSGQGDSLHEHIANLAGSPAIKKGILQTVKVVDELVKVMGRHKPENIVIEMARENQTTQKGQKNSRERMKRIEEGIKELGSQILKEHPVENTQLQNEKLYLYYLQNGRDMYVDQELDINRLSDYDVDHIVPQSFLKDDSIDNKVLTRSDKARGKSDNVPSEEVVKKMKNYWRQLLNAKLITQRKFDNLTKAERGGLSELDKAGFIKRQLVETRQITKHVAQILDSRMNTKYDENDKLIREVKVITLKSKLVSDFRKDFQFYKVREINNYHHAHDAYLNAVVGTALIKKYPKLESEFVYGDYKVYDVRKMIAKSEQEIGKATAKYFFYSNIMNFFKTEITLANGEIRKRPLIETNGETGEIVWDKGRDFATVRKVLSMPQVNIVKKTEVQTGGFSKESILPKRNSDKLIARKKDWDPKKYGGFDSPTVAYSVLVVAKVEKGKSKKLKSVKELLGITIMERSSFEKNPIDFLEAKGYKEVKKDLIIKLPKYSLFELENGRKRMLASAGELQKGNELALPSKYVNFLYLASHYEKLKGSPEDNEQKQLFVEQHKHYLDEIIEQISEFSKRVILADANLDKVLSAYNKHRDKPIREQAENIIHLFTLTNLGAPAAFKYFDTTIDRKRYTSTKEVLDATLIHQSITGLYETRIDLSQLGGDGGGSSGGSEAAAKGGTLGDQGSRGSDPLPEPRVTLTVEGIPTEFLVNTGAEHSVLTKPMGKMGSKRTVVAGATGSKVYPWTTKRLLKIGQKQVTHSFLVIPECPAPLLGRDLLTKLKAQIQFSTEGPQVTWEDRPAMCLVLNLEEEYRLHEKPVPPSIDPSWLQLFPMVWAEKAGMGLANQVPPVVVELKSDASPVAVRQYPMSKEAREGIRPHIQRFLDLGILVPCQSPWNTPLLPVKKPGTNDYRPVQDLREVNKRVQDIHPTVPNPYNLLSSLPPSHTWYSVLDLKDAFFCLKLHPNSQPLFAFEWRDPEKGNTGQLTWTRLPQGFKNSPTLFNEALHRDLASFRALNPQVVMLQYVDDLLVAAPTYRDCKEGTRRLLQELSKLGYRVSAKKAQLCREEVTYLGYLLKGGKRWLTPARKATVMKIPTPTTPRQVREFLGTAGFCRLWIPGFASLAAPLYPLTRPKVPFTWTEAHQEAFGRIKEALLSAPALALPDLTKPFALYVDEKEGVARGVLTQTLGPWRRPVAYLSKKLDPVASGWPTCLKAIAAVALLLKDADKLTLGQNVLVIAPHNLESIVRQPPDRWMTNARMTHYQSLLLNERVSFAPPAILNPATLLPVESDDTPIHICSEILAEETGTRPDLRDQPLPGVPAWYTDGSSFIMDGRRQAGAAIVDNKRTVWASNLPEGTSAQKAELIALTQALRLAEGKSINIYTDSRYAFATAHVHGAIYKQRGWLTSAGKDIKNKEEILALLEAIHLPKRVAIIHCPGHQRGTDPVATGNRKADEAAKQAAQSTRILTETTKNAGKRTADGSEFEKRTADGSEFESPKKKAKVE

SEQ ID NO: 7074 - protein, 2090 aa, synthetic construct
MPAAKRVKLDGGDKKYSIGLDIGTNSVGWAVITDEYKVPSKKFKVLGNTDRHSIKKNLIGALLFDSGETAEATRLKRTARRRYTRRKNRICYLQEIFSNEMAKVDDSFFHRLEESFLVEEDKKHERHPIFGNIVDEVAYHEKYPTIYHLRKKLVDSTDKADLRLIYLALAHMIKFRGHFLIEGDLNPDNSDVDKLFIQLVQTYNQLFEENPINASGVDAKAILSARLSKSRRLENLIAQLPGEKKNGLFGNLIALSLGLTPNFKSNFDLAEDAKLQLSKDTYDDDLDNLLAQIGDQYADLFLAAKNLSDAILLSDILRVNTEITKAPLSASMIKRYDEHHQDLTLLKALVRQQLPEKYKEIFFDQSKNGYAGYIDGGASQEEFYKFIKPILEKMDGTEELLVKLNREDLLRKQRTFDNGSIPHQIHLGELHAILRRQEDFYPFLKDNREKIEKILTFRIPYYVGPLARGNSRFAWMTRKSEETITPWNFEEVVDKGASAQSFIERMTNFDKNLPNEKVLPKHSLLYEYFTVYNELTKVKYVTEGMRKPAFLSGEQKKAIVDLLFKTNRKVTVKQLKEDYFKKIECFDSVEISGVEDRFNASLGTYHDLLKIIKDKDFLDNEENEDILEDIVLTLTLFEDREMIEERLKTYAHLFDDKVMKQLKRRRYTGWGRLSRKLINGIRDKQSGKTILDFLKSDGFANRNFMQLIHDDSLTFKEDIQKAQVSGQGDSLHEHIANLAGSPAIKKGILQTVKVVDELVKVMGRHKPENIVIEMARENQTTQKGQKNSRERMKRIEEGIKELGSQILKEHPVENTQLQNEKLYLYYLQNGRDMYVDQELDINRLSDYDVDHIVPQSFLKDDSIDNKVLTRSDKARGKSDNVPSEEVVKKMKNYWRQLLNAKLITQRKFDNLTKAERGGLSELDKAGFIKRQLVETRQITKHVAQILDSRMNTKYDENDKLIREVKVITLKSKLVSDFRKDFQFYKVREINNYHHAHDAYLNAVVGTALIKKYPKLESEFVYGDYKVYDVRKMIAKSEQEIGKATAKYFFYSNIMNFFKTEITLANGEIRKRPLIETNGETGEIVWDKGRDFATVRKVLSMPQVNIVKKTEVQTGGFSKESILPKRNSDKLIARKKDWDPKKYGGFDSPTVAYSVLVVAKVEKGKSKKLKSVKELLGITIMERSSFEKNPIDFLEAKGYKEVKKDLIIKLPKYSLFELENGRKRMLASAGELQKGNELALPSKYVNFLYLASHYEKLKGSPEDNEQKQLFVEQHKHYLDEIIEQISEFSKRVILADANLDKVLSAYNKHRDKPIREQAENIIHLFTLTNLGAPAAFKYFDTTIDRKRYTSTKEVLDATLIHQSITGLYETRIDLSQLGGDGGGSSGGSEAAAKGGTLQLDDEYRLYSPLVKPDQNIQFWLEQFPQAWAETAGMGLAKQVPPQVIQLKASATPVSVRQYPLSKEAQEGIRPHVQRLIQQGILVPVQSPWNTPLLPVRKPGTNDYRPVQDLREVNKRVQDIHPTVPNPYNLLCALPPQRSWYTVLDLKDAFFCLRLHPTSQPLFAFEWRDPGTGRTGQLTWTRLPQGFKNSPTIFDEALHRDLANFRIQHPQVTLLQYVDDLLLAGATKQDCLEGTKALLLELSDLGYRASAKKAQICRREVTYLGYSLRDGQRWLTEARKKTVVQIPAPTTAKQVREFLGTAGFCRLWIPGFATLAAPLYPLTKEKGEFSWAPEHQKAFDAIKKALLSAPALALPDVTKPFTLYVDERKGVARGVLTQTLGPWRRPVAYLSKKLDPVASGWPVCLKAIAAVAILVKDADKLTLGQNITVIAPHALENIVRQPPDRWMTNARMTHYQSLLLTERVTFAPPAALNPATLLPEETDEPVTHDCHQLLIEETGVRKDLTDIPLTGEVLTWFTDGSSYVVEGKRMAGAAVVDGTRTIWASSLPEGTSAQKAELMALTQALRLAEGKSINIYTDSRYAFATAHVHGAIYKQRGLLTSAGREIKNKEEILSLLEALHLPKRLAIIHCPGHQKAKDPISRGNQMADRVAKQAAQGVNLLAGKRTADGSEFEKRTADGSEFESPKKKAKVE

SEQ ID NO: 7075 - protein, 2090 aa, synthetic construct; identical to SEQ ID NO: 7074

SEQ ID NO: 7076 - protein, 2176 aa, synthetic construct
MPAAKRVKLDGGDKKYSIGLDIGTNSVGWAVITDEYKVPSKKFKVLGNTDRHSIKKNLIGALLFDSGETAEATRLKRTARRRYTRRKNRICYLQEIFSNEMAKVDDSFFHRLEESFLVEEDKKHERHPIFGNIVDEVAYHEKYPTIYHLRKKLVDSTDKADLRLIYLALAHMIKFRGHFLIEGDLNPDNSDVDKLFIQLVQTYNQLFEENPINASGVDAKAILSARLSKSRRLENLIAQLPGEKKNGLFGNLIALSLGLTPNFKSNFDLAEDAKLQLSKDTYDDDLDNLLAQIGDQYADLFLAAKNLSDAILLSDILRVNTEITKAPLSASMIKRYDEHHQDLTLLKALVRQQLPEKYKEIFFDQSKNGYAGYIDGGASQEEFYKFIKPILEKMDGTEELLVKLNREDLLRKQRTFDNGSIPHQIHLGELHAILRRQEDFYPFLKDNREKIEKILTFRIPYYVGPLARGNSRFAWMTRKSEETITPWNFEEVVDKGASAQSFIERMTNFDKNLPNEKVLPKHSLLYEYFTVYNELTKVKYVTEGMRKPAFLSGEQKKAIVDLLFKTNRKVTVKQLKEDYFKKIECFDSVEISGVEDRFNASLGTYHDLLKIIKDKDFLDNEENEDILEDIVLTLTLFEDREMIEERLKTYAHLFDDKVMKQLKRRRYTGWGRLSRKLINGIRDKQSGKTILDFLKSDGFANRNFMQLIHDDSLTFKEDIQKAQVSGQGDSLHEHIANLAGSPAIKKGILQTVKVVDELVKVMGRHKPENIVIEMARENQTTQKGQKNSRERMKRIEEGIKELGSQILKEHPVENTQLQNEKLYLYYLQNGRDMYVDQELDINRLSDYDVDHIVPQSFLKDDSIDNKVLTRSDKARGKSDNVPSEEVVKKMKNYWRQLLNAKLITQRKFDNLTKAERGGLSELDKAGFIKRQLVETRQITKHVAQILDSRMNTKYDENDKLIREVKVITLKSKLVSDFRKDFQFYKVREINNYHHAHDAYLNAVVGTALIKKYPKLESEFVYGDYKVYDVRKMIAKSEQEIGKATAKYFFYSNIMNFFKTEITLANGEIRKRPLIETNGETGEIVWDKGRDFATVRKVLSMPQVNIVKKTEVQTGGFSKESILPKRNSDKLIARKKDWDPKKYGGFDSPTVAYSVLVVAKVEKGKSKKLKSVKELLGITIMERSSFEKNPIDFLEAKGYKEVKKDLIIKLPKYSLFELENGRKRMLASAGELQKGNELALPSKYVNFLYLASHYEKLKGSPEDNEQKQLFVEQHKHYLDEIIEQISEFSKRVILADANLDKVLSAYNKHRDKPIREQAENIIHLFTLTNLGAPAAFKYFDTTIDRKRYTSTKEVLDATLIHQSITGLYETRIDLSQLGGDGGGSSGGSEAAAKGGMDPLQLLQPLEAEIKGTKLKAHWNSGATITCVPEAFLEDERPIQTMLIKTIHGEKQQDVYYLTFKVQGRKVEAEVLASPYDYILLNPSDVPWLMKKPLQLTVLVPLHEYQERLLQQTALPKEQKELLQKLFLKYDALWQHWENQVGHRRIKPHNIATGTLAPRPQKQYPINPKAKPSIQIVIDDLLKQGVLIQQNSTMNTPVYPVPKPDGKWRMVLDYREVNKTIPLIAAQNQHSAGILSSIYRGKYKTTLDLTNGFWAHPITPESYWLTAFTWQGKQYCWTRLPQGFLNSPALFNADVVDLLKEIPNVQAYVDDIYISHDDPQEHLEQLEKIFSILLNAGYVVSLKKSEIAQREVEFLGFNITKEGRGLTDTFKQKLLNITPPKDLKQLQSILGLLNFARNFIPNYSELVKPLYTIVAPANGKFISWTEDNSNQLQHIISVLNQADNLEERNPETRLIIKVNSSPSAGYIRYYNEGSKRPIMYVNYIFSKAEAKFTQTEKLLTTMHKGLIKAMDLAMGQEILVYSPIVSMTKIQRTPLPERKALPVRWITWMTYLEDPRIQFHYDKSLPELQQIPNVTEDVIAKTKHPSEFAMVFYTDGSAIKHPDVNKSHSAGMGIAQVQFIPEYKIVHQWSIPLGDHTAQLAEIAAVEFACKKALKISGPVLIVTDSFYVAESANKELPYWKSNGFLNNKKKPLRHVSKWKSIAECLQLKPDIIIMHEKGHQQPMTTLHTEGNNLADKLATQGSYVVHAGKRTADGSEFEKRTADGSEFESPKKKAKVE

SEQ ID NO: 7077 - protein, 2176 aa, synthetic construct
MPAAKRVKLDGGDKKYSIGLDIGTNSVGWAVITDEYKVPSKKFKVLGNTDRHSIKKNLIGALLFDSGETAEATRLKRTARRRYTRRKNRICYLQEIFSNEMAKVDDSFFHRLEESFLVEEDKKHERHPIFGNIVDEVAYHEKYPTIYHLRKKLVDSTDKADLRLIYLALAHMIKFRGHFLIEGDLNPDNSDVDKLFIQLVQTYNQLFEENPINASGVDAKAILSARLSKSRRLENLIAQLPGEKKNGLFGNLIALSLGLTPNFKSNFDLAEDAKLQLSKDTYDDDLDNLLAQIGDQYADLFLAAKNLSDAILLSDILRVNTEITKAPLSASMIKRYDEHHQDLTLLKALVRQQLPEKYKEIFFDQSKNGYAGYIDGGASQEEFYKFIKPILEKMDGTEELLVKLNREDLLRKQRTFDNGSIPHQIHLGELHAILRRQEDFYPFLKDNREKIEKILTFRIPYYVGPLARGNSRFAWMTRKSEETITPWNFEEVVDKGASAQSFIERMTNFDKNLPNEKVLPKHSLLYEYFTVYNELTKVKYVTEGMRKPAFLSGEQKKAIVDLLFKTNRKVTVKQLKEDYFKKIECFDSVEISGVEDRFNASLGTYHDLLKIIKDKDFLDNEENEDILEDIVLTLTLFEDREMIEERLKTYAHLFDDKVMKQLKRRRYTGWGRLSRKLINGIRDKQSGKTILDFLKSDGFANRNFMQLIHDDSLTFKEDIQKAQVSGQGDSLHEHIANLAGSPAIKKGILQTVKVVDELVKVMGRHKPENIVIEMARENQTTQKGQKNSRERMKRIEEGIKELGSQILKEHPVENTQLQNEKLYLYYLQNGRDMYVDQELDINRLSDYDVDHIVPQSFLKDDSIDNKVLTRSDKARGKSDNVPSEEVVKKMKNYWRQLLNAKLITQRKFDNLTKAERGGLSELDKAGFIKRQLVETRQITKHVAQILDSRMNTKYDENDKLIREVKVITLKSKLVSDFRKDFQFYKVREINNYHHAHDAYLNAVVGTALIKKYPKLESEFVYGDYKVYDVRKMIAKSEQEIGKATAKYFFYSNIMNFFKTEITLANGEIRKRPLIETNGETGEIVWDKGRDFATVRKVLSMPQVNIVKKTEVQTGGFSKESILPKRNSDKLIARKKDWDPKKYGGFDSPTVAYSVLVVAKVEKGKSKKLKSVKELLGITIMERSSFEKNPIDFLEAKGYKEVKKDLIIKLPKYSLFELENGRKRMLASAGELQKGNELALPSKYVNFLYLASHYEKLKGSPEDNEQKQLFVEQHKHYLDEIIEQISEFSKRVILADANLDKVLSAYNKHRDKPIREQAENIIHLFTLTNLGAPAAFKYFDTTIDRKRYTSTKEVLDATLIHQSITGLYETRIDLSQLGGDGGGSSGGSEAAAKGGMDPLQLLQPLEAEIKGTKLKAHWNSGATITCVPQAFLEEEVPIKNIWIKTIHGEKEQPVYYLTFKIQGRKVEAEVISSPYDYILVSPSDIPWLMKKPLQLTTLVPLQEYEERLLKQTMLTGSYKEKLQSLFLKYDALWQHWENQVGHRRIKPHHIATGTVNPRPQKQYPINPKAKASIQTVINDLLKQGVLIQQNSIMNTPVYPVPKPDGKWRMVLDYREVNKTIPLIAAQNQHSAGILSSIFRGKYKTTLDLSNGFWAHSITPESYWLTAFTWLGQQYCWTRLPQGFLNSPALFNADVVDLLKEVPNVQVYVDDIYISHDDPREHLEQLEKVFSLLLNAGYVVSLKKSEIAQHEVEFLGFNITKEGRGLTETFKQKLLNITPPRDLKQLQSILGLLNFARNFIPNFSELVKPLYNIIATAPGKYITWTTDNSQQLQNIISMLNSAENLEERNPEVRLIMKVNTSPSAGYIRFYNEFAKRPIMYLNYVYTKAEVKFTNTEKLLTTIHKGLIKALDLGMGQEILVYSPIVSMTKIQKTPLPERKALPIRWITWMSYLEDPRIQFHYDKTLPELQQVPTVTDDIIAKIKHPSEFSMVFYTDGSAIKHPNVNKSHNAGMGIAQVQFKPEFTVINTWSIPLGDHTAQLAEVAAVEFACKKALKIDGPVLIVTDSFYVAESVNKELPYWQSNGFFNNKKKPLKHVSKWKSIADCIQLKPDIIIIHEKGHQPTASTFHTEGNNLADKLATQGSYVVNAGKRTADGSEFEKRTADGSEFESPKKKAKVE

SEQ ID NO: 7078 - protein, 2098 aa, synthetic construct
MPAAKRVKLDGGDKKYSIGLDIGTNSVGWAVITDEYKVPSKKFKVLGNTDRHSIKKNLIGALLFDSGETAEATRLKRTARRRYTRRKNRICYLQEIFSNEMAKVDDSFFHRLEESFLVEEDKKHERHPIFGNIVDEVAYHEKYPTIYHLRKKLVDSTDKADLRLIYLALAHMIKFRGHFLIEGDLNPDNSDVDKLFIQLVQTYNQLFEENPINASGVDAKAILSARLSKSRRLENLIAQLPGEKKNGLFGNLIALSLGLTPNFKSNFDLAEDAKLQLSKDTYDDDLDNLLAQIGDQYADLFLAAKNLSDAILLSDILRVNTEITKAPLSASMIKRYDEHHQDLTLLKALVRQQLPEKYKEIFFDQSKNGYAGYIDGGASQEEFYKFIKPILEKMDGTEELLVKLNREDLLRKQRTFDNGSIPHQIHLGELHAILRRQEDFYPFLKDNREKIEKILTFRIPYYVGPLARGNSRFAWMTRKSEETITPWNFEEVVDKGASAQSFIERMTNFDKNLPNEKVLPKHSLLYEYFTVYNELTKVKYVTEGMRKPAFLSGEQKKAIVDLLFKTNRKVTVKQLKEDYFKKIECFDSVEISGVEDRFNASLGTYHDLLKIIKDKDFLDNEENEDILEDIVLTLTLFEDREMIEERLKTYAHLFDDKVMKQLKRRRYTGWGRLSRKLINGIRDKQSGKTILDFLKSDGFANRNFMQLIHDDSLTFKEDIQKAQVSGQGDSLHEHIANLAGSPAIKKGILQTVKVVDELVKVMGRHKPENIVIEMARENQTTQKGQKNSRERMKRIEEGIKELGSQILKEHPVENTQLQNEKLYLYYLQNGRDMYVDQELDINRLSDYDVDHIVPQSFLKDDSIDNKVLTRSDKARGKSDNVPSEEVVKKMKNYWRQLLNAKLITQRKFDNLTKAERGGLSELDKAGFIKRQLVETRQITKHVAQILDSRMNTKYDENDKLIREVKVITLKSKLVSDFRKDFQFYKVREINNYHHAHDAYLNAVVGTALIKKYPKLESEFVYGDYKVYDVRKMIAKSEQEIGKATAKYFFYSNIMNFFKTEITLANGEIRKRPLIETNGETGEIVWDKGRDFATVRKVLSMPQVNIVKKTEVQTGGFSKESILPKRNSDKLIARKKDWDPKKYGGFDSPTVAYSVLVVAKVEKGKSKKLKSVKELLGITIMERSSFEKNPIDFLEAKGYKEVKKDLIIKLPKYSLFELENGRKRMLASAGELQKGNELALPSKYVNFLYLASHYEKLKGSPEDNEQKQLFVEQHKHYLDEIIEQISEFSKRVILADANLDKVLSAYNKHRDKPIREQAENIIHLFTLTNLGAPAAFKYFDTTIDRKRYTSTKEVLDATLIHQSITGLYETRIDLSQLGGDGGGSSEAAAKGGSGGTAPLEEEYRLFLEAPIQNVTLLEQWKREIPKVWAEINPPGLASTQAPIHVQLLSTALPVRVRQYPITLEAKRSLRETIRKFRAAGILRPVHSPWNTPLLPVRKSGTSEYRMVQDLREVNKRVETIHPTVPNPYTLLSLLPPDRIWYSVLDLKDAFFCIPLAPESQLIFAFEWADAEEGESGQLTWTRLPQGFKNSPTLFDEALNRDLQGFRLDHPSVSLLQYVDDLLIAADTQAACLSATRDLLMTLAELGYRVSGKKAQLCQEEVTYLGFKIHKGSRSLSNSRTQAILQIPVPKTKRQVREFLGTIGYCRLWIPGFAELAQPLYAATRGGNDPLVWGEKEEEAFQSLKLALTQPPALALPSLDKPFQLFVEETSGAAKGVLTQALGPWKRPVAYLSKRLDPVAAGWPRCLRAIAAAALLTREASKLTFGQDIEITSSHNLESLLRSPPDKWLTNARITQYQVLLLDPPRVRFKQTAALNPATLLPETDDTLPIHHCLDTLDSLTSTRPDLTDQPLAQAEATLFTDGSSYIRDGKRYAGAAVVTLDSVIWAEPLPIGTSAQKAELIALTKALEWSKDKSVNIYTDSRYAFATLHVHGMIYRERGLLTAGGKAIKNAPEILALLTAVWLPKRVAVMHCKGHQKDDAPTSTGNRRADEVAREVAIRPLSTQATISAGKRTADGSEFEKRTADGSEFESPKKKAKVE

SEQ ID NO: 7079 - protein, 2098 aa, synthetic construct
MPAAKRVKLDGGDKKYSIGLDIGTNSVGWAVITDEYKVPSKKFKVLGNTDRHSIKKNLIGALLFDSGETAEATRLKRTARRRYTRRKNRICYLQEIFSNEMAKVDDSFFHRLEESFLVEEDKKHERHPIFGNIVDEVAYHEKYPTIYHLRKKLVDSTDKADLRLIYLALAHMIKFRGHFLIEGDLNPDNSDVDKLFIQLVQTYNQLFEENPINASGVDAKAILSARLSKSRRLENLIAQLPGEKKNGLFGNLIALSLGLTPNFKSNFDLAEDAKLQLSKDTYDDDLDNLLAQIGDQYADLFLAAKNLSDAILLSDILRVNTEITKAPLSASMIKRYDEHHQDLTLLKALVRQQLPEKYKEIFFDQSKNGYAGYIDGGASQEEFYKFIKPILEKMDGTEELLVKLNREDLLRKQRTFDNGSIPHQIHLGELHAILRRQEDFYPFLKDNREKIEKILTFRIPYYVGPLARGNSRFAWMTRKSEETITPWNFEEVVDKGASAQSFIERMTNFDKNLPNEKVLPKHSLLYEYFTVYNELTKVKYVTEGMRKPAFLSGEQKKAIVDLLFKTNRKVTVKQLKEDYFKKIECFDSVEISGVEDRFNASLGTYHDLLKIIKDKDFLDNEENEDILEDIVLTLTLFEDREMIEERLKTYAHLFDDKVMKQLKRRRYTGWGRLSRKLINGIRDKQSGKTILDFLKSDGFANRNFMQLIHDDSLTFKEDIQKAQVSGQGDSLHEHIANLAGSPAIKKGILQTVKVVDELVKVMGRHKPENIVIEMARENQTTQKGQKNSRERMKRIEEGIKELGSQILKEHPVENTQLQNEKLYLYYLQNGRDMYVDQELDINRLSDYDVDHIVPQSFLKDDSIDNKVLTRSDKARGKSDNVPSEEVVKKMKNYWRQLLNAKLITQRKFDNLTKAERGGLSELDKAGFIKRQLVETRQITKHVAQILDSRMNTKYDENDKLIREVKVITLKSKLVSDFRKDFQFYKVREINNYHHAHDAYLNAVVGTALIKKYPKLESEFVYGDYKVYDVRKMIAKSEQEIGKATAKYFFYSNIMNFFKTEITLANGEIRKRPLIETNGETGEIVWDKGRDFATVRKVLSMPQVNIVKKTEVQTGGFSKESILPKRNSDKLIARKKDWDPKKYGGFDSPTVAYSVLVVAKVEKGKSKKLKSVKELLGITIMERSSFEKNPIDFLEAKGYKEVKKDLIIKLPKYSLFELENGRKRMLASAGELQKGNELALPSKYVNFLYLASHYEKLKGSPEDNEQKQLFVEQHKHYLDEIIEQISEFSKRVILADANLDKVLSAYNKHRDKPIREQAENIIHLFTLTNLGAPAAFKYFDTTIDRKRYTSTKEVLDATLIHQSITGLYETRIDLSQLGGDGGGSSEAAAKGGSGGTAPLEEEYRLFLEAPIQNVTLLEQWKREIPKVWAEINPPGLASTQAPIHVQLLSTALPVRVRQYPITLEAKRSLRETIRKFRAAGILRPVHSPWNTPLLPVRKSGTSEYRMVQDLREVNKRVETIHPTVPNPYTLLSLLPPDRIWYSVLDLKDAFFCIPLAPESQLIFAFEWADAEEGESGQLTWTRLPQGFKNSPTLFNEALNRDLQGFRLDHPSVSLLQYVDDLLIAADTQAACLSATRDLLMTLAELGYRVSGKKAQLCQEEVTYLGFKIHKGSRSLSNSRTQAILQIPVPKTKRQVREFLGTIGYCRLWIPGFAELAQPLYAATRPGNDPLVWGEKEEEAFQSLKLALTQPPALALPSLDKPFQLFVEETSGAAKGVLTQALGPWKRPVAYLSKRLDPVAAGWPRCLRAIAAAALLTREASKLTFGQDIEITSSHNLESLLRSPPDKWLTNARITQYQVLLLDPPRVRFKQTAALNPATLLPETDDTLPIHHCLDTLDSLTSTRPDLTDQPLAQAEATLFTDGSSYIRDGKRYAGAAVVTLDSVIWAEPLPIGTSAQKAELIALTKALEWSKDKSVNIYTDSRYAFATLHVHGMIYRERGWLTAGGKAIKNAPEILALLTAVWLPKRVAVMHCKGHQKDDAPTSTGNRRADEVAREVAIRPLSTQATISAGKRTADGSEFEKRTADGSEFESPKKKAKVE

SEQ ID NO: 7080 - protein, 2098 aa, synthetic construct
MPAAKRVKLDGGDKKYSIGLDIGTNSVGWAVITDEYKVPSKKFKVLGNTDRHSIKKNLIGALLFDSGETAEATRLKRTARRRYTRRKNRICYLQEIFSNEMAKVDDSFFHRLEESFLVEEDKKHERHPIFGNIVDEVAYHEKYPTIYHLRKKLVDSTDKADLRLIYLALAHMIKFRGHFLIEGDLNPDNSDVDKLFIQLVQTYNQLFEENPINASGVDAKAILSARLSKSRRLENLIAQLPGEKKNGLFGNLIALSLGLTPNFKSNFDLAEDAKLQLSKDTYDDDLDNLLAQIGDQYADLFLAAKNLSDAILLSDILRVNTEITKAPLSASMIKRYDEHHQDLTLLKALVRQQLPEKYKEIFFDQSKNGYAGYIDGGASQEEFYKFIKPILEKMDGTEELLVKLNREDLLRKQRTFDNGSIPHQIHLGELHAILRRQEDFYPFLKDNREKIEKILTFRIPYYVGPLARGNSRFAWMTRKSEETITPWNFEEVVDKGASAQSFIERMTNFDKNLPNEKVLPKHSLLYEYFTVYNELTKVKYVTEGMRKPAFLSGEQKKAIVDLLFKTNRKVTVKQLKEDYFKKIECFDSVEISGVEDRFNASLGTYHDLLKIIKDKDFLDNEENEDILEDIVLTLTLFEDREMIEERLKTYAHLFDDKVMKQLKRRRYTGWGRLSRKLINGIRDKQSGKTILDFLKSDGFANRNFMQLIHDDSLTFKEDIQKAQVSGQGDSLHEHIANLAGSPAIKKGILQTVKVVDELVKVMGRHKPENIVIEMARENQTTQKGQKNSRERMKRIEEGIKELGSQILKEHPVENTQLQNEKLYLYYLQNGRDMYVDQELDINRLSDYDVDHIVPQSFLKDDSIDNKVLTRSDKARGKSDNVPSEEVVKKMKNYWRQLLNAKLITQRKFDNLTKAERGGLSELDKAGFIKRQLVETRQITKHVAQILDSRMNTKYDENDKLIREVKVITLKSKLVSDFRKDFQFYKVREINNYHHAHDAYLNAVVGTALIKKYPKLESEFVYGDYKVYDVRKMIAKSEQEIGKATAKYFFYSNIMNFFKTEITLANGEIRKRPLIETNGETGEIVWDKGRDFATVRKVLSMPQVNIVKKTEVQTGGFSKESILPKRNSDKLIARKKDWDPKKYGGFDSPTVAYSVLVVAKVEKGKSKKLKSVKELLGITIMERSSFEKNPIDFLEAKGYKEVKKDLIIKLPKYSLFELENGRKRMLASAGELQKGNELALPSKYVNFLYLASHYEKLKGSPEDNEQKQLFVEQHKHYLDEIIEQISEFSKRVILADANLDKVLSAYNKHRDKPIREQAENIIHLFTLTNLGAPAAFKYFDTTIDRKRYTSTKEVLDATLIHQSITGLYETRIDLSQLGGDGGGSSEAAAKGGSGGTAPLEEEYRLFLEAPIQNVTLLEQWKREIPKVWAEINPPGLASTQAPIHVQLLSTALPVRVRQYPITLEAKRSLRETIRKFRAAGILRPVHSPWNTPLLPVRKSGTSEYRMVQDLREVNKRVETIHPTVPNPYTLLSLLPPDRIWYSVLDLKDAFFCIPLAPESQLIFAFEWADAEEGESGQLTWTRLPQGFKNSPTLFNEALNRDLQGFRLDHPSVSLLQYVDDLLIAADTQAACLSATRDLLMTLAELGYRVSGKKAQLCQEEVTYLGFKIHKGSRSLSNSRTQAILQIPVPKTKRQVREFLGKIGYCRLFIPGFAELAQPLYAATRPGNDPLVWGEKEEEAFQSLKLALTQPPALALPSLDKPFQLFVEETSGAAKGVLTQALGPWKRPVAYLSKRLDPVAAGWPRCLRAIAAAALLTREASKLTFGQDIEITSSHNLESLLRSPPDKWLTNARITQYQVLLLDPPRVRFKQTAALNPATLLPETDDTLPIHHCLDTLDSLTSTRPDLTDQPLAQAEATLFTDGSSYIRDGKRYAGAAVVTLDSVIWAEPLPIGTSAQKAELIALTKALEWSKDKSVNIYTDSRYAFATLHVHGMIYRERGWLTAGGKAIKNAPEILALLTAVWLPKRVAVMHCKGHQKDDAPTSTGNRRADEVAREVAIRPLSTQATISAGKRTADGSEFEKRTADGSEFESPKKKAKVE

SEQ ID NO: 7081 - protein, 2102 aa, synthetic construct
MPAAKRVKLDGGDKKYSIGLDIGTNSVGWAVITDEYKVPSKKFKVLGNTDRHSIKKNLIGALLFDSGETAEATRLKRTARRRYTRRKNRICYLQEIFSNEMAKVDDSFFHRLEESFLVEEDKKHERHPIFGNIVDEVAYHEKYPTIYHLRKKLVDSTDKADLRLIYLALAHMIKFRGHFLIEGDLNPDNSDVDKLFIQLVQTYNQLFEENPINASGVDAKAILSARLSKSRRLENLIAQLPGEKKNGLFGNLIALSLGLTPNFKSNFDLAEDAKLQLSKDTYDDDLDNLLAQIGDQYADLFLAAKNLSDAILLSDILRVNTEITKAPLSASMIKRYDEHHQDLTLLKALVRQQLPEKYKEIFFDQSKNGYAGYIDGGASQEEFYKFIKPILEKMDGTEELLVKLNREDLLRKQRTFDNGSIPHQIHLGELHAILRRQEDFYPFLKDNREKIEKILTFRIPYYVGPLARGNSRFAWMTRKSEETITPWNFEEVVDKGASAQSFIERMTNFDKNLPNEKVLPKHSLLYEYFTVYNELTKVKYVTEGMRKPAFLSGEQKKAIVDLLFKTNRKVTVKQLKEDYFKKIECFDSVEISGVEDRFNASLGTYHDLLKIIKDKDFLDNEENEDILEDIVLTLTLFEDREMIEERLKTYAHLFDDKVMKQLKRRRYTGWGRLSRKLINGIRDKQSGKTILDFLKSDGFANRNFMQLIHDDSLTFKEDIQKAQVSGQGDSLHEHIANLAGSPAIKKGILQTVKVVDELVKVMGRHKPENIVIEMARENQTTQKGQKNSRERMKRIEEGIKELGSQILKEHPVENTQLQNEKLYLYYLQNGRDMYVDQELDINRLSDYDVDHIVPQSFLKDDSIDNKVLTRSDKARGKSDNVPSEEVVKKMKNYWRQLLNAKLITQRKFDNLTKAERGGLSELDKAGFIKRQLVETRQITKHVAQILDSRMNTKYDENDKLIREVKVITLKSKLVSDFRKDFQFYKVREINNYHHAHDAYLNAVVGTALIKKYPKLESEFVYGDYKVYDVRKMIAKSEQEIGKATAKYFFYSNIMNFFKTEITLANGEIRKRPLIETNGETGEIVWDKGRDFATVRKVLSMPQVNIVKKTEVQTGGFSKESILPKRNSDKLIARKKDWDPKKYGGFDSPTVAYSVLVVAKVEKGKSKKLKSVKELLGITIMERSSFEKNPIDFLEAKGYKEVKKDLIIKLPKYSLFELENGRKRMLASAGELQKGNELALPSKYVNFLYLASHYEKLKGSPEDNEQKQLFVEQHKHYLDEIIEQISEFSKRVILADANLDKVLSAYNKHRDKPIREQAENIIHLFTLTNLGAPAAFKYFDTTIDRKRYTSTKEVLDATLIHQSITGLYETRIDLSQLGGDGGGSSEAAAKGGSGGTVSLQDEHRLFDIPVTTSLPDVWLQDFPQAWAETGGLGRAKCQAPIIIDLKPTAVPVSIKQYPMSLEAHMGIRQHIIKFLELGVLRPCRSPWNTPLLPVKKPGTQDYRPVQDLREINKRTVDIHPTVPNPYNLLSTLKPDYSWYTVLDLKDAFFCLPLAPQSQELFAFEWKDPERGISGQLTWTRLPQGFKNSPTLFNEALHRDLTDFRTQHPEVTLLQYVDDLLLAAPTKKACTQGTRHLLQELGEKGYRASAKKAQICQTKVTYLGYILSEGKRWLTPGRIETVARIPPPRNPREVREFLGTAGFCRLWIPGFAELAAPLYALTKPSTPFTWQTEHQLAFEALKKALLSAPALGLPDTSKPFTLFLDERQGIAKGVLTQKLGPWKRPVAYLSKKLDPVAAGWPPCLRIMAATAMLVKDSAKLTLGQPLTVITPHTLEAIVRQPPDRWITNARLTHYQALLLDTDRVQFGPPVTLNPATLLPVPENQPSPHDCRQVLAETHGTREDLKDQELPDADHTWYTDGSSYLDSGTRRAGAAVVDGHNTIWAQSLPPGTSAQKAELIALTKALELSKGKKANIYTDSRYAFATAHTHGSIYERRGWLTSEGKEIKNKAEIIALLKALFLPQEVAIIHCPGHQKGQDPVAVGNRQADRVARQAAMAEVLTLATEPDNTSHITAGKRTADGSEFEKRTADGSEFESPKKKAKVE

SEQ ID NO: 7082 - protein, 2095 aa, synthetic construct
MPAAKRVKLDGGDKKYSIGLDIGTNSVGWAVITDEYKVPSKKFKVLGNTDRHSIKKNLIGALLFDSGETAEATRLKRTARRRYTRRKNRICYLQEIFSNEMAKVDDSFFHRLEESFLVEEDKKHERHPIFGNIVDEVAYHEKYPTIYHLRKKLVDSTDKADLRLIYLALAHMIKFRGHFLIEGDLNPDNSDVDKLFIQLVQTYNQLFEENPINASGVDAKAILSARLSKSRRLENLIAQLPGEKKNGLFGNLIALSLGLTPNFKSNFDLAEDAKLQLSKDTYDDDLDNLLAQIGDQYADLFLAAKNLSDAILLSDILRVNTEITKAPLSASMIKRYDEHHQDLTLLKALVRQQLPEKYKEIFFDQSKNGYAGYIDGGASQEEFYKFIKPILEKMDGTEELLVKLNREDLLRKQRTFDNGSIPHQIHLGELHAILRRQEDFYPFLKDNREKIEKILTFRIPYYVGPLARGNSRFAWMTRKSEETITPWNFEEVVDKGASAQSFIERMTNFDKNLPNEKVLPKHSLLYEYFTVYNELTKVKYVTEGMRKPAFLSGEQKKAIVDLLFKTNRKVTVKQLKEDYFKKIECFDSVEISGVEDRFNASLGTYHDLLKIIKDKDFLDNEENEDILEDIVLTLTLFEDREMIEERLKTYAHLFDDKVMKQLKRRRYTGWGRLSRKLINGIRDKQSGKTILDFLKSDGFANRNFMQLIHDDSLTFKEDIQKAQVSGQGDSLHEHIANLAGSPAIKKGILQTVKVVDELVKVMGRHKPENIVIEMARENQTTQKGQKNSRERMKRIEEGIKELGSQILKEHPVENTQLQNEKLYLYYLQNGRDMYVDQELDINRLSDYDVDHIVPQSFLKDDSIDNKVLTRSDKARGKSDNVPSEEVVKKMKNYWRQLLNAKLITQRKFDNLTKAERGGLSELDKAGFIKRQLVETRQITKHVAQILDSRMNTKYDENDKLIREVKVITLKSKLVSDFRKDFQFYKVREINNYHHAHDAYLNAVVGTALIKKYPKLESEFVYGDYKVYDVRKMIAKSEQEIGKATAKYFFYSNIMNFFKTEITLANGEIRKRPLIETNGETGEIVWDKGRDFATVRKVLSMPQVNIVKKTEVQTGGFSKESILPKRNSDKLIARKKDWDPKKYGGFDSPTVAYSVLVVAKVEKGKSKKLKSVKELLGITIMERSSFEKNPIDFLEAKGYKEVKKDLIIKLPKYSLFELENGRKRMLASAGELQKGNELALPSKYVNFLYLASHYEKLKGSPEDNEQKQLFVEQHKHYLDEIIEQISEFSKRVILADANLDKVLSAYNKHRDKPIREQAENIIHLFTLTNLGAPAAFKYFDTTIDRKRYTSTKEVLDATLIHQSITGLYETRIDLSQLGGDGGGSSEAAAKGGSGGTLQLEEEYRLFEPESTQKQEMDIWLKNFPQAWAETGGMGTAHCQAPVLIQLKATATPISIRQYPMPHEAYQGIKPHIRRMLDQGILKPCQSPWNTPLLPVKKPGTEDYRPVQDLREVNKRVEDIHPTVPNPYNLLSTLPPSHPWYTVLDLKDAFFCLRLHSESQLLFAFEWRDPEIGLSGQLTWTRLPQGFKNSPTLFNEALHSDLADFRVRYPALVLLQYVDDLLLAAATRTECLEGTKALLETLGNKGYRASAKKAQICLQEVTYLGYSLKDGQRWLTKARKEAILSIPVPKNSRQVREFLGTAGYCRLWIPGFAELAAPLYPLTRPGTLFQWGTEQQLAFEDIKKALLSSPALGLPDITKPFELFIDENSGFAKGVLVQKLGPWKRPVAYLSKKLDTVASGWPPCLRMVAAIAILVKDAGKLTLGQPLTILTSHPVEALVRQPPNKWLSNARMTHYQAMLLDAERVHFGPTVSLNPATLLPLPSGGNHHDCLQILAETHGTRPDLTDQPLPDADLTWYTDGSSFIRNGEREAGAAVTTESEVIWAAPLPPGTSAQRAELIALTQALKMAEGKKLTVYTDSRYAFATTHVHGEIYRRRGWLTSEGKEIKNKNEILALLEALFLPKRLSIIHCPGHQKGDSPQAKGNRLADDTAKKAATETHSSLTVLPAGKRTADGSEFEKRTADGSEFESPKKKAKVE

SEQ ID NO: 7083 - protein, 2176 aa, synthetic construct
MPAAKRVKLDGGDKKYSIGLDIGTNSVGWAVITDEYKVPSKKFKVLGNTDRHSIKKNLIGALLFDSGETAEATRLKRTARRRYTRRKNRICYLQEIFSNEMAKVDDSFFHRLEESFLVEEDKKHERHPIFGNIVDEVAYHEKYPTIYHLRKKLVDSTDKADLRLIYLALAHMIKFRGHFLIEGDLNPDNSDVDKLFIQLVQTYNQLFEENPINASGVDAKAILSARLSKSRRLENLIAQLPGEKKNGLFGNLIALSLGLTPNFKSNFDLAEDAKLQLSKDTYDDDLDNLLAQIGDQYADLFLAAKNLSDAILLSDILRVNTEITKAPLSASMIKRYDEHHQDLTLLKALVRQQLPEKYKEIFFDQSKNGYAGYIDGGASQEEFYKFIKPILEKMDGTEELLVKLNREDLLRKQRTFDNGSIPHQIHLGELHAILRRQEDFYPFLKDNREKIEKILTFRIPYYVGPLARGNSRFAWMTRKSEETITPWNFEEVVDKGASAQSFIERMTNFDKNLPNEKVLPKHSLLYEYFTVYNELTKVKYVTEGMRKPAFLSGEQKKAIVDLLFKTNRKVTVKQLKEDYFKKIECFDSVEISGVEDRFNASLGTYHDLLKIIKDKDFLDNEENEDILEDIVLTLTLFEDREMIEERLKTYAHLFDDKVMKQLKRRRYTGWGRLSRKLINGIRDKQSGKTILDFLKSDGFANRNFMQLIHDDSLTFKEDIQKAQVSGQGDSLHEHIANLAGSPAIKKGILQTVKVVDELVKVMGRHKPENIVIEMARENQTTQKGQKNSRERMKRIEEGIKELGSQILKEHPVENTQLQNEKLYLYYLQNGRDMYVDQELDINRLSDYDVDHIVPQSFLKDDSIDNKVLTRSDKARGKSDNVPSEEVVKKMKNYWRQLLNAKLITQRKFDNLTKAERGGLSELDKAGFIKRQLVETRQITKHVAQILDSRMNTKYDENDKLIREVKVITLKSKLVSDFRKDFQFYKVREINNYHHAHDAYLNAVVGTALIKKYPKLESEFVYGDYKVYDVRKMIAKSEQEIGKATAKYFFYSNIMNFFKTEITLANGEIRKRPLIETNGETGEIVWDKGRDFATVRKVLSMPQVNIVKKTEVQTGGFSKESILPKRNSDKLIARKKDWDPKKYGGFDSPTVAYSVLVVAKVEKGKSKKLKSVKELLGITIMERSSFEKNPIDFLEAKGYKEVKKDLIIKLPKYSLFELENGRKRMLASAGELQKGNELALPSKYVNFLYLASHYEKLKGSPEDNEQKQLFVEQHKHYLDEIIEQISEFSKRVILADANLDKVLSAYNKHRDKPIREQAENIIHLFTLTNLGAPAAFKYFDTTIDRKRYTSTKEVLDATLIHQSITGLYETRIDLSQLGGDGGGSSEAAAKGGSGGMNPLQLLQPLPAEIKGTKLLAHWNSGATITCIPESFLEDEQPIKKTLIKTIHGEKQQNVYYVTFKVKGRKVEAEVIASPYEYILLSPTDVPWLTQQPLQLTILVPLQEYQEKILSKTALPEDQKQQLKTLFVKYDNLWQHWENQVGHRKIRPHNIATGDYPPRPQKQYPINPKAKPSIQIVIDDLLKQGVLTPQNSTMNTPVYPVPKPDGRWRMVLDYREVNKTIPLTAAQNQHSAGILATIVRQKYKTTLDLANGFWAHPITPESYWLTAFTWQGKQYCWTRLPQGFLNSPALFTADVVDLLKEIPNVQVYVDDIYLSHDDPKEHVQQLEKVFQILLQAGYVVSLKKSEIGQKTVEFLGFNITKEGRGLTDTFKTKLLNITPPKDLKQLQSILGLLNFARNFIPNFAELVQPLYNLIASAKGKYIEWSEENTKQLNMVIEALNTASNLEERLPEQRLVIKVNTSPSAGYVRYYNETGKKPIMYLNYVFSKAELKFSMLEKLLTTMHKALIKAMDLAMGQEILVYSPIVSMTKIQKTPLPERKALPIRWITWMTYLEDPRIQFHYDKTLPELKHIPDVYTSSQSPVKHPSQYEGVFYTDGSAIKSPDPTKSNNAGMGIVHATYKPEYQVLNQWSIPLGNHTAQMAEIAAVEFACKKALKIPGPVLVITDSFYVAESANKELPYWKSNGFVNNKKKPLKHISKWKSIAECLSMKPDITIQHEKGISLQIPVFILKGNALADKLATQGSYVVNAGKRTADGSEFEKRTADGSEFESPKKKAKVE

SEQ ID NO: 7084 - protein, 2218 aa, synthetic construct
MPAAKRVKLDGGDKKYSIGLDIGTNSVGWAVITDEYKVPSKKFKVLGNTDRHSIKKNLIGALLFDSGETAEATRLKRTARRRYTRRKNRICYLQEIFSNEMAKVDDSFFHRLEESFLVEEDKKHERHPIFGNIVDEVAYHEKYPTIYHLRKKLVDSTDKADLRLIYLALAHMIKFRGHFLIEGDLNPDNSDVDKLFIQLVQTYNQLFEENPINASGVDAKAILSARLSKSRRLENLIAQLPGEKKNGLFGNLIALSLGLTPNFKSNFDLAEDAKLQLSKDTYDDDLDNLLAQIGDQYADLFLAAKNLSDAILLSDILRVNTEITKAPLSASMIKRYDEHHQDLTLLKALVRQQLPEKYKEIFFDQSKNGYAGYIDGGASQEEFYKFIKPILEKMDGTEELLVKLNREDLLRKQRTFDNGSIPHQIHLGELHAILRRQEDFYPFLKDNREKIEKILTFRIPYYVGPLARGNSRFAWMTRKSEETITPWNFEEVVDKGASAQSFIERMTNFDKNLPNEKVLPKHSLLYEYFTVYNELTKVKYVTEGMRKPAFLSGEQKKAIVDLLFKTNRKVTVKQLKEDYFKKIECFDSVEISGVEDRFNASLGTYHDLLKIIKDKDFLDNEENEDILEDIVLTLTLFEDREMIEERLKTYAHLFDDKVMKQLKRRRYTGWGRLSRKLINGIRDKQSGKTILDFLKSDGFANRNFMQLIHDDSLTFKEDIQKAQVSGQGDSLHEHIANLAGSPAIKKGILQTVKVVDELVKVMGRHKPENIVIEMARENQTTQKGQKNSRERMKRIEEGIKELGSQILKEHPVENTQLQNEKLYLYYLQNGRDMYVDQELDINRLSDYDVDHIVPQSFLKDDSIDNKVLTRSDKARGKSDNVPSEEVVKKMKNYWRQLLNAKLITQRKFDNLTKAERGGLSELDKAGFIKRQLVETRQITKHVAQILDSRMNTKYDENDKLIREVKVITLKSKLVSDFRKDFQFYKVREINNYHHAHDAYLNAVVGTALIKKYPKLESEFVYGDYKVYDVRKMIAKSEQEIGKATAKYFFYSNIMNFFKTEITLANGEIRKRPLIETNGETGEIVWDKGRDFATVRKVLSMPQVNIVKKTEVQTGGFSKESILPKRNSDKLIARKKDWDPKKYGGFDSPTVAYSVLVVAKVEKGKSKKLKSVKELLGITIMERSSFEKNPIDFLEAKGYKEVKKDLIIKLPKYSLFELENGRKRMLASAGELQKGNELALPSKYVNFLYLASHYEKLKGSPEDNEQKQLFVEQHKHYLDEIIEQISEFSKRVILADANLDKVLSAYNKHRDKPIREQAENIIHLFTLTNLGAPAAFKYFDTTIDRKRYTSTKEVLDATLIHQSITGLYETRIDLSQLGGDGGGSSEAAAKGGSGGTLGDQGSRGSDPLPEPRVTLTVEGIPTEFLVNTGAEHSVLTKPMGKMGSKRTVVAGATGSKVYPWTTKRLLKIGQKQVTHSFLVIPECPAPLLGRDLLTKLKAQIQFSTEGPQVTWEDRPAMCLVLNLEEEYRLHEKPVPPSIDPSWLQLFPMVWAEKAGMGLANQVPPVVVELKSDASPVAVRQYPMSKEAREGIRPHIQRFLDLGILVPCQSPWNTPLLPVKKPGTNDYRPVQDLREVNKRVQDIHPTVPNPYNLLSSLPPSHTWYSVLDLKDAFFCLKLHPNSQPLFAFEWRDPEKGNTGQLTWTRLPQGFKNSPTLFNEALHRDLASFRALNPQVVMLQYVDDLLVAAPTYRDCKEGTRRLLQELSKLGYRVSAKKAQLCREEVTYLGYLLKGGKRWLTPARKATVMKIPTPTTPRQVREFLGTAGFCRLWIPGFASLAAPLYPLTRPKVPFTWTEAHQEAFGRIKEALLSAPALALPDLTKPFALYVDEKEGVARGVLTQTLGPWRRPVAYLSKKLDPVASGWPTCLKAIAAVALLLKDADKLTLGQNVLVIAPHNLESIVRQPPDRWMTNARMTHYQSLLLNERVSFAPPAILNPATLLPVESDDTPIHICSEILAEETGTRPDLRDQPLPGVPAWYTDGSSFIMDGRRQAGAAIVDNKRTVWASNLPEGTSAQKAELIALTQALRLAEGKSINIYTDSRYAFATAHVHGAIYKQRGWLTSAGKDIKNKEEILALLEAIHLPKRVAIIHCPGHQRGTDPVATGNRKADEAAKQAAQSTRILTETTKNAGKRTADGSEFEKRTADGSEFESPKKKAKVE

SEQ ID NO: 7085 - protein, 2096 aa, synthetic construct
MPAAKRVKLDGGDKKYSIGLDIGTNSVGWAVITDEYKVPSKKFKVLGNTDRHSIKKNLIGALLFDSGETAEATRLKRTARRRYTRRKNRICYLQEIFSNEMAKVDDSFFHRLEESFLVEEDKKHERHPIFGNIVDEVAYHEKYPTIYHLRKKLVDSTDKADLRLIYLALAHMIKFRGHFLIEGDLNPDNSDVDKLFIQLVQTYNQLFEENPINASGVDAKAILSARLSKSRRLENLIAQLPGEKKNGLFGNLIALSLGLTPNFKSNFDLAEDAKLQLSKDTYDDDLDNLLAQIGDQYADLFLAAKNLSDAILLSDILRVNTEITKAPLSASMIKRYDEHHQDLTLLKALVRQQLPEKYKEIFFDQSKNGYAGYIDGGASQEEFYKFIKPILEKMDGTEELLVKLNREDLLRKQRTFDNGSIPHQIHLGELHAILRRQEDFYPFLKDNREKIEKILTFRIPYYVGPLARGNSRFAWMTRKSEETITPWNFEEVVDKGASAQSFIERMTNFDKNLPNEKVLPKHSLLYEYFTVYNELTKVKYVTEGMRKPAFLSGEQKKAIVDLLFKTNRKVTVKQLKEDYFKKIECFDSVEISGVEDRFNASLGTYHDLLKIIKDKDFLDNEENEDILEDIVLTLTLFEDREMIEERLKTYAHLFDDKVMKQLKRRRYTGWGRLSRKLINGIRDKQSGKTILDFLKSDGFANRNFMQLIHDDSLTFKEDIQKAQVSGQGDSLHEHIANLAGSPAIKKGILQTVKVVDELVKVMGRHKPENIVIEMARENQTTQKGQKNSRERMKRIEEGIKELGSQILKEHPVENTQLQNEKLYLYYLQNGRDMYVDQELDINRLSDYDVDHIVPQSFLKDDSIDNKVLTRSDKARGKSDNVPSEEVVKKMKNYWRQLLNAKLITQRKFDNLTKAERGGLSELDKAGFIKRQLVETRQITKHVAQILDSRMNTKYDENDKLIREVKVITLKSKLVSDFRKDFQFYKVREINNYHHAHDAYLNAVVGTALIKKYPKLESEFVYGDYKVYDVRKMIAKSEQEIGKATAKYFFYSNIMNFFKTEITLANGEIRKRPLIETNGETGEIVWDKGRDFATVRKVLSMPQVNIVKKTEVQTGGFSKESILPKRNSDKLIARKKDWDPKKYGGFDSPTVAYSVLVVAKVEKGKSKKLKSVKELLGITIMERSSFEKNPIDFLEAKGYKEVKKDLIIKLPKYSLFELENGRKRMLASAGELQKGNELALPSKYVNFLYLASHYEKLKGSPEDNEQKQLFVEQHKHYLDEIIEQISEFSKRVILADANLDKVLSAYNKHRDKPIREQAENIIHLFTLTNLGAPAAFKYFDTTIDRKRYTSTKEVLDATLIHQSITGLYETRIDLSQLGGDGGGSSEAAAKGGSGGTLNLEDEYRLYETSAEPEVSPGSTWLSDFPQAWAETGGMGLAVRQAPLIIPLKATSTPVSIKQYPMSQEAKLGIKPHIQRLLDQGILVPCQSPWNTPLLPVKKPGTNDYRPVQDLREVNKRVEDIHPTVPNPYNLLSGLPPSHRWYTVLDLKDAFFCLRLHPTSQPLFAFEWRDPGMGISGQLTWTRLPQGFKNSPTLFNEALHRDLADFRIQHPDLILLQYVDDILLAATSELDCQQGTRALLLTLGNLGYRASAKKAQLCQKQVKYLGYLLKEGQRWLTEARKETVMGQPTPKTPRQLREFLGTAGFCRLWIPGFAEMAAPLYPLTKPGTLFNWGPDQQKAYQEIKQALLTAPALGLPDLTKPFELFVDEKQGYAKGVLTQKLGPWRRPVAYLSKKLDPVAAGWPPCLRMVAAIAVLRKDAGKLTMGQPLVILAPHAVEALVKQPPDRWLSNARMTHYQAMLLDTDRVQFGPVVALNPATLLPLPEEGAPHDCLEILAETHGTRPDLTDQPIPDADHTWYTDGSSFLQEGQRKAGAAVTTETEVIWARALPAGTSAQRAELIALTQALKMAEGKRLNVYTDSRYAFATAHIHGEIYRRRGWLTSEGREIKNKSEILALLKALFLPKRLSIIHCLGHQKGDSAEARGNRLADQAAREAAIKTPPDTSTLLAGKRTADGSEFEKRTADGSEFESPKKKAKVE

SEQ ID NO: 7086 - protein, 2096 aa, synthetic construct
MPAAKRVKLDGGDKKYSIGLDIGTNSVGWAVITDEYKVPSKKFKVLGNTDRHSIKKNLIGALLFDSGETAEATRLKRTARRRYTRRKNRICYLQEIFSNEMAKVDDSFFHRLEESFLVEEDKKHERHPIFGNIVDEVAYHEKYPTIYHLRKKLVDSTDKADLRLIYLALAHMIKFRGHFLIEGDLNPDNSDVDKLFIQLVQTYNQLFEENPINASGVDAKAILSARLSKSRRLENLIAQLPGEKKNGLFGNLIALSLGLTPNFKSNFDLAEDAKLQLSKDTYDDDLDNLLAQIGDQYADLFLAAKNLSDAILLSDILRVNTEITKAPLSASMIKRYDEHHQDLTLLKALVRQQLPEKYKEIFFDQSKNGYAGYIDGGASQEEFYKFIKPILEKMDGTEELLVKLNREDLLRKQRTFDNGSIPHQIHLGELHAILRRQEDFYPFLKDNREKIEKILTFRIPYYVGPLARGNSRFAWMTRKSEETITPWNFEEVVDKGASAQSFIERMTNFDKNLPNEKVLPKHSLLYEYFTVYNELTKVKYVTEGMRKPAFLSGEQKKAIVDLLFKTNRKVTVKQLKEDYFKKIECFDSVEISGVEDRFNASLGTYHDLLKIIKDKDFLDNEENEDILEDIVLTLTLFEDREMIEERLKTYAHLFDDKVMKQLKRRRYTGWGRLSRKLINGIRDKQSGKTILDFLKSDGFANRNFMQLIHDDSLTFKEDIQKAQVSGQGDSLHEHIANLAGSPAIKKGILQTVKVVDELVKVMGRHKPENIVIEMARENQTTQKGQKNSRERMKRIEEGIKELGSQILKEHPVENTQLQNEKLYLYYLQNGRDMYVDQELDINRLSDYDVDHIVPQSFLKDDSIDNKVLTRSDKARGKSDNVPSEEVVKKMKNYWRQLLNAKLITQRKFDNLTKAERGGLSELDKAGFIKRQLVETRQITKHVAQILDSRMNTKYDENDKLIREVKVITLKSKLVSDFRKDFQFYKVREINNYHHAHDAYLNAVVGTALIKKYPKLESEFVYGDYKVYDVRKMIAKSEQEIGKATAKYFFYSNIMNFFKTEITLANGEIRKRPLIETNGETGEIVWDKGRDFATVRKVLSMPQVNIVKKTEVQTGGFSKESILPKRNSDKLIARKKDWDPKKYGGFDSPTVAYSVLVVAKVEKGKSKKLKSVKELLGITIMERSSFEKNPIDFLEAKGYKEVKKDLIIKLPKYSLFELENGRKRMLASAGELQKGNELALPSKYVNFLYLASHYEKLKGSPEDNEQKQLFVEQHKHYLDEIIEQISEFSKRVILADANLDKVLSAYNKHRDKPIREQAENIIHLFTLTNLGAPAAFKYFDTTIDRKRYTSTKEVLDATLIHQSITGLYETRIDLSQLGGDGGGSSEAAAKGGSGGTLGIEDEYRLHETSTEPDVSLGSTWLSDFPQAWAETGGMGLAVRQAPLIIPLKATSTPVSIQQYPMSHEARLGIKPHIQRLLDQGILVPCQSPWNTPLLPVKKPGTNDYRPVQDLREVNKRVEDIHPTVPNPYNLLSGLPPSHQWYTVLDLKDAFFCLRLHPTSQPLFAFEWRDPGMGISGQLTWTRLPQGFKNSPTLFNEALHRDLADFRIQHPDLILLQYVDDILLAATSELDCQQGTRALLQTLGDLGYRASAKKAQICQKQVKYLGYLLREGQRWLTEARKETVMGQPVPKTPRQLREFLGTAGFCRLWIPGFAEMAAPLYPLTKPGTLFSWGPDQQKAYQEIKQALLTAPALGLPDLTKPFELFVDEKQGYAKGVLTQKLGPWRRPVAYLSKKLDPVAAGWPPCLRMVAAIAVLTKDAGKLTMGQPLVILAPHAVEALVKQPPDRWLSNARMTHYQAMLLDTDRVQFGPVVALNPATLLPLPEEGAPHDCLEILAETHGTRPDLTDQPIPDADHTWYTDGSSFLQEGQRKAGAAVTTETEVIWAGALPAGTSAQRAELIALTQALKMAEGKRLNVYTDSRYAFATAHIHGEIYRRRGWLTSEGREIKNKSEILALLKALFLPKRLSIIHCLGHQKGDSAEARGNRLADQAAREAAIKTPPDTSTLLAGKRTADGSEFEKRTADGSEFESPKKKAKVE

SEQ ID NO: 7087 - protein, 2096 aa, synthetic construct
MPAAKRVKLDGGDKKYSIGLDIGTNSVGWAVITDEYKVPSKKFKVLGNTDRHSIKKNLIGALLFDSGETAEATRLKRTARRRYTRRKNRICYLQEIFSNEMAKVDDSFFHRLEESFLVEEDKKHERHPIFGNIVDEVAYHEKYPTIYHLRKKLVDSTDKADLRLIYLALAHMIKFRGHFLIEGDLNPDNSDVDKLFIQLVQTYNQLFEENPINASGVDAKAILSARLSKSRRLENLIAQLPGEKKNGLFGNLIALSLGLTPNFKSNFDLAEDAKLQLSKDTYDDDLDNLLAQIGDQYADLFLAAKNLSDAILLSDILRVNTEITKAPLSASMIKRYDEHHQDLTLLKALVRQQLPEKYKEIFFDQSKNGYAGYIDGGASQEEFYKFIKPILEKMDGTEELLVKLNREDLLRKQRTFDNGSIPHQIHLGELHAILRRQEDFYPFLKDNREKIEKILTFRIPYYVGPLARGNSRFAWMTRKSEETITPWNFEEVVDKGASAQSFIERMTNFDKNLPNEKVLPKHSLLYEYFTVYNELTKVKYVTEGMRKPAFLSGEQKKAIVDLLFKTNRKVTVKQLKEDYFKKIECFDSVEISGVEDRFNASLGTYHDLLKIIKDKDFLDNEENEDILEDIVLTLTLFEDREMIEERLKTYAHLFDDKVMKQLKRRRYTGWGRLSRKLINGIRDKQSGKTILDFLKSDGFANRNFMQLIHDDSLTFKEDIQKAQVSGQGDSLHEHIANLAGSPAIKKGILQTVKVVDELVKVMGRHKPENIVIEMARENQTTQKGQKNSRERMKRIEEGIKELGSQILKEHPVENTQLQNEKLYLYYLQNGRDMYVDQELDINRLSDYDVDHIVPQSFLKDDSIDNKVLTRSDKARGKSDNVPSEEVVKKMKNYWRQLLNAKLITQRKFDNLTKAERGGLSELDKAGFIKRQLVETRQITKHVAQILDSRMNTKYDENDKLIREVKVITLKSKLVSDFRKDFQFYKVREINNYHHAHDAYLNAVVGTALIKKYPKLESEFVYGDYKVYDVRKMIAKSEQEIGKATAKYFFYSNIMNFFKTEITLANGEIRKRPLIETNGETGEIVWDKGRDFATVRKVLSMPQVNIVKKTEVQTGGFSKESILPKRNSDKLIARKKDWDPKKYGGFDSPTVAYSVLVVAKVEKGKSKKLKSVKELLGITIMERSSFEKNPIDFLEAKGYKEVKKDLIIKLPKYSLFELENGRKRMLASAGELQKGNELALPSKYVNFLYLASHYEKLKGSPEDNEQKQLFVEQHKHYLDEIIEQISEFSKRVILADANLDKVLSAYNKHRDKPIREQAENIIHLFTLTNLGAPAAFKYFDTTIDRKRYTSTKEVLDATLIHQSITGLYETRIDLSQLGGDGGGSSEAAAKGGSGGTLNIEDEYRLHETSKGPDVPLGSTWLSDFPQAWAETGGMGLAVRQAPLIIPLKATSTPVSIKQYPMSQEARLGIKPHIQRLLDQGILVPCQSPWNTPLLPVKKPGTNDYRPVQDLREVNKRVEDIHPTVPNPYNLLSGLPPSHQWYTVLDLKDAFFCLRLHPTSQSLFAFEWRDPEMGISGQLTWTRLPQGFKNSPTLFNEALHRDLADFRIQHPDLILLQYVDDLLLAATSELDCQQGTRALLQTLGDLGYRASAKKAQICQKQVKYLGYLLKEGQRWLTEARKETVMGQPTPKTPRQLREFLGTAGFCRLWIPGFAEMAAPLYPLTKPGTLFEWGPDQQKAYQEIKQALLTAPALGLPDLTKPFELFVDEKQGYAKGVLTQKLGPWRRPVAYLSKKLDPVAAGWPPCLRMVAAIAVLTKDAGKLTMGQPLVILAPHAVEALVKQPPDRWLSNARMTHYQALLLDTDRVQFGPIVALNPATLLPLPEEGLQHDCLDILAEAHGTRPDLTDQPLPDADHTWYTDGSSFLQEGQRKAGAAVTTETEVVWAKALPAGTSAQRAELIALTQALKMAEGKKLNVYTDSRYAFATAHIHGEIYRRRGWLTSEGKEIKNKDEILALLKALFLPKRLSIIHCPGHQKGNRAEARGNRMADQAAREVATRETPETSTLLAGKRTADGSEFEKRTADGSEFESPKKKAKVE

SEQ ID NO: 7088 - protein, 2096 aa, synthetic construct
MPAAKRVKLDGGDKKYSIGLDIGTNSVGWAVITDEYKVPSKKFKVLGNTDRHSIKKNLIGALLFDSGETAEATRLKRTARRRYTRRKNRICYLQEIFSNEMAKVDDSFFHRLEESFLVEEDKKHERHPIFGNIVDEVAYHEKYPTIYHLRKKLVDSTDKADLRLIYLALAHMIKFRGHFLIEGDLNPDNSDVDKLFIQLVQTYNQLFEENPINASGVDAKAILSARLSKSRRLENLIAQLPGEKKNGLFGNLIALSLGLTPNFKSNFDLAEDAKLQLSKDTYDDDLDNLLAQIGDQYADLFLAAKNLSDAILLSDILRVNTEITKAPLSASMIKRYDEHHQDLTLLKALVRQQLPEKYKEIFFDQSKNGYAGYIDGGASQEEFYKFIKPILEKMDGTEELLVKLNREDLLRKQRTFDNGSIPHQIHLGELHAILRRQEDFYPFLKDNREKIEKILTFRIPYYVGPLARGNSRFAWMTRKSEETITPWNFEEVVDKGASAQSFIERMTNFDKNLPNEKVLPKHSLLYEYFTVYNELTKVKYVTEGMRKPAFLSGEQKKAIVDLLFKTNRKVTVKQLKEDYFKKIECFDSVEISGVEDRFNASLGTYHDLLKIIKDKDFLDNEENEDILEDIVLTLTLFEDREMIEERLKTYAHLFDDKVMKQLKRRRYTGWGRLSRKLINGIRDKQSGKTILDFLKSDGFANRNFMQLIHDDSLTFKEDIQKAQVSGQGDSLHEHIANLAGSPAIKKGILQTVKVVDELVKVMGRHKPENIVIEMARENQTTQKGQKNSRERMKRIEEGIKELGSQILKEHPVENTQLQNEKLYLYYLQNGRDMYVDQELDINRLSDYDVDHIVPQSFLKDDSIDNKVLTRSDKARGKSDNVPSEEVVKKMKNYWRQLLNAKLITQRKFDNLTKAERGGLSELDKAGFIKRQLVETRQITKHVAQILDSRMNTKYDENDKLIREVKVITLKSKLVSDFRKDFQFYKVREINNYHHAHDAYLNAVVGTALIKKYPKLESEFVYGDYKVYDVRKMIAKSEQEIGKATAKYFFYSNIMNFFKTEITLANGEIRKRPLIETNGETGEIVWDKGRDFATVRKVLSMPQVNIVKKTEVQTGGFSKESILPKRNSDKLIARKKDWDPKKYGGFDSPTVAYSVLVVAKVEKGKSKKLKSVKELLGITIMERSSFEKNPIDFLEAKGYKEVKKDLIIKLPKYSLFELENGRKRMLASAGELQKGNELALPSKYVNFLYLASHYEKLKGSPEDNEQKQLFVEQHKHYLDEIIEQISEFSKRVILADANLDKVLSAYNKHRDKPIREQAENIIHLFTLTNLGAPAAFKYFDTTIDRKRYTSTKEVLDATLIHQSITGLYETRIDLSQLGGDGGGSSEAAAKGGSGGTLNIEDEHRLHETSKEPDVSLGSTWLSDFPQAWAETGGMGLAVRQAPLIIPLKATSTPVSIKQYPMSQEARLGIKPHIQRLLDQGILVPCQSPWNTPLLPVKKPGTNDYRPVQDLREVNKRVEDIHPTVPNPYNLLSGLPPSHQWYTVLDLKDAFFCLRLHPTSQPLFAFEWRDPEMGISGQLTWTRLPQGFKNSPTLFDEALHRDLADFRIQHPDLILLQYVDDLLLAATSELDCQQGTRALLQTLGNLGYRASAKKAQICQKQVKYLGYLLKEGQRWLTEARKETVMGQPTPKTPRQLREFLGTAGFCRLWIPGFAEMAAPLYPLTKTGTLFNWGPDQQKAYQEIKQALLTAPALGLPDLTKPFELFVDEKQGYAKGVLTQKLGPWRRPVAYLSKKLDPVAAGWPPCLRMVAAIAVLTKDAGKLTMGQPLVILAPHAVEALVKQPPDRWLSNARMTHYQALLLDTDRVQFGPVVALNPATLLPLPEEGLQHNCLDILAEAHGTRPDLTDQPLPDADHTWYTDGSSLLQEGQRKAGAAVTTETEVIWAKALPAGTSAQRAELIALTQALKMAEGKKLNVYTDSRYAFATAHIHGEIYRRRGLLTSEGKEIKNKDEILALLKALFLPKRLSIIHCPGHQKGHSAEARGNRMADQAARKAAITETPDTSTLLAGKRTADGSEFEKRTADGSEFESPKKKAKVE

SEQ ID NO: 7089 - protein, 2096 aa, synthetic construct
MPAAKRVKLDGGDKKYSIGLDIGTNSVGWAVITDEYKVPSKKFKVLGNTDRHSIKKNLIGALLFDSGETAEATRLKRTARRRYTRRKNRICYLQEIFSNEMAKVDDSFFHRLEESFLVEEDKKHERHPIFGNIVDEVAYHEKYPTIYHLRKKLVDSTDKADLRLIYLALAHMIKFRGHFLIEGDLNPDNSDVDKLFIQLVQTYNQLFEENPINASGVDAKAILSARLSKSRRLENLIAQLPGEKKNGLFGNLIALSLGLTPNFKSNFDLAEDAKLQLSKDTYDDDLDNLLAQIGDQYADLFLAAKNLSDAILLSDILRVNTEITKAPLSASMIKRYDEHHQDLTLLKALVRQQLPEKYKEIFFDQSKNGYAGYIDGGASQEEFYKFIKPILEKMDGTEELLVKLNREDLLRKQRTFDNGSIPHQIHLGELHAILRRQEDFYPFLKDNREKIEKILTFRIPYYVGPLARGNSRFAWMTRKSEETITPWNFEEVVDKGASAQSFIERMTNFDKNLPNEKVLPKHSLLYEYFTVYNELTKVKYVTEGMRKPAFLSGEQKKAIVDLLFKTNRKVTVKQLKEDYFKKIECFDSVEISGVEDRFNASLGTYHDLLKIIKDKDFLDNEENEDILEDIVLTLTLFEDREMIEERLKTYAHLFDDKVMKQLKRRRYTGWGRLSRKLINGIRDKQSGKTILDFLKSDGFANRNFMQLIHDDSLTFKEDIQKAQVSGQGDSLHEHIANLAGSPAIKKGILQTVKVVDELVKVMGRHKPENIVIEMARENQTTQKGQKNSRERMKRIEEGIKELGSQILKEHPVENTQLQNEKLYLYYLQNGRDMYVDQELDINRLSDYDVDHIVPQSFLKDDSIDNKVLTRSDKARGKSDNVPSEEVVKKMKNYWRQLLNAKLITQRKFDNLTKAERGGLSELDKAGFIKRQLVETRQITKHVAQILDSRMNTKYDENDKLIREVKVITLKSKLVSDFRKDFQFYKVREINNYHHAHDAYLNAVVGTALIKKYPKLESEFVYGDYKVYDVRKMIAKSEQEIGKATAKYFFYSNIMNFFKTEITLANGEIRKRPLIETNGETGEIVWDKGRDFATVRKVLSMPQVNIVKKTEVQTGGFSKESILPKRNSDKLIARKKDWDPKKYGGFDSPTVAYSVLVVAKVEKGKSKKLKSVKELLGITIMERSSFEKNPIDFLEAKGYKEVKKDLIIKLPKYSLFELENGRKRMLASAGELQKGNELALPSKYVNFLYLASHYEKLKGSPEDNEQKQLFVEQHKHYLDEIIEQISEFSKRVILADANLDKVLSAYNKHRDKPIREQAENIIHLFTLTNLGAPAAFKYFDTTIDRKRYTSTKEVLDATLIHQSITGLYETRIDLSQLGGDGGGSSEAAAKGGSGGTLNIEDEHRLHETSKEPDVSLGSTWLSDFPQAWAETGGMGLAVRQAPLIIPLKATSTPVSIKQYPMSQEARLGIKPHIQRLLDQGILVPCQSPWNTPLLPVKKPGTNDYRPVQDLREVNKRVEDIHPTVPNPYNLLSGLPPSHQWYTVLDLKDAFFCLRLHPTSQPLFAFEWRDPEMGISGQLTWTRLPQGFKNSPTLFNEALHRDLADFRIQHPDLILLQYVDDLLLAATSELDCQQGTRALLQTLGNLGYRASAKKAQICQKQVKYLGYLLKEGQRWLTEARKETVMGQPTPKTPRQLREFLGTAGFCRLWIPGFAEMAAPLYPLTKPGTLFNWGPDQQKAYQEIKQALLTAPALGLPDLTKPFELFVDEKQGYAKGVLTQKLGPWRRPVAYLSKKLDPVAAGWPPCLRMVAAIAVLTKDAGKLTMGQPLVILAPHAVEALVKQPPDRWLSNARMTHYQALLLDTDRVQFGPVVALNPATLLPLPEEGLQHNCLDILAEAHGTRPDLTDQPLPDADHTWYTDGSSLLQEGQRKAGAAVTTETEVIWAKALPAGTSAQRAELIALTQALKMAEGKKLNVYTDSRYAFATAHIHGEIYRRRGWLTSEGKEIKNKDEILALLKALFLPKRLSIIHCPGHQKGHSAEARGNRMADQAARKAAITETPDTSTLLAGKRTADGSEFEKRTADGSEFESPKKKAKVE

SEQ ID NO: 7090 - protein, 2087 aa, synthetic construct
MPAAKRVKLDGGDKKYSIGLDIGTNSVGWAVITDEYKVPSKKFKVLGNTDRHSIKKNLIGALLFDSGETAEATRLKRTARRRYTRRKNRICYLQEIFSNEMAKVDDSFFHRLEESFLVEEDKKHERHPIFGNIVDEVAYHEKYPTIYHLRKKLVDSTDKADLRLIYLALAHMIKFRGHFLIEGDLNPDNSDVDKLFIQLVQTYNQLFEENPINASGVDAKAILSARLSKSRRLENLIAQLPGEKKNGLFGNLIALSLGLTPNFKSNFDLAEDAKLQLSKDTYDDDLDNLLAQIGDQYADLFLAAKNLSDAILLSDILRVNTEITKAPLSASMIKRYDEHHQDLTLLKALVRQQLPEKYKEIFFDQSKNGYAGYIDGGASQEEFYKFIKPILEKMDGTEELLVKLNREDLLRKQRTFDNGSIPHQIHLGELHAILRRQEDFYPFLKDNREKIEKILTFRIPYYVGPLARGNSRFAWMTRKSEETITPWNFEEVVDKGASAQSFIERMTNFDKNLPNEKVLPKHSLLYEYFTVYNELTKVKYVTEGMRKPAFLSGEQKKAIVDLLFKTNRKVTVKQLKEDYFKKIECFDSVEISGVEDRFNASLGTYHDLLKIIKDKDFLDNEENEDILEDIVLTLTLFEDREMIEERLKTYAHLFDDKVMKQLKRRRYTGWGRLSRKLINGIRDKQSGKTILDFLKSDGFANRNFMQLIHDDSLTFKEDIQKAQVSGQGDSLHEHIANLAGSPAIKKGILQTVKVVDELVKVMGRHKPENIVIEMARENQTTQKGQKNSRERMKRIEEGIKELGSQILKEHPVENTQLQNEKLYLYYLQNGRDMYVDQELDINRLSDYDVDHIVPQSFLKDDSIDNKVLTRSDKARGKSDNVPSEEVVKKMKNYWRQLLNAKLITQRKFDNLTKAERGGLSELDKAGFIKRQLVETRQITKHVAQILDSRMNTKYDENDKLIREVKVITLKSKLVSDFRKDFQFYKVREINNYHHAHDAYLNAVVGTALIKKYPKLESEFVYGDYKVYDVRKMIAKSEQEIGKATAKYFFYSNIMNFFKTEITLANGEIRKRPLIETNGETGEIVWDKGRDFATVRKVLSMPQVNIVKKTEVQTGGFSKESILPKRNSDKLIARKKDWDPKKYGGFDSPTVAYSVLVVAKVEKGKSKKLKSVKELLGITIMERSSFEKNPIDFLEAKGYKEVKKDLIIKLPKYSLFELENGRKRMLASAGELQKGNELALPSKYVNFLYLASHYEKLKGSPEDNEQKQLFVEQHKHYLDEIIEQISEFSKRVILADANLDKVLSAYNKHRDKPIREQAENIIHLFTLTNLGAPAAFKYFDTTIDRKRYTSTKEVLDATLIHQSITGLYETRIDLSQLGGDGGGSSEAAAKGGSGGVPWLMKKPLQLTVLVPLHEYQERLLQQTALPKEQKELLQKLFLKYDALWQHWENQVGHRRIKPHNIATGTLAPRPQKQYPINPKAKPSIQIVIDDLLKQGVLIQQNSTMNTPVYPVPKPDGKWRMVLDYREVNKTIPLIAAQNQHSAGILSSIYRGKYKTTLDLTNGFWAHPITPESYWLTAFTWQGKQYCWTRLPQGFLNSPALFTADVVDLLKEIPNVQAYVDDIYISHDDPQEHLEQLEKIFSILLNAGYVVSLKKSEIAQREVEFLGFNITKEGRGLTDTFKQKLLNITPPKDLKQLQSILGLLNFARNFIPNYSELVKPLYTIVANANGKFISWTEDNSNQLQHIISVLNQADNLEERNPETRLIIKVNSSPSAGYIRYYNEGSKRPIMYVNYIFSKAEAKFTQTEKLLTTMHKGLIKAMDLAMGQEILVYSPIVSMTKIQRTPLPERKALPVRWITWMTYLEDPRIQFHYDKSLPELQQIPNVTEDVIAKTKHPSEFAMVFYTDGSAIKHPDVNKSHSAGMGIAQVQFIPEYKIVHQWSIPLGDHTAQLAEIAAVEFACKKALKISGPVLIVTDSFYVAESANKELPYWKSNGFLNNKKKPLRHVSKWKSIAECLQLKPDIIIMHEKGHQQPMTTLHTEGNNLADKLATQGSYVVHAGKRTADGSEFEKRTADGSEFESPKKKAKVE

SEQ ID NO: 7091 - protein, 2087 aa, synthetic construct
MPAAKRVKLDGGDKKYSIGLDIGTNSVGWAVITDEYKVPSKKFKVLGNTDRHSIKKNLIGALLFDSGETAEATRLKRTARRRYTRRKNRICYLQEIFSNEMAKVDDSFFHRLEESFLVEEDKKHERHPIFGNIVDEVAYHEKYPTIYHLRKKLVDSTDKADLRLIYLALAHMIKFRGHFLIEGDLNPDNSDVDKLFIQLVQTYNQLFEENPINASGVDAKAILSARLSKSRRLENLIAQLPGEKKNGLFGNLIALSLGLTPNFKSNFDLAEDAKLQLSKDTYDDDLDNLLAQIGDQYADLFLAAKNLSDAILLSDILRVNTEITKAPLSASMIKRYDEHHQDLTLLKALVRQQLPEKYKEIFFDQSKNGYAGYIDGGASQEEFYKFIKPILEKMDGTEELLVKLNREDLLRKQRTFDNGSIPHQIHLGELHAILRRQEDFYPFLKDNREKIEKILTFRIPYYVGPLARGNSRFAWMTRKSEETITPWNFEEVVDKGASAQSFIERMTNFDKNLPNEKVLPKHSLLYEYFTVYNELTKVKYVTEGMRKPAFLSGEQKKAIVDLLFKTNRKVTVKQLKEDYFKKIECFDSVEISGVEDRFNASLGTYHDLLKIIKDKDFLDNEENEDILEDIVLTLTLFEDREMIEERLKTYAHLFDDKVMKQLKRRRYTGWGRLSRKLINGIRDKQSGKTILDFLKSDGFANRNFMQLIHDDSLTFKEDIQKAQVSGQGDSLHEHIANLAGSPAIKKGILQTVKVVDELVKVMGRHKPENIVIEMARENQTTQKGQKNSRERMKRIEEGIKELGSQILKEHPVENTQLQNEKLYLYYLQNGRDMYVDQELDINRLSDYDVDHIVPQSFLKDDSIDNKVLTRSDKARGKSDNVPSEEVVKKMKNYWRQLLNAKLITQRKFDNLTKAERGGLSELDKAGFIKRQLVETRQITKHVAQILDSRMNTKYDENDKLIREVKVITLKSKLVSDFRKDFQFYKVREINNYHHAHDAYLNAVVGTALIKKYPKLESEFVYGDYKVYDVRKMIAKSEQEIGKATAKYFFYSNIMNFFKTEITLANGEIRKRPLIETNGETGEIVWDKGRDFATVRKVLSMPQVNIVKKTEVQTGGFSKESILPKRNSDKLIARKKDWDPKKYGGFDSPTVAYSVLVVAKVEKGKSKKLKSVKELLGITIMERSSFEKNPIDFLEAKGYKEVKKDLIIKLPKYSLFELENGRKRMLASAGELQKGNELALPSKYVNFLYLASHYEKLKGSPEDNEQKQLFVEQHKHYLDEIIEQISEFSKRVILADANLDKVLSAYNKHRDKPIREQAENIIHLFTLTNLGAPAAFKYFDTTIDRKRYTSTKEVLDATLIHQSITGLYETRIDLSQLGGDGGGSSEAAAKGGSGGIPWLMKKPLQLTTLVPLQEYEERLLKQTMLTGSYKEKLQSLFLKYDALWQHWENQVGHRRIKPHHIATGTVNPRPQKQYPINPKAKASIQTVINDLLKQGVLIQQNSIMNTPVYPVPKPDGKWRMVLDYREVNKTIPLIAAQNQHSAGILSSIFRGKYKTTLDLSNGFWAHSITPESYWLTAFTWLGQQYCWTRLPQGFLNSPALFNADVVDLLKEVPNVQVYVDDIYISHDDPREHLEQLEKVFSLLLNAGYVVSLKKSEIAQHEVEFLGFNITKEGRGLTETFKQKLLNITPPRDLKQLQSILGLLNFARNFIPNFSELVKPLYNIIATAPGKYITWTTDNSQQLQNIISMLNSAENLEERNPEVRLIMKVNTSPSAGYIRFYNEFAKRPIMYLNYVYTKAEVKFTNTEKLLTTIHKGLIKALDLGMGQEILVYSPIVSMTKIQKTPLPERKALPIRWITWMSYLEDPRIQFHYDKTLPELQQVPTVTDDIIAKIKHPSEFSMVFYTDGSAIKHPNVNKSHNAGMGIAQVQFKPEFTVINTWSIPLGDHTAQLAEVAAVEFACKKALKIDGPVLIVTDSFYVAESVNKELPYWQSNGFFNNKKKPLKHVSKWKSIADCIQLKPDIIIIHEKGHQPTASTFHTEGNNLADKLATQGSYVVNAGKRTADGSEFEKRTADGSEFESPKKKAKVE

SEQ ID NO: 7092 - protein, 2087 aa, synthetic construct
MPAAKRVKLDGGDKKYSIGLDIGTNSVGWAVITDEYKVPSKKFKVLGNTDRHSIKKNLIGALLFDSGETAEATRLKRTARRRYTRRKNRICYLQEIFSNEMAKVDDSFFHRLEESFLVEEDKKHERHPIFGNIVDEVAYHEKYPTIYHLRKKLVDSTDKADLRLIYLALAHMIKFRGHFLIEGDLNPDNSDVDKLFIQLVQTYNQLFEENPINASGVDAKAILSARLSKSRRLENLIAQLPGEKKNGLFGNLIALSLGLTPNFKSNFDLAEDAKLQLSKDTYDDDLDNLLAQIGDQYADLFLAAKNLSDAILLSDILRVNTEITKAPLSASMIKRYDEHHQDLTLLKALVRQQLPEKYKEIFFDQSKNGYAGYIDGGASQEEFYKFIKPILEKMDGTEELLVKLNREDLLRKQRTFDNGSIPHQIHLGELHAILRRQEDFYPFLKDNREKIEKILTFRIPYYVGPLARGNSRFAWMTRKSEETITPWNFEEVVDKGASAQSFIERMTNFDKNLPNEKVLPKHSLLYEYFTVYNELTKVKYVTEGMRKPAFLSGEQKKAIVDLLFKTNRKVTVKQLKEDYFKKIECFDSVEISGVEDRFNASLGTYHDLLKIIKDKDFLDNEENEDILEDIVLTLTLFEDREMIEERLKTYAHLFDDKVMKQLKRRRYTGWGRLSRKLINGIRDKQSGKTILDFLKSDGFANRNFMQLIHDDSLTFKEDIQKAQVSGQGDSLHEHIANLAGSPAIKKGILQTVKVVDELVKVMGRHKPENIVIEMARENQTTQKGQKNSRERMKRIEEGIKELGSQILKEHPVENTQLQNEKLYLYYLQNGRDMYVDQELDINRLSDYDVDHIVPQSFLKDDSIDNKVLTRSDKARGKSDNVPSEEVVKKMKNYWRQLLNAKLITQRKFDNLTKAERGGLSELDKAGFIKRQLVETRQITKHVAQILDSRMNTKYDENDKLIREVKVITLKSKLVSDFRKDFQFYKVREINNYHHAHDAYLNAVVGTALIKKYPKLESEFVYGDYKVYDVRKMIAKSEQEIGKATAKYFFYSNIMNFFKTEITLANGEIRKRPLIETNGETGEIVWDKGRDFATVRKVLSMPQVNIVKKTEVQTGGFSKESILPKRNSDKLIARKKDWDPKKYGGFDSPTVAYSVLVVAKVEKGKSKKLKSVKELLGITIMERSSFEKNPIDFLEAKGYKEVKKDLIIKLPKYSLFELENGRKRMLASAGELQKGNELALPSKYVNFLYLASHYEKLKGSPEDNEQKQLFVEQHKHYLDEIIEQISEFSKRVILADANLDKVLSAYNKHRDKPIREQAENIIHLFTLTNLGAPAAFKYFDTTIDRKRYTSTKEVLDATLIHQSITGLYETRIDLSQLGGDGGGSSEAAAKGGSGGIPWLMKKPLQLTTLVPLQEYEERLLKQTMLTGSYKEKLQSLFLKYDALWQHWENQVGHRRIKPHHIATGTVNPRPQKQYPINPKAKASIQTVINDLLKQGVLIQQNSIMNTPVYPVPKPDGKWRMVLDYREVNKTIPLIAAQNQHSAGILSSIFRGKYKTTLDLSNGFWAHSITPESYWLTAFTWLGQQYCWTRLPQGFLNSPALFNADVVDLLKEVPNVQVYVDDIYISHDDPREHLEQLEKVFSLLLNAGYVVSLKKSEIAQHEVEFLGFNITKEGRGLTETFKQKLLNITPPRDLKQLQSILGKLNFARNFIPNFSELVKPLYNIIATAPGKYITWTTDNSQQLQNIISMLNSAENLEERNPEVRLIMKVNTSPSAGYIRFYNEFAKRPIMYLNYVYTKAEVKFTNTEKLLTTIHKGLIKALDLGMGQEILVYSPIVSMTKIQKTPLPERKALPIRWITWMSYLEDPRIQFHYDKTLPELQQVPTVTDDIIAKIKHPSEFSMVFYTDGSAIKHPNVNKSHNAGMGIAQVQFKPEFTVINTWSIPLGDHTAQLAEVAAVEFACKKALKIDGPVLIVTDSFYVAESVNKELPYWQSNGFFNNKKKPLKHVSKWKSIADCIQLKPDIIIIHEKGHQPTASTFHTEGNNLADKLATQGSYVVNAGKRTADGSEFEKRTADGSEFESPKKKAKVE

SEQ ID NO: 7093 - protein, 2094 aa, synthetic construct
MPAAKRVKLDGGDKKYSIGLDIGTNSVGWAVITDEYKVPSKKFKVLGNTDRHSIKKNLIGALLFDSGETAEATRLKRTARRRYTRRKNRICYLQEIFSNEMAKVDDSFFHRLEESFLVEEDKKHERHPIFGNIVDEVAYHEKYPTIYHLRKKLVDSTDKADLRLIYLALAHMIKFRGHFLIEGDLNPDNSDVDKLFIQLVQTYNQLFEENPINASGVDAKAILSARLSKSRRLENLIAQLPGEKKNGLFGNLIALSLGLTPNFKSNFDLAEDAKLQLSKDTYDDDLDNLLAQIGDQYADLFLAAKNLSDAILLSDILRVNTEITKAPLSASMIKRYDEHHQDLTLLKALVRQQLPEKYKEIFFDQSKNGYAGYIDGGASQEEFYKFIKPILEKMDGTEELLVKLNREDLLRKQRTFDNGSIPHQIHLGELHAILRRQEDFYPFLKDNREKIEKILTFRIPYYVGPLARGNSRFAWMTRKSEETITPWNFEEVVDKGASAQSFIERMTNFDKNLPNEKVLPKHSLLYEYFTVYNELTKVKYVTEGMRKPAFLSGEQKKAIVDLLFKTNRKVTVKQLKEDYFKKIECFDSVEISGVEDRFNASLGTYHDLLKIIKDKDFLDNEENEDILEDIVLTLTLFEDREMIEERLKTYAHLFDDKVMKQLKRRRYTGWGRLSRKLINGIRDKQSGKTILDFLKSDGFANRNFMQLIHDDSLTFKEDIQKAQVSGQGDSLHEHIANLAGSPAIKKGILQTVKVVDELVKVMGRHKPENIVIEMARENQTTQKGQKNSRERMKRIEEGIKELGSQILKEHPVENTQLQNEKLYLYYLQNGRDMYVDQELDINRLSDYDVDHIVPQSFLKDDSIDNKVLTRSDKARGKSDNVPSEEVVKKMKNYWRQLLNAKLITQRKFDNLTKAERGGLSELDKAGFIKRQLVETRQITKHVAQILDSRMNTKYDENDKLIREVKVITLKSKLVSDFRKDFQFYKVREINNYHHAHDAYLNAVVGTALIKKYPKLESEFVYGDYKVYDVRKMIAKSEQEIGKATAKYFFYSNIMNFFKTEITLANGEIRKRPLIETNGETGEIVWDKGRDFATVRKVLSMPQVNIVKKTEVQTGGFSKESILPKRNSDKLIARKKDWDPKKYGGFDSPTVAYSVLVVAKVEKGKSKKLKSVKELLGITIMERSSFEKNPIDFLEAKGYKEVKKDLIIKLPKYSLFELENGRKRMLASAGELQKGNELALPSKYVNFLYLASHYEKLKGSPEDNEQKQLFVEQHKHYLDEIIEQISEFSKRVILADANLDKVLSAYNKHRDKPIREQAENIIHLFTLTNLGAPAAFKYFDTTIDRKRYTSTKEVLDATLIHQSITGLYETRIDLSQLGGDGGGSSEAAAKGGSGGVLNLEEEYRLHEKPVPSSIDPSWLQLFPTVWAERAGMGLANQVPPVVVELRSGASPVAVRQYPMSKEAREGIRPHIQRFLDLGVLVPCQSPWNTPLLPVKKPGTNDYRPVQDLREINKRVQDIHPTVPNPYNLLSSLPPSHTWYSVLDLKDAFFCLKLHPNSQPLFAFEWRDPEKGNTGQLTWTRLPQGFKNSPTLFNEALHRDLAPFRALNPQVVLLQYVDDLLVAAPTYRDCKEGTQKLLQELSKLGYRVSAKKAQLCQKEVTYLGYLLKEGKRWLTPARKATVMKIPPPTTPRQVREFLGKAGFCRLFIPGFASLAAPLYPLTKPSIPFIWTEEHQKAFDRIKEALLSAPALALPDLTKPFTLYVDERAGVARGVLTQTLGPWRRPVAYLSKKLDPVASGWPTCLKAVAAVALLLKDADKLTLGQNVTVIASHSLESIVRQPPDRWMTNARMTHYQSLLLNERVSFAPPAVLNPATLLPVESEATPVHRCSEILAEETGTRRDLKDQPLPGVPAWYTDGSSFIAEGKRRAGAAIVDGKRTVWASSLPEGTSAQKAELVALTQALRLAEGKDINIYTDSRYAFATAHIHGAIYKQRGWLTSAGKDIKNKEEILALLEAIHLPKRVAIIHCPGHQKGNDPVATGNRRADEAAKQAALSTRVLAETTKPAGKRTADGSEFEKRTADGSEFESPKKKAKVE

SEQ ID NO: 7094 - protein, 2096 aa, synthetic construct
MPAAKRVKLDGGDKKYSIGLDIGTNSVGWAVITDEYKVPSKKFKVLGNTDRHSIKKNLIGALLFDSGETAEATRLKRTARRRYTRRKNRICYLQEIFSNEMAKVDDSFFHRLEESFLVEEDKKHERHPIFGNIVDEVAYHEKYPTIYHLRKKLVDSTDKADLRLIYLALAHMIKFRGHFLIEGDLNPDNSDVDKLFIQLVQTYNQLFEENPINASGVDAKAILSARLSKSRRLENLIAQLPGEKKNGLFGNLIALSLGLTPNFKSNFDLAEDAKLQLSKDTYDDDLDNLLAQIGDQYADLFLAAKNLSDAILLSDILRVNTEITKAPLSASMIKRYDEHHQDLTLLKALVRQQLPEKYKEIFFDQSKNGYAGYIDGGASQEEFYKFIKPILEKMDGTEELLVKLNREDLLRKQRTFDNGSIPHQIHLGELHAILRRQEDFYPFLKDNREKIEKILTFRIPYYVGPLARGNSRFAWMTRKSEETITPWNFEEVVDKGASAQSFIERMTNFDKNLPNEKVLPKHSLLYEYFTVYNELTKVKYVTEGMRKPAFLSGEQKKAIVDLLFKTNRKVTVKQLKEDYFKKIECFDSVEISGVEDRFNASLGTYHDLLKIIKDKDFLDNEENEDILEDIVLTLTLFEDREMIEERLKTYAHLFDDKVMKQLKRRRYTGWGRLSRKLINGIRDKQSGKTILDFLKSDGFANRNFMQLIHDDSLTFKEDIQKAQVSGQGDSLHEHIANLAGSPAIKKGILQTVKVVDELVKVMGRHKPENIVIEMARENQTTQKGQKNSRERMKRIEEGIKELGSQILKEHPVENTQLQNEKLYLYYLQNGRDMYVDQELDINRLSDYDVDHIVPQSFLKDDSIDNKVLTRSDKARGKSDNVPSEEVVKKMKNYWRQLLNAKLITQRKFDNLTKAERGGLSELDKAGFIKRQLVETRQITKHVAQILDSRMNTKYDENDKLIREVKVITLKSKLVSDFRKDFQFYKVREINNYHHAHDAYLNAVVGTALIKKYPKLESEFVYGDYKVYDVRKMIAKSEQEIGKATAKYFFYSNIMNFFKTEITLANGEIRKRPLIETNGETGEIVWDKGRDFATVRKVLSMPQVNIVKKTEVQTGGFSKESILPKRNSDKLIARKKDWDPKKYGGFDSPTVAYSVLVVAKVEKGKSKKLKSVKELLGITIMERSSFEKNPIDFLEAKGYKEVKKDLIIKLPKYSLFELENGRKRMLASAGELQKGNELALPSKYVNFLYLASHYEKLKGSPEDNEQKQLFVEQHKHYLDEIIEQISEFSKRVILADANLDKVLSAYNKHRDKPIREQAENIIHLFTLTNLGAPAAFKYFDTTIDRKRYTSTKEVLDATLIHQSITGLYETRIDLSQLGGDGGGSSEAAAKGGSGGTLNIEDEYRLHETSKEPDVPLGSTWLSDFPQAWAETGGMGLAVRQAPLIIPLKATSTPVSIKQYPMSQEARLGIKPHIQRLLDQGILVPCQSPWNTPLLPVKKPGTNDYRPVQDLREVNKRVEDIHPTVPNPYNLLSGLPPSHQWYTVLDLKDAFFCLRLHPTSQPLFAFEWRDPEMGISGQLTWTRLPQGFKNSPTLFDEALHRDLADFRIQHPDLILLQYVDDLLLAATSEQDCQRGTRALLQTLGNLGYRASAKKAQICQKQVKYLGYLLKEGQRWLTEARKETVMGQPTPKTPRQLREFLGTAGFCRLWIPGFAEMAAPLYPLTKTGTLFNWGPDQQKAYQEIKQALLTAPALGLPDLTKPFELFVDEKQGYAKGVLTQKLGPWRRPVAYLSKKLDPVAAGWPPCLRMVAAIAVLTKDAGKLTMGQPLVILAPHAVEALVKQPPDRWLSNARMTHYQAMLLDTDRVQFGPVVALNPATLLPLPEKEAPHDCLEILAETHGTRPDLTDQPIPDADYTWYTDGSSFLQEGQRRAGAAVTTETEVIWARALPAGTSAQRAELIALTQALKMAEGKKLNVYTDSRYAFATAHVHGEIYRRRGLLTSEGREIKNKNEILALLKALFLPKRLSIIHCPGHQKGNSAEARGNRMADQAAREAAMKAVLETSTLLAGKRTADGSEFEKRTADGSEFESPKKKAKVE

SEQ ID NO: 7095 - protein, 2096 aa, synthetic construct
MPAAKRVKLDGGDKKYSIGLDIGTNSVGWAVITDEYKVPSKKFKVLGNTDRHSIKKNLIGALLFDSGETAEATRLKRTARRRYTRRKNRICYLQEIFSNEMAKVDDSFFHRLEESFLVEEDKKHERHPIFGNIVDEVAYHEKYPTIYHLRKKLVDSTDKADLRLIYLALAHMIKFRGHFLIEGDLNPDNSDVDKLFIQLVQTYNQLFEENPINASGVDAKAILSARLSKSRRLENLIAQLPGEKKNGLFGNLIALSLGLTPNFKSNFDLAEDAKLQLSKDTYDDDLDNLLAQIGDQYADLFLAAKNLSDAILLSDILRVNTEITKAPLSASMIKRYDEHHQDLTLLKALVRQQLPEKYKEIFFDQSKNGYAGYIDGGASQEEFYKFIKPILEKMDGTEELLVKLNREDLLRKQRTFDNGSIPHQIHLGELHAILRRQEDFYPFLKDNREKIEKILTFRIPYYVGPLARGNSRFAWMTRKSEETITPWNFEEVVDKGASAQSFIERMTNFDKNLPNEKVLPKHSLLYEYFTVYNELTKVKYVTEGMRKPAFLSGEQKKAIVDLLFKTNRKVTVKQLKEDYFKKIECFDSVEISGVEDRFNASLGTYHDLLKIIKDKDFLDNEENEDILEDIVLTLTLFEDREMIEERLKTYAHLFDDKVMKQLKRRRYTGWGRLSRKLINGIRDKQSGKTILDFLKSDGFANRNFMQLIHDDSLTFKEDIQKAQVSGQGDSLHEHIANLAGSPAIKKGILQTVKVVDELVKVMGRHKPENIVIEMARENQTTQKGQKNSRERMKRIEEGIKELGSQILKEHPVENTQLQNEKLYLYYLQNGRDMYVDQELDINRLSDYDVDHIVPQSFLKDDSIDNKVLTRSDKARGKSDNVPSEEVVKKMKNYWRQLLNAKLITQRKFDNLTKAERGGLSELDKAGFIKRQLVETRQITKHVAQILDSRMNTKYDENDKLIREVKVITLKSKLVSDFRKDFQFYKVREINNYHHAHDAYLNAVVGTALIKKYPKLESEFVYGDYKVYDVRKMIAKSEQEIGKATAKYFFYSNIMNFFKTEITLANGEIRKRPLIETNGETGEIVWDKGRDFATVRKVLSMPQVNIVKKTEVQTGGFSKESILPKRNSDKLIARKKDWDPKKYGGFDSPTVAYSVLVVAKVEKGKSKKLKSVKELLGITIMERSSFEKNPIDFLEAKGYKEVKKDLIIKLPKYSLFELENGRKRMLASAGELQKGNELALPSKYVNFLYLASHYEKLKGSPEDNEQKQLFVEQHKHYLDEIIEQISEFSKRVILADANLDKVLSAYNKHRDKPIREQAENIIHLFTLTNLGAPAAFKYFDTTIDRKRYTSTKEVLDATLIHQSITGLYETRIDLSQLGGDGGGSSEAAAKGGSGGTLNIEDEYRLHETSKEPDVPLGSTWLSDFPQAWAETGGMGLAVRQAPLIIPLKATSTPVSIKQYPMSQEARLGIKPHIQRLLDQGILVPCQSPWNTPLLPVKKPGTNDYRPVQDLREVNKRVEDIHPTVPNPYNLLSGLPPSHQWYTVLDLKDAFFCLRLHPTSQPLFAFEWRDPEMGISGQLTWTRLPQGFKNSPTLFNEALHRDLADFRIQHPDLILLQYVDDLLLAATSEQDCQRGTRALLQTLGNLGYRASAKKAQICQKQVKYLGYLLKEGQRWLTEARKETVMGQPTPKTPRQLREFLGTAGFCRLWIPGFAEMAAPLYPLTKPGTLFNWGPDQQKAYQEIKQALLTAPALGLPDLTKPFELFVDEKQGYAKGVLTQKLGPWRRPVAYLSKKLDPVAAGWPPCLRMVAAIAVLTKDAGKLTMGQPLVILAPHAVEALVKQPPDRWLSNARMTHYQAMLLDTDRVQFGPVVALNPATLLPLPEKEAPHDCLEILAETHGTRPDLTDQPIPDADYTWYTDGSSFLQEGQRRAGAAVTTETEVIWARALPAGTSAQRAELIALTQALKMAEGKKLNVYTDSRYAFATAHVHGEIYRRRGWLTSEGREIKNKNEILALLKALFLPKRLSIIHCPGHQKGNSAEARGNRMADQAAREAAMKAVLETSTLLAGKRTADGSEFEKRTADGSEFESPKKKAKVE

SEQ ID NO: 7096 - protein, 2098 aa, synthetic construct
MPAAKRVKLDGGDKKYSIGLDIGTNSVGWAVITDEYKVPSKKFKVLGNTDRHSIKKNLIGALLFDSGETAEATRLKRTARRRYTRRKNRICYLQEIFSNEMAKVDDSFFHRLEESFLVEEDKKHERHPIFGNIVDEVAYHEKYPTIYHLRKKLVDSTDKADLRLIYLALAHMIKFRGHFLIEGDLNPDNSDVDKLFIQLVQTYNQLFEENPINASGVDAKAILSARLSKSRRLENLIAQLPGEKKNGLFGNLIALSLGLTPNFKSNFDLAEDAKLQLSKDTYDDDLDNLLAQIGDQYADLFLAAKNLSDAILLSDILRVNTEITKAPLSASMIKRYDEHHQDLTLLKALVRQQLPEKYKEIFFDQSKNGYAGYIDGGASQEEFYKFIKPILEKMDGTEELLVKLNREDLLRKQRTFDNGSIPHQIHLGELHAILRRQEDFYPFLKDNREKIEKILTFRIPYYVGPLARGNSRFAWMTRKSEETITPWNFEEVVDKGASAQSFIERMTNFDKNLPNEKVLPKHSLLYEYFTVYNELTKVKYVTEGMRKPAFLSGEQKKAIVDLLFKTNRKVTVKQLKEDYFKKIECFDSVEISGVEDRFNASLGTYHDLLKIIKDKDFLDNEENEDILEDIVLTLTLFEDREMIEERLKTYAHLFDDKVMKQLKRRRYTGWGRLSRKLINGIRDKQSGKTILDFLKSDGFANRNFMQLIHDDSLTFKEDIQKAQVSGQGDSLHEHIANLAGSPAIKKGILQTVKVVDELVKVMGRHKPENIVIEMARENQTTQKGQKNSRERMKRIEEGIKELGSQILKEHPVENTQLQNEKLYLYYLQNGRDMYVDQELDINRLSDYDVDHIVPQSFLKDDSIDNKVLTRSDKARGKSDNVPSEEVVKKMKNYWRQLLNAKLITQRKFDNLTKAERGGLSELDKAGFIKRQLVETRQITKHVAQILDSRMNTKYDENDKLIREVKVITLKSKLVSDFRKDFQFYKVREINNYHHAHDAYLNAVVGTALIKKYPKLESEFVYGDYKVYDVRKMIAKSEQEIGKATAKYFFYSNIMNFFKTEITLANGEIRKRPLIETNGETGEIVWDKGRDFATVRKVLSMPQVNIVKKTEVQTGGFSKESILPKRNSDKLIARKKDWDPKKYGGFDSPTVAYSVLVVAKVEKGKSKKLKSVKELLGITIMERSSFEKNPIDFLEAKGYKEVKKDLIIKLPKYSLFELENGRKRMLASAGELQKGNELALPSKYVNFLYLASHYEKLKGSPEDNEQKQLFVEQHKHYLDEIIEQISEFSKRVILADANLDKVLSAYNKHRDKPIREQAENIIHLFTLTNLGAPAAFKYFDTTIDRKRYTSTKEVLDATLIHQSITGLYETRIDLSQLGGDGGEAAAKGGSGSSGGTAPLEEEYRLFLEAPIQNVTLLEQWKREIPKVWAEINPPGLASTQAPIHVQLLSTALPVRVRQYPITLEAKRSLRETIRKFRAAGILRPVHSPWNTPLLPVRKSGTSEYRMVQDLREVNKRVETIHPTVPNPYTLLSLLPPDRIWYSVLDLKDAFFCIPLAPESQLIFAFEWADAEEGESGQLTWTRLPQGFKNSPTLFNEALNRDLQGFRLDHPSVSLLQYVDDLLIAADTQAACLSATRDLLMTLAELGYRVSGKKAQLCQEEVTYLGFKIHKGSRSLSNSRTQAILQIPVPKTKRQVREFLGTIGYCRLWIPGFAELAQPLYAATRPGNDPLVWGEKEEEAFQSLKLALTQPPALALPSLDKPFQLFVEETSGAAKGVLTQALGPWKRPVAYLSKRLDPVAAGWPRCLRAIAAAALLTREASKLTFGQDIEITSSHNLESLLRSPPDKWLTNARITQYQVLLLDPPRVRFKQTAALNPATLLPETDDTLPIHHCLDTLDSLTSTRPDLTDQPLAQAEATLFTDGSSYIRDGKRYAGAAVVTLDSVIWAEPLPIGTSAQKAELIALTKALEWSKDKSVNIYTDSRYAFATLHVHGMIYRERGWLTAGGKAIKNAPEILALLTAVWLPKRVAVMHCKGHQKDDAPTSTGNRRADEVAREVAIRPLSTQATISAGKRTADGSEFEKRTADGSEFESPKKKAKVE

SEQ ID NO: 7097 - protein, 2102 aa, synthetic construct
MPAAKRVKLDGGDKKYSIGLDIGTNSVGWAVITDEYKVPSKKFKVLGNTDRHSIKKNLIGALLFDSGETAEATRLKRTARRRYTRRKNRICYLQEIFSNEMAKVDDSFFHRLEESFLVEEDKKHERHPIFGNIVDEVAYHEKYPTIYHLRKKLVDSTDKADLRLIYLALAHMIKFRGHFLIEGDLNPDNSDVDKLFIQLVQTYNQLFEENPINASGVDAKAILSARLSKSRRLENLIAQLPGEKKNGLFGNLIALSLGLTPNFKSNFDLAEDAKLQLSKDTYDDDLDNLLAQIGDQYADLFLAAKNLSDAILLSDILRVNTEITKAPLSASMIKRYDEHHQDLTLLKALVRQQLPEKYKEIFFDQSKNGYAGYIDGGASQEEFYKFIKPILEKMDGTEELLVKLNREDLLRKQRTFDNGSIPHQIHLGELHAILRRQEDFYPFLKDNREKIEKILTFRIPYYVGPLARGNSRFAWMTRKSEETITPWNFEEVVDKGASAQSFIERMTNFDKNLPNEKVLPKHSLLYEYFTVYNELTKVKYVTEGMRKPAFLSGEQKKAIVDLLFKTNRKVTVKQLKEDYFKKIECFDSVEISGVEDRFNASLGTYHDLLKIIKDKDFLDNEENEDILEDIVLTLTLFEDREMIEERLKTYAHLFDDKVMKQLKRRRYTGWGRLSRKLINGIRDKQSGKTILDFLKSDGFANRNFMQLIHDDSLTFKEDIQKAQVSGQGDSLHEHIANLAGSPAIKKGILQTVKVVDELVKVMGRHKPENIVIEMARENQTTQKGQKNSRERMKRIEEGIKELGSQILKEHPVENTQLQNEKLYLYYLQNGRDMYVDQELDINRLSDYDVDHIVPQSFLKDDSIDNKVLTRSDKARGKSDNVPSEEVVKKMKNYWRQLLNAKLITQRKFDNLTKAERGGLSELDKAGFIKRQLVETRQITKHVAQILDSRMNTKYDENDKLIREVKVITLKSKLVSDFRKDFQFYKVREINNYHHAHDAYLNAVVGTALIKKYPKLESEFVYGDYKVYDVRKMIAKSEQEIGKATAKYFFYSNIMNFFKTEITLANGEIRKRPLIETNGETGEIVWDKGRDFATVRKVLSMPQVNIVKKTEVQTGGFSKESILPKRNSDKLIARKKDWDPKKYGGFDSPTVAYSVLVVAKVEKGKSKKLKSVKELLGITIMERSSFEKNPIDFLEAKGYKEVKKDLIIKLPKYSLFELENGRKRMLASAGELQKGNELALPSKYVNFLYLASHYEKLKGSPEDNEQKQLFVEQHKHYLDEIIEQISEFSKRVILADANLDKVLSAYNKHRDKPIREQAENIIHLFTLTNLGAPAAFKYFDTTIDRKRYTSTKEVLDATLIHQSITGLYETRIDLSQLGGDGGEAAAKGGSGSSGGTVSLQDEHRLFDIPVTTSLPDVWLQDFPQAWAETGGLGRAKCQAPIIIDLKPTAVPVSIKQYPMSLEAHMGIRQHIIKFLELGVLRPCRSPWNTPLLPVKKPGTQDYRPVQDLREINKRTVDIHPTVPNPYNLLSTLKPDYSWYTVLDLKDAFFCLPLAPQSQELFAFEWKDPERGISGQLTWTRLPQGFKNSPTLFNEALHRDLTDFRTQHPEVTLLQYVDDLLLAAPTKKACTQGTRHLLQELGEKGYRASAKKAQICQTKVTYLGYILSEGKRWLTPGRIETVARIPPPRNPREVREFLGTAGFCRLWIPGFAELAAPLYALTKPSTPFTWQTEHQLAFEALKKALLSAPALGLPDTSKPFTLFLDERQGIAKGVLTQKLGPWKRPVAYLSKKLDPVAAGWPPCLRIMAATAMLVKDSAKLTLGQPLTVITPHTLEAIVRQPPDRWITNARLTHYQALLLDTDRVQFGPPVTLNPATLLPVPENQPSPHDCRQVLAETHGTREDLKDQELPDADHTWYTDGSSYLDSGTRRAGAAVVDGHNTIWAQSLPPGTSAQKAELIALTKALELSKGKKANIYTDSRYAFATAHTHGSIYERRGWLTSEGKEIKNKAEIIALLKALFLPQEVAIIHCPGHQKGQDPVAVGNRQADRVARQAAMAEVLTLATEPDNTSHITAGKRTADGSEFEKRTADGSEFESPKKKAKVE

SEQ ID NO: 7098 - protein, 2218 aa, synthetic construct
MPAAKRVKLDGGDKKYSIGLDIGTNSVGWAVITDEYKVPSKKFKVLGNTDRHSIKKNLIGALLFDSGETAEATRLKRTARRRYTRRKNRICYLQEIFSNEMAKVDDSFFHRLEESFLVEEDKKHERHPIFGNIVDEVAYHEKYPTIYHLRKKLVDSTDKADLRLIYLALAHMIKFRGHFLIEGDLNPDNSDVDKLFIQLVQTYNQLFEENPINASGVDAKAILSARLSKSRRLENLIAQLPGEKKNGLFGNLIALSLGLTPNFKSNFDLAEDAKLQLSKDTYDDDLDNLLAQIGDQYADLFLAAKNLSDAILLSDILRVNTEITKAPLSASMIKRYDEHHQDLTLLKALVRQQLPEKYKEIFFDQSKNGYAGYIDGGASQEEFYKFIKPILEKMDGTEELLVKLNREDLLRKQRTFDNGSIPHQIHLGELHAILRRQEDFYPFLKDNREKIEKILTFRIPYYVGPLARGNSRFAWMTRKSEETITPWNFEEVVDKGASAQSFIERMTNFDKNLPNEKVLPKHSLLYEYFTVYNELTKVKYVTEGMRKPAFLSGEQKKAIVDLLFKTNRKVTVKQLKEDYFKKIECFDSVEISGVEDRFNASLGTYHDLLKIIKDKDFLDNEENEDILEDIVLTLTLFEDREMIEERLKTYAHLFDDKVMKQLKRRRYTGWGRLSRKLINGIRDKQSGKTILDFLKSDGFANRNFMQLIHDDSLTFKEDIQKAQVSGQGDSLHEHIANLAGSPAIKKGILQTVKVVDELVKVMGRHKPENIVIEMARENQTTQKGQKNSRERMKRIEEGIKELGSQILKEHPVENTQLQNEKLYLYYLQNGRDMYVDQELDINRLSDYDVDHIVPQSFLKDDSIDNKVLTRSDKARGKSDNVPSEEVVKKMKNYWRQLLNAKLITQRKFDNLTKAERGGLSELDKAGFIKRQLVETRQITKHVAQILDSRMNTKYDENDKLIREVKVITLKSKLVSDFRKDFQFYKVREINNYHHAHDAYLNAVVGTALIKKYPKLESEFVYGDYKVYDVRKMIAKSEQEIGKATAKYFFYSNIMNFFKTEITLANGEIRKRPLIETNGETGEIVWDKGRDFATVRKVLSMPQVNIVKKTEVQTGGFSKESILPKRNSDKLIARKKDWDPKKYGGFDSPTVAYSVLVVAKVEKGKSKKLKSVKELLGITIMERSSFEKNPIDFLEAKGYKEVKKDLIIKLPKYSLFELENGRKRMLASAGELQKGNELALPSKYVNFLYLASHYEKLKGSPEDNEQKQLFVEQHKHYLDEIIEQISEFSKRVILADANLDKVLSAYNKHRDKPIREQAENIIHLFTLTNLGAPAAFKYFDTTIDRKRYTSTKEVLDATLIHQSITGLYETRIDLSQLGGDGGEAAAKGGSGSSGGTLGDQGSRGSDPLPEPRVTLTVEGIPTEFLVNTGAEHSVLTKPMGKMGSKRTVVAGATGSKVYPWTTKRLLKIGQKQVTHSFLVIPECPAPLLGRDLLTKLKAQIQFSTEGPQVTWEDRPAMCLVLNLEEEYRLHEKPVPPSIDPSWLQLFPMVWAEKAGMGLANQVPPVVVELKSDASPVAVRQYPMSKEAREGIRPHIQRFLDLGILVPCQSPWNTPLLPVKKPGTNDYRPVQDLREVNKRVQDIHPTVPNPYNLLSSLPPSHTWYSVLDLKDAFFCLKLHPNSQPLFAFEWRDPEKGNTGQLTWTRLPQGFKNSPTLFNEALHRDLASFRALNPQVVMLQYVDDLLVAAPTYRDCKEGTRRLLQELSKLGYRVSAKKAQLCREEVTYLGYLLKGGKRWLTPARKATVMKIPTPTTPRQVREFLGTAGFCRLWIPGFASLAAPLYPLTRPKVPFTWTEAHQEAFGRIKEALLSAPALALPDLTKPFALYVDEKEGVARGVLTQTLGPWRRPVAYLSKKLDPVASGWPTCLKAIAAVALLLKDADKLTLGQNVLVIAPHNLESIVRQPPDRWMTNARMTHYQSLLLNERVSFAPPAILNPATLLPVESDDTPIHICSEILAEETGTRPDLRDQPLPGVPAWYTDGSSFIMDGRRQAGAAIVDNKRTVWASNLPEGTSAQKAELIALTQALRLAEGKSINIYTDSRYAFATAHVHGAIYKQRGWLTSAGKDIKNKEEILALLEAIHLPKRVAIIHCPGHQRGTDPVATGNRKADEAAKQAAQSTRILTETTKNAGKRTADGSEFEKRTADGSEFESPKKKAKVE

SEQ ID NO: 7099 - protein, 2218 aa, synthetic construct
MPAAKRVKLDGGDKKYSIGLDIGTNSVGWAVITDEYKVPSKKFKVLGNTDRHSIKKNLIGALLFDSGETAEATRLKRTARRRYTRRKNRICYLQEIFSNEMAKVDDSFFHRLEESFLVEEDKKHERHPIFGNIVDEVAYHEKYPTIYHLRKKLVDSTDKADLRLIYLALAHMIKFRGHFLIEGDLNPDNSDVDKLFIQLVQTYNQLFEENPINASGVDAKAILSARLSKSRRLENLIAQLPGEKKNGLFGNLIALSLGLTPNFKSNFDLAEDAKLQLSKDTYDDDLDNLLAQIGDQYADLFLAAKNLSDAILLSDILRVNTEITKAPLSASMIKRYDEHHQDLTLLKALVRQQLPEKYKEIFFDQSKNGYAGYIDGGASQEEFYKFIKPILEKMDGTEELLVKLNREDLLRKQRTFDNGSIPHQIHLGELHAILRRQEDFYPFLKDNREKIEKILTFRIPYYVGPLARGNSRFAWMTRKSEETITPWNFEEVVDKGASAQSFIERMTNFDKNLPNEKVLPKHSLLYEYFTVYNELTKVKYVTEGMRKPAFLSGEQKKAIVDLLFKTNRKVTVKQLKEDYFKKIECFDSVEISGVEDRFNASLGTYHDLLKIIKDKDFLDNEENEDILEDIVLTLTLFEDREMIEERLKTYAHLFDDKVMKQLKRRRYTGWGRLSRKLINGIRDKQSGKTILDFLKSDGFANRNFMQLIHDDSLTFKEDIQKAQVSGQGDSLHEHIANLAGSPAIKKGILQTVKVVDELVKVMGRHKPENIVIEMARENQTTQKGQKNSRERMKRIEEGIKELGSQILKEHPVENTQLQNEKLYLYYLQNGRDMYVDQELDINRLSDYDVDHIVPQSFLKDDSIDNKVLTRSDKARGKSDNVPSEEVVKKMKNYWRQLLNAKLITQRKFDNLTKAERGGLSELDKAGFIKRQLVETRQITKHVAQILDSRMNTKYDENDKLIREVKVITLKSKLVSDFRKDFQFYKVREINNYHHAHDAYLNAVVGTALIKKYPKLESEFVYGDYKVYDVRKMIAKSEQEIGKATAKYFFYSNIMNFFKTEITLANGEIRKRPLIETNGETGEIVWDKGRDFATVRKVLSMPQVNIVKKTEVQTGGFSKESILPKRNSDKLIARKKDWDPKKYGGFDSPTVAYSVLVVAKVEKGKSKKLKSVKELLGITIMERSSFEKNPIDFLEAKGYKEVKKDLIIKLPKYSLFELENGRKRMLASAGELQKGNELALPSKYVNFLYLASHYEKLKGSPEDNEQKQLFVEQHKHYLDEIIEQISEFSKRVILADANLDKVLSAYNKHRDKPIREQAENIIHLFTLTNLGAPAAFKYFDTTIDRKRYTSTKEVLDATLIHQSITGLYETRIDLSQLGGDGGEAAAKGGSGSSGGTLGDQGSRGSDPLPEPRVTLTVEGIPTEFLVNTGAEHSVLTKPMGKMGSKRTVVAGATGSKVYPWTTKRLLKIGQKQVTHSFLVIPECPAPLLGRDLLTKLKAQIQFSTEGPQVTWEDRPAMCLVLNLEEEYRLHEKPVPPSIDPSWLQLFPMVWAEKAGMGLANQVPPVVVELKSDASPVAVRQYPMSKEAREGIRPHIQRFLDLGILVPCQSPWNTPLLPVKKPGTNDYRPVQDLREVNKRVQDIHPTVPNPYNLLSSLPPSHTWYSVLDLKDAFFCLKLHPNSQPLFAFEWRDPEKGNTGQLTWTRLPQGFKNSPTLFNEALHRDLASFRALNPQVVMLQYVDDLLVAAPTYRDCKEGTRRLLQELSKLGYRVSAKKAQLCREEVTYLGYLLKGGKRWLTPARKATVMKIPTPTTPRQVREFLGKAGFCRLFIPGFASLAAPLYPLTRPKVPFTWTEAHQEAFGRIKEALLSAPALALPDLTKPFALYVDEKEGVARGVLTQTLGPWRRPVAYLSKKLDPVASGWPTCLKAIAAVALLLKDADKLTLGQNVLVIAPHNLESIVRQPPDRWMTNARMTHYQSLLLNERVSFAPPAILNPATLLPVESDDTPIHICSEILAEETGTRPDLRDQPLPGVPAWYTDGSSFIMDGRRQAGAAIVDNKRTVWASNLPEGTSAQKAELIALTQALRLAEGKSINIYTDSRYAFATAHVHGAIYKQRGWLTSAGKDIKNKEEILALLEAIHLPKRVAIIHCPGHQRGTDPVATGNRKADEAAKQAAQSTRILTETTKNAGKRTADGSEFEKRTADGSEFESPKKKAKVE

SEQ ID NO: 7100 - protein, 2096 aa, synthetic construct
MPAAKRVKLDGGDKKYSIGLDIGTNSVGWAVITDEYKVPSKKFKVLGNTDRHSIKKNLIGALLFDSGETAEATRLKRTARRRYTRRKNRICYLQEIFSNEMAKVDDSFFHRLEESFLVEEDKKHERHPIFGNIVDEVAYHEKYPTIYHLRKKLVDSTDKADLRLIYLALAHMIKFRGHFLIEGDLNPDNSDVDKLFIQLVQTYNQLFEENPINASGVDAKAILSARLSKSRRLENLIAQLPGEKKNGLFGNLIALSLGLTPNFKSNFDLAEDAKLQLSKDTYDDDLDNLLAQIGDQYADLFLAAKNLSDAILLSDILRVNTEITKAPLSASMIKRYDEHHQDLTLLKALVRQQLPEKYKEIFFDQSKNGYAGYIDGGASQEEFYKFIKPILEKMDGTEELLVKLNREDLLRKQRTFDNGSIPHQIHLGELHAILRRQEDFYPFLKDNREKIEKILTFRIPYYVGPLARGNSRFAWMTRKSEETITPWNFEEVVDKGASAQSFIERMTNFDKNLPNEKVLPKHSLLYEYFTVYNELTKVKYVTEGMRKPAFLSGEQKKAIVDLLFKTNRKVTVKQLKEDYFKKIECFDSVEISGVEDRFNASLGTYHDLLKIIKDKDFLDNEENEDILEDIVLTLTLFEDREMIEERLKTYAHLFDDKVMKQLKRRRYTGWGRLSRKLINGIRDKQSGKTILDFLKSDGFANRNFMQLIHDDSLTFKEDIQKAQVSGQGDSLHEHIANLAGSPAIKKGILQTVKVVDELVKVMGRHKPENIVIEMARENQTTQKGQKNSRERMKRIEEGIKELGSQILKEHPVENTQLQNEKLYLYYLQNGRDMYVDQELDINRLSDYDVDHIVPQSFLKDDSIDNKVLTRSDKARGKSDNVPSEEVVKKMKNYWRQLLNAKLITQRKFDNLTKAERGGLSELDKAGFIKRQLVETRQITKHVAQILDSRMNTKYDENDKLIREVKVITLKSKLVSDFRKDFQFYKVREINNYHHAHDAYLNAVVGTALIKKYPKLESEFVYGDYKVYDVRKMIAKSEQEIGKATAKYFFYSNIMNFFKTEITLANGEIRKRPLIETNGETGEIVWDKGRDFATVRKVLSMPQVNIVKKTEVQTGGFSKESILPKRNSDKLIARKKDWDPKKYGGFDSPTVAYSVLVVAKVEKGKSKKLKSVKELLGITIMERSSFEKNPIDFLEAKGYKEVKKDLIIKLPKYSLFELENGRKRMLASAGELQKGNELALPSKYVNFLYLASHYEKLKGSPEDNEQKQLFVEQHKHYLDEIIEQISEFSKRVILADANLDKVLSAYNKHRDKPIREQAENIIHLFTLTNLGAPAAFKYFDTTIDRKRYTSTKEVLDATLIHQSITGLYETRIDLSQLGGDGGEAAAKGGSGSSGGTLNLEDEYRLYETSAEPEVSPGSTWLSDFPQAWAETGGMGLAVRQAPLIIPLKATSTPVSIKQYPMSQEAKLGIKPHIQRLLDQGILVPCQSPWNTPLLPVKKPGTNDYRPVQDLREVNKRVEDIHPTVPNPYNLLSGLPPSHRWYTVLDLKDAFFCLRLHPTSQPLFAFEWRDPGMGISGQLTWTRLPQGFKNSPTLFNEALHRDLADFRIQHPDLILLQYVDDILLAATSELDCQQGTRALLLTLGNLGYRASAKKAQLCQKQVKYLGYLLKEGQRWLTEARKETVMGQPTPKTPRQLREFLGKAGFCRLFIPGFAEMAAPLYPLTKPGTLFNWGPDQQKAYQEIKQALLTAPALGLPDLTKPFELFVDEKQGYAKGVLTQKLGPWRRPVAYLSKKLDPVAAGWPPCLRMVAAIAVLRKDAGKLTMGQPLVILAPHAVEALVKQPPDRWLSNARMTHYQAMLLDTDRVQFGPVVALNPATLLPLPEEGAPHDCLEILAETHGTRPDLTDQPIPDADHTWYTDGSSFLQEGQRKAGAAVTTETEVIWARALPAGTSAQRAELIALTQALKMAEGKRLNVYTDSRYAFATAHIHGEIYRRRGWLTSEGREIKNKSEILALLKALFLPKRLSIIHCLGHQKGDSAEARGNRLADQAAREAAIKTPPDTSTLLAGKRTADGSEFEKRTADGSEFESPKKKAKVE

SEQ ID NO: 7101 - protein, 2096 aa, synthetic construct
MPAAKRVKLDGGDKKYSIGLDIGTNSVGWAVITDEYKVPSKKFKVLGNTDRHSIKKNLIGALLFDSGETAEATRLKRTARRRYTRRKNRICYLQEIFSNEMAKVDDSFFHRLEESFLVEEDKKHERHPIFGNIVDEVAYHEKYPTIYHLRKKLVDSTDKADLRLIYLALAHMIKFRGHFLIEGDLNPDNSDVDKLFIQLVQTYNQLFEENPINASGVDAKAILSARLSKSRRLENLIAQLPGEKKNGLFGNLIALSLGLTPNFKSNFDLAEDAKLQLSKDTYDDDLDNLLAQIGDQYADLFLAAKNLSDAILLSDILRVNTEITKAPLSASMIKRYDEHHQDLTLLKALVRQQLPEKYKEIFFDQSKNGYAGYIDGGASQEEFYKFIKPILEKMDGTEELLVKLNREDLLRKQRTFDNGSIPHQIHLGELHAILRRQEDFYPFLKDNREKIEKILTFRIPYYVGPLARGNSRFAWMTRKSEETITPWNFEEVVDKGASAQSFIERMTNFDKNLPNEKVLPKHSLLYEYFTVYNELTKVKYVTEGMRKPAFLSGEQKKAIVDLLFKTNRKVTVKQLKEDYFKKIECFDSVEISGVEDRFNASLGTYHDLLKIIKDKDFLDNEENEDILEDIVLTLTLFEDREMIEERLKTYAHLFDDKVMKQLKRRRYTGWGRLSRKLINGIRDKQSGKTILDFLKSDGFANRNFMQLIHDDSLTFKEDIQKAQVSGQGDSLHEHIANLAGSPAIKKGILQTVKVVDELVKVMGRHKPENIVIEMARENQTTQKGQKNSRERMKRIEEGIKELGSQILKEHPVENTQLQNEKLYLYYLQNGRDMYVDQELDINRLSDYDVDHIVPQSFLKDDSIDNKVLTRSDKARGKSDNVPSEEVVKKMKNYWRQLLNAKLITQRKFDNLTKAERGGLSELDKAGFIKRQLVETRQITKHVAQILDSRMNTKYDENDKLIREVKVITLKSKLVSDFRKDFQFYKVREINNYHHAHDAYLNAVVGTALIKKYPKLESEFVYGDYKVYDVRKMIAKSEQEIGKATAKYFFYSNIMNFFKTEITLANGEIRKRPLIETNGETGEIVWDKGRDFATVRKVLSMPQVNIVKKTEVQTGGFSKESILPKRNSDKLIARKKDWDPKKYGGFDSPTVAYSVLVVAKVEKGKSKKLKSVKELLGITIMERSSFEKNPIDFLEAKGYKEVKKDLIIKLPKYSLFELENGRKRMLASAGELQKGNELALPSKYVNFLYLASHYEKLKGSPEDNEQKQLFVEQHKHYLDEIIEQISEFSKRVILADANLDKVLSAYNKHRDKPIREQAENIIHLFTLTNLGAPAAFKYFDTTIDRKRYTSTKEVLDATLIHQSITGLYETRIDLSQLGGDGGEAAAKGGSGSSGGTLNIEDEYRLHETSKGPDVPLGSTWLSDFPQAWAETGGMGLAVRQAPLIIPLKATSTPVSIKQYPMSQEARLGIKPHIQRLLDQGILVPCQSPWNTPLLPVKKPGTNDYRPVQDLREVNKRVEDIHPTVPNPYNLLSGLPPSHQWYTVLDLKDAFFCLRLHPTSQSLFAFEWRDPEMGISGQLTWTRLPQGFKNSPTLFDEALHRDLADFRIQHPDLILLQYVDDLLLAATSELDCQQGTRALLQTLGDLGYRASAKKAQICQKQVKYLGYLLKEGQRWLTEARKETVMGQPTPKTPRQLREFLGTAGFCRLWIPGFAEMAAPLYPLTKTGTLFEWGPDQQKAYQEIKQALLTAPALGLPDLTKPFELFVDEKQGYAKGVLTQKLGPWRRPVAYLSKKLDPVAAGWPPCLRMVAAIAVLTKDAGKLTMGQPLVILAPHAVEALVKQPPDRWLSNARMTHYQALLLDTDRVQFGPIVALNPATLLPLPEEGLQHDCLDILAEAHGTRPDLTDQPLPDADHTWYTDGSSFLQEGQRKAGAAVTTETEVVWAKALPAGTSAQRAELIALTQALKMAEGKKLNVYTDSRYAFATAHIHGEIYRRRGLLTSEGKEIKNKDEILALLKALFLPKRLSIIHCPGHQKGNRAEARGNRMADQAAREVATRETPETSTLLAGKRTADGSEFEKRTADGSEFESPKKKAKVE

SEQ ID NO: 7102 - protein, 2087 aa, synthetic construct
MPAAKRVKLDGGDKKYSIGLDIGTNSVGWAVITDEYKVPSKKFKVLGNTDRHSIKKNLIGALLFDSGETAEATRLKRTARRRYTRRKNRICYLQEIFSNEMAKVDDSFFHRLEESFLVEEDKKHERHPIFGNIVDEVAYHEKYPTIYHLRKKLVDSTDKADLRLIYLALAHMIKFRGHFLIEGDLNPDNSDVDKLFIQLVQTYNQLFEENPINASGVDAKAILSARLSKSRRLENLIAQLPGEKKNGLFGNLIALSLGLTPNFKSNFDLAEDAKLQLSKDTYDDDLDNLLAQIGDQYADLFLAAKNLSDAILLSDILRVNTEITKAPLSASMIKRYDEHHQDLTLLKALVRQQLPEKYKEIFFDQSKNGYAGYIDGGASQEEFYKFIKPILEKMDGTEELLVKLNREDLLRKQRTFDNGSIPHQIHLGELHAILRRQEDFYPFLKDNREKIEKILTFRIPYYVGPLARGNSRFAWMTRKSEETITPWNFEEVVDKGASAQSFIERMTNFDKNLPNEKVLPKHSLLYEYFTVYNELTKVKYVTEGMRKPAFLSGEQKKAIVDLLFKTNRKVTVKQLKEDYFKKIECFDSVEISGVEDRFNASLGTYHDLLKIIKDKDFLDNEENEDILEDIVLTLTLFEDREMIEERLKTYAHLFDDKVMKQLKRRRYTGWGRLSRKLINGIRDKQSGKTILDFLKSDGFANRNFMQLIHDDSLTFKEDIQKAQVSGQGDSLHEHIANLAGSPAIKKGILQTVKVVDELVKVMGRHKPENIVIEMARENQTTQKGQKNSRERMKRIEEGIKELGSQILKEHPVENTQLQNEKLYLYYLQNGRDMYVDQELDINRLSDYDVDHIVPQSFLKDDSIDNKVLTRSDKARGKSDNVPSEEVVKKMKNYWRQLLNAKLITQRKFDNLTKAERGGLSELDKAGFIKRQLVETRQITKHVAQILDSRMNTKYDENDKLIREVKVITLKSKLVSDFRKDFQFYKVREINNYHHAHDAYLNAVVGTALIKKYPKLESEFVYGDYKVYDVRKMIAKSEQEIGKATAKYFFYSNIMNFFKTEITLANGEIRKRPLIETNGETGEIVWDKGRDFATVRKVLSMPQVNIVKKTEVQTGGFSKESILPKRNSDKLIARKKDWDPKKYGGFDSPTVAYSVLVVAKVEKGKSKKLKSVKELLGITIMERSSFEKNPIDFLEAKGYKEVKKDLIIKLPKYSLFELENGRKRMLASAGELQKGNELALPSKYVNFLYLASHYEKLKGSPEDNEQKQLFVEQHKHYLDEIIEQISEFSKRVILADANLDKVLSAYNKHRDKPIREQAENIIHLFTLTNLGAPAAFKYFDTTIDRKRYTSTKEVLDATLIHQSITGLYETRIDLSQLGGDGGEAAAKGGSGSSGGIPWLMKKPLQLTTLVPLQEYEERLLKQTMLTGSYKEKLQSLFLKYDALWQHWENQVGHRRIKPHHIATGTVNPRPQKQYPINPKAKASIQTVINDLLKQGVLIQQNSIMNTPVYPVPKPDGKWRMVLDYREVNKTIPLIAAQNQHSAGILSSIFRGKYKTTLDLSNGFWAHSITPESYWLTAFTWLGQQYCWTRLPQGFLNSPALFNADVVDLLKEVPNVQVYVDDIYISHDDPREHLEQLEKVFSLLLNAGYVVSLKKSEIAQHEVEFLGFNITKEGRGLTETFKQKLLNITPPRDLKQLQSILGLLNFARNFIPNFSELVKPLYNIIATAPGKYITWTTDNSQQLQNIISMLNSAENLEERNPEVRLIMKVNTSPSAGYIRFYNEFAKRPIMYLNYVYTKAEVKFTNTEKLLTTIHKGLIKALDLGMGQEILVYSPIVSMTKIQKTPLPERKALPIRWITWMSYLEDPRIQFHYDKTLPELQQVPTVTDDIIAKIKHPSEFSMVFYTDGSAIKHPNVNKSHNAGMGIAQVQFKPEFTVINTWSIPLGDHTAQLAEVAAVEFACKKALKIDGPVLIVTDSFYVAESVNKELPYWQSNGFFNNKKKPLKHVSKWKSIADCIQLKPDIIIIHEKGHQPTASTFHTEGNNLADKLATQGSYVVNAGKRTADGSEFEKRTADGSEFESPKKKAKVE

SEQ ID NO: 7103 - protein, 2096 aa, synthetic construct; identical to SEQ ID NO: 4523

SEQ ID NO: 7104 - protein, 2098 aa, synthetic construct
MPAAKRVKLDGGDKKYSIGLDIGTNSVGWAVITDEYKVPSKKFKVLGNTDRHSIKKNLIGALLFDSGETAEATRLKRTARRRYTRRKNRICYLQEIFSNEMAKVDDSFFHRLEESFLVEEDKKHERHPIFGNIVDEVAYHEKYPTIYHLRKKLVDSTDKADLRLIYLALAHMIKFRGHFLIEGDLNPDNSDVDKLFIQLVQTYNQLFEENPINASGVDAKAILSARLSKSRRLENLIAQLPGEKKNGLFGNLIALSLGLTPNFKSNFDLAEDAKLQLSKDTYDDDLDNLLAQIGDQYADLFLAAKNLSDAILLSDILRVNTEITKAPLSASMIKRYDEHHQDLTLLKALVRQQLPEKYKEIFFDQSKNGYAGYIDGGASQEEFYKFIKPILEKMDGTEELLVKLNREDLLRKQRTFDNGSIPHQIHLGELHAILRRQEDFYPFLKDNREKIEKILTFRIPYYVGPLARGNSRFAWMTRKSEETITPWNFEEVVDKGASAQSFIERMTNFDKNLPNEKVLPKHSLLYEYFTVYNELTKVKYVTEGMRKPAFLSGEQKKAIVDLLFKTNRKVTVKQLKEDYFKKIECFDSVEISGVEDRFNASLGTYHDLLKIIKDKDFLDNEENEDILEDIVLTLTLFEDREMIEERLKTYAHLFDDKVMKQLKRRRYTGWGRLSRKLINGIRDKQSGKTILDFLKSDGFANRNFMQLIHDDSLTFKEDIQKAQVSGQGDSLHEHIANLAGSPAIKKGILQTVKVVDELVKVMGRHKPENIVIEMARENQTTQKGQKNSRERMKRIEEGIKELGSQILKEHPVENTQLQNEKLYLYYLQNGRDMYVDQELDINRLSDYDVDHIVPQSFLKDDSIDNKVLTRSDKARGKSDNVPSEEVVKKMKNYWRQLLNAKLITQRKFDNLTKAERGGLSELDKAGFIKRQLVETRQITKHVAQILDSRMNTKYDENDKLIREVKVITLKSKLVSDFRKDFQFYKVREINNYHHAHDAYLNAVVGTALIKKYPKLESEFVYGDYKVYDVRKMIAKSEQEIGKATAKYFFYSNIMNFFKTEITLANGEIRKRPLIETNGETGEIVWDKGRDFATVRKVLSMPQVNIVKKTEVQTGGFSKESILPKRNSDKLIARKKDWDPKKYGGFDSPTVAYSVLVVAKVEKGKSKKLKSVKELLGITIMERSSFEKNPIDFLEAKGYKEVKKDLIIKLPKYSLFELENGRKRMLASAGELQKGNELALPSKYVNFLYLASHYEKLKGSPEDNEQKQLFVEQHKHYLDEIIEQISEFSKRVILADANLDKVLSAYNKHRDKPIREQAENIIHLFTLTNLGAPAAFKYFDTTIDRKRYTSTKEVLDATLIHQSITGLYETRIDLSQLGGDGGEAAAKGSSGGSGGTAPLEEEYRLFLEAPIQNVTLLEQWKREIPKVWAEINPPGLASTQAPIHVQLLSTALPVRVRQYPITLEAKRSLRETIRKFRAAGILRPVHSPWNTPLLPVRKSGTSEYRMVQDLREVNKRVETIHPTVPNPYTLLSLLPPDRIWYSVLDLKDAFFCIPLAPESQLIFAFEWADAEEGESGQLTWTRLPQGFKNSPTLFNEALNRDLQGFRLDHPSVSLLQYVDDLLIAADTQAACLSATRDLLMTLAELGYRVSGKKAQLCQEEVTYLGFKIHKGSRSLSNSRTQAILQIPVPKTKRQVREFLGTIGYCRLWIPGFAELAQPLYAATRPGNDPLVWGEKEEEAFQSLKLALTQPPALALPSLDKPFQLFVEETSGAAKGVLTQALGPWKRPVAYLSKRLDPVAAGWPRCLRAIAAAALLTREASKLTFGQDIEITSSHNLESLLRSPPDKWLTNARITQYQVLLLDPPRVRFKQTAALNPATLLPETDDTLPIHHCLDTLDSLTSTRPDLTDQPLAQAEATLFTDGSSYIRDGKRYAGAAVVTLDSVIWAEPLPIGTSAQKAELIALTKALEWSKDKSVNIYTDSRYAFATLHVHGMIYRERGWLTAGGKAIKNAPEILALLTAVWLPKRVAVMHCKGHQKDDAPTSTGNRRADEVAREVAIRPLSTQATISAGKRTADGSEFEKRTADGSEFESPKKKAKVE

SEQ ID NO: 7105 - protein, 2098 aa, synthetic construct
MPAAKRVKLDGGDKKYSIGLDIGTNSVGWAVITDEYKVPSKKFKVLGNTDRHSIKKNLIGALLFDSGETAEATRLKRTARRRYTRRKNRICYLQEIFSNEMAKVDDSFFHRLEESFLVEEDKKHERHPIFGNIVDEVAYHEKYPTIYHLRKKLVDSTDKADLRLIYLALAHMIKFRGHFLIEGDLNPDNSDVDKLFIQLVQTYNQLFEENPINASGVDAKAILSARLSKSRRLENLIAQLPGEKKNGLFGNLIALSLGLTPNFKSNFDLAEDAKLQLSKDTYDDDLDNLLAQIGDQYADLFLAAKNLSDAILLSDILRVNTEITKAPLSASMIKRYDEHHQDLTLLKALVRQQLPEKYKEIFFDQSKNGYAGYIDGGASQEEFYKFIKPILEKMDGTEELLVKLNREDLLRKQRTFDNGSIPHQIHLGELHAILRRQEDFYPFLKDNREKIEKILTFRIPYYVGPLARGNSRFAWMTRKSEETITPWNFEEVVDKGASAQSFIERMTNFDKNLPNEKVLPKHSLLYEYFTVYNELTKVKYVTEGMRKPAFLSGEQKKAIVDLLFKTNRKVTVKQLKEDYFKKIECFDSVEISGVEDRFNASLGTYHDLLKIIKDKDFLDNEENEDILEDIVLTLTLFEDREMIEERLKTYAHLFDDKVMKQLKRRRYTGWGRLSRKLINGIRDKQSGKTILDFLKSDGFANRNFMQLIHDDSLTFKEDIQKAQVSGQGDSLHEHIANLAGSPAIKKGILQTVKVVDELVKVMGRHKPENIVIEMARENQTTQKGQKNSRERMKRIEEGIKELGSQILKEHPVENTQLQNEKLYLYYLQNGRDMYVDQELDINRLSDYDVDHIVPQSFLKDDSIDNKVLTRSDKARGKSDNVPSEEVVKKMKNYWRQLLNAKLITQRKFDNLTKAERGGLSELDKAGFIKRQLVETRQITKHVAQILDSRMNTKYDENDKLIREVKVITLKSKLVSDFRKDFQFYKVREINNYHHAHDAYLNAVVGTALIKKYPKLESEFVYGDYKVYDVRKMIAKSEQEIGKATAKYFFYSNIMNFFKTEITLANGEIRKRPLIETNGETGEIVWDKGRDFATVRKVLSMPQVNIVKKTEVQTGGFSKESILPKRNSDKLIARKKDWDPKKYGGFDSPTVAYSVLVVAKVEKGKSKKLKSVKELLGITIMERSSFEKNPIDFLEAKGYKEVKKDLIIKLPKYSLFELENGRKRMLASAGELQKGNELALPSKYVNFLYLASHYEKLKGSPEDNEQKQLFVEQHKHYLDEIIEQISEFSKRVILADANLDKVLSAYNKHRDKPIREQAENIIHLFTLTNLGAPAAFKYFDTTIDRKRYTSTKEVLDATLIHQSITGLYETRIDLSQLGGDGGEAAAKGSSGGSGGTAPLEEEYRLFLEAPIQNVTLLEQWKREIPKVWAEINPPGLASTQAPIHVQLLSTALPVRVRQYPITLEAKRSLRETIRKFRAAGILRPVHSPWNTPLLPVRKSGTSEYRMVQDLREVNKRVETIHPTVPNPYTLLSLLPPDRIWYSVLDLKDAFFCIPLAPESQLIFAFEWADAEEGESGQLTWTRLPQGFKNSPTLFNEALNRDLQGFRLDHPSVSLLQYVDDLLIAADTQAACLSATRDLLMTLAELGYRVSGKKAQLCQEEVTYLGFKIHKGSRSLSNSRTQAILQIPVPKTKRQVREFLGKIGYCRLFIPGFAELAQPLYAATRPGNDPLVWGEKEEEAFQSLKLALTQPPALALPSLDKPFQLFVEETSGAAKGVLTQALGPWKRPVAYLSKRLDPVAAGWPRCLRAIAAAALLTREASKLTFGQDIEITSSHNLESLLRSPPDKWLTNARITQYQVLLLDPPRVRFKQTAALNPATLLPETDDTLPIHHCLDTLDSLTSTRPDLTDQPLAQAEATLFTDGSSYIRDGKRYAGAAVVTLDSVIWAEPLPIGTSAQKAELIALTKALEWSKDKSVNIYTDSRYAFATLHVHGMIYRERGWLTAGGKAIKNAPEILALLTAVWLPKRVAVMHCKGHQKDDAPTSTGNRRADEVAREVAIRPLSTQATISAGKRTADGSEFEKRTADGSEFESPKKKAKVE

SEQ ID NO: 7106 - protein, 2102 aa, synthetic construct
MPAAKRVKLDGGDKKYSIGLDIGTNSVGWAVITDEYKVPSKKFKVLGNTDRHSIKKNLIGALLFDSGETAEATRLKRTARRRYTRRKNRICYLQEIFSNEMAKVDDSFFHRLEESFLVEEDKKHERHPIFGNIVDEVAYHEKYPTIYHLRKKLVDSTDKADLRLIYLALAHMIKFRGHFLIEGDLNPDNSDVDKLFIQLVQTYNQLFEENPINASGVDAKAILSARLSKSRRLENLIAQLPGEKKNGLFGNLIALSLGLTPNFKSNFDLAEDAKLQLSKDTYDDDLDNLLAQIGDQYADLFLAAKNLSDAILLSDILRVNTEITKAPLSASMIKRYDEHHQDLTLLKALVRQQLPEKYKEIFFDQSKNGYAGYIDGGASQEEFYKFIKPILEKMDGTEELLVKLNREDLLRKQRTFDNGSIPHQIHLGELHAILRRQEDFYPFLKDNREKIEKILTFRIPYYVGPLARGNSRFAWMTRKSEETITPWNFEEVVDKGASAQSFIERMTNFDKNLPNEKVLPKHSLLYEYFTVYNELTKVKYVTEGMRKPAFLSGEQKKAIVDLLFKTNRKVTVKQLKEDYFKKIECFDSVEISGVEDRFNASLGTYHDLLKIIKDKDFLDNEENEDILEDIVLTLTLFEDREMIEERLKTYAHLFDDKVMKQLKRRRYTGWGRLSRKLINGIRDKQSGKTILDFLKSDGFANRNFMQLIHDDSLTFKEDIQKAQVSGQGDSLHEHIANLAGSPAIKKGILQTVKVVDELVKVMGRHKPENIVIEMARENQTTQKGQKNSRERMKRIEEGIKELGSQILKEHPVENTQLQNEKLYLYYLQNGRDMYVDQELDINRLSDYDVDHIVPQSFLKDDSIDNKVLTRSDKARGKSDNVPSEEVVKKMKNYWRQLLNAKLITQRKFDNLTKAERGGLSELDKAGFIKRQLVETRQITKHVAQILDSRMNTKYDENDKLIREVKVITLKSKLVSDFRKDFQFYKVREINNYHHAHDAYLNAVVGTALIKKYPKLESEFVYGDYKVYDVRKMIAKSEQEIGKATAKYFFYSNIMNFFKTEITLANGEIRKRPLIETNGETGEIVWDKGRDFATVRKVLSMPQVNIVKKTEVQTGGFSKESILPKRNSDKLIARKKDWDPKKYGGFDSPTVAYSVLVVAKVEKGKSKKLKSVKELLGITIMERSSFEKNPIDFLEAKGYKEVKKDLIIKLPKYSLFELENGRKRMLASAGELQKGNELALPSKYVNFLYLASHYEKLKGSPEDNEQKQLFVEQHKHYLDEIIEQISEFSKRVILADANLDKVLSAYNKHRDKPIREQAENIIHLFTLTNLGAPAAFKYFDTTIDRKRYTSTKEVLDATLIHQSITGLYETRIDLSQLGGDGGEAAAKGSSGGSGGTVSLQDEHRLFDIPVTTSLPDVWLQDFPQAWAETGGLGRAKCQAPIIIDLKPTAVPVSIKQYPMSLEAHMGIRQHIIKFLELGVLRPCRSPWNTPLLPVKKPGTQDYRPVQDLREINKRTVDIHPTVPNPYNLLSTLKPDYSWYTVLDLKDAFFCLPLAPQSQELFAFEWKDPERGISGQLTWTRLPQGFKNSPTLFNEALHRDLTDFRTQHPEVTLLQYVDDLLLAAPTKKACTQGTRHLLQELGEKGYRASAKKAQICQTKVTYLGYILSEGKRWLTPGRIETVARIPPPRNPREVREFLGKAGFCRLFIPGFAELAAPLYALTKPSTPFTWQTEHQLAFEALKKALLSAPALGLPDTSKPFTLFLDERQGIAKGVLTQKLGPWKRPVAYLSKKLDPVAAGWPPCLRIMAATAMLVKDSAKLTLGQPLTVITPHTLEAIVRQPPDRWITNARLTHYQALLLDTDRVQFGPPVTLNPATLLPVPENQPSPHDCRQVLAETHGTREDLKDQELPDADHTWYTDGSSYLDSGTRRAGAAVVDGHNTIWAQSLPPGTSAQKAELIALTKALELSKGKKANIYTDSRYAFATAHTHGSIYERRGWLTSEGKEIKNKAEIIALLKALFLPQEVAIIHCPGHQKGQDPVAVGNRQADRVARQAAMAEVLTLATEPDNTSHITAGKRTADGSEFEKRTADGSEFESPKKKAKVE

SEQ ID NO: 7107 - protein, 2087 aa, synthetic construct
MPAAKRVKLDGGDKKYSIGLDIGTNSVGWAVITDEYKVPSKKFKVLGNTDRHSIKKNLIGALLFDSGETAEATRLKRTARRRYTRRKNRICYLQEIFSNEMAKVDDSFFHRLEESFLVEEDKKHERHPIFGNIVDEVAYHEKYPTIYHLRKKLVDSTDKADLRLIYLALAHMIKFRGHFLIEGDLNPDNSDVDKLFIQLVQTYNQLFEENPINASGVDAKAILSARLSKSRRLENLIAQLPGEKKNGLFGNLIALSLGLTPNFKSNFDLAEDAKLQLSKDTYDDDLDNLLAQIGDQYADLFLAAKNLSDAILLSDILRVNTEITKAPLSASMIKRYDEHHQDLTLLKALVRQQLPEKYKEIFFDQSKNGYAGYIDGGASQEEFYKFIKPILEKMDGTEELLVKLNREDLLRKQRTFDNGSIPHQIHLGELHAILRRQEDFYPFLKDNREKIEKILTFRIPYYVGPLARGNSRFAWMTRKSEETITPWNFEEVVDKGASAQSFIERMTNFDKNLPNEKVLPKHSLLYEYFTVYNELTKVKYVTEGMRKPAFLSGEQKKAIVDLLFKTNRKVTVKQLKEDYFKKIECFDSVEISGVEDRFNASLGTYHDLLKIIKDKDFLDNEENEDILEDIVLTLTLFEDREMIEERLKTYAHLFDDKVMKQLKRRRYTGWGRLSRKLINGIRDKQSGKTILDFLKSDGFANRNFMQLIHDDSLTFKEDIQKAQVSGQGDSLHEHIANLAGSPAIKKGILQTVKVVDELVKVMGRHKPENIVIEMARENQTTQKGQKNSRERMKRIEEGIKELGSQILKEHPVENTQLQNEKLYLYYLQNGRDMYVDQELDINRLSDYDVDHIVPQSFLKDDSIDNKVLTRSDKARGKSDNVPSEEVVKKMKNYWRQLLNAKLITQRKFDNLTKAERGGLSELDKAGFIKRQLVETRQITKHVAQILDSRMNTKYDENDKLIREVKVITLKSKLVSDFRKDFQFYKVREINNYHHAHDAYLNAVVGTALIKKYPKLESEFVYGDYKVYDVRKMIAKSEQEIGKATAKYFFYSNIMNFFKTEITLANGEIRKRPLIETNGETGEIVWDKGRDFATVRKVLSMPQVNIVKKTEVQTGGFSKESILPKRNSDKLIARKKDWDPKKYGGFDSPTVAYSVLVVAKVEKGKSKKLKSVKELLGITIMERSSFEKNPIDFLEAKGYKEVKKDLIIKLPKYSLFELENGRKRMLASAGELQKGNELALPSKYVNFLYLASHYEKLKGSPEDNEQKQLFVEQHKHYLDEIIEQISEFSKRVILADANLDKVLSAYNKHRDKPIREQAENIIHLFTLTNLGAPAAFKYFDTTIDRKRYTSTKEVLDATLIHQSITGLYETRIDLSQLGGDGGEAAAKGSSGGSGGVPWILKKPLELTIKLDLEEQQGTLLNNSILSKKGKEELKQLFEKYSALWQSWENQVGHRRIRPHKIATGTVKPTPQKQYHINPKAKPDIQIVINDLLKQGVLIQKESTMNTPVYPVPKPNGRWRMVLDYRAVNKVTPLIAVQNQHSYGILGSLFKGRYKTTIDLSNGFWAHPIVPEDYWITAFTWQGKQYCWTVLPQGFLNSPGLFTGDVVDLLQGIPNVEVYVDDVYISHDSEKEHLEYLDILFNRLKEAGYIISLKKSNIANSIVDFLGFQITNEGRGLTDTFKEKLENITAPTTLKQLQSILGLLNFARNFIPDFTELIAPLYALIPKSTKNYVPWQIEHSTTLETLITKLNGAEYLQGRKGDKTLIMKVNASYTTGYIRYYNEGEKKPISYVSIVFSKTELKFTELEKLLTTVHKGLLKALDLSMGQNIHVYSPIVSMQNIQKTPQTAKKALASRWLSWLSYLEDPRIRFFYDPQMPALKDLPAVDTGKDNKKHPSNFQHIFYTDGSAITSPTKEGHLNAGMGIVYFINKDGNLQKQQEWSISLGNHTAQFAEIAAFEFALKKCLPLGGNILVVTDSNYVAKAYNEELDVWASNGFVNNRKKPLKHISKWKSVADLKRLRPDVVVTHEPGHQKLDSSPHAYGNNLADQLATQASFKVHAGKRTADGSEFEKRTADGSEFESPKKKAKVE

SEQ ID NO: 7108 - protein, 2087 aa, synthetic construct
MPAAKRVKLDGGDKKYSIGLDIGTNSVGWAVITDEYKVPSKKFKVLGNTDRHSIKKNLIGALLFDSGETAEATRLKRTARRRYTRRKNRICYLQEIFSNEMAKVDDSFFHRLEESFLVEEDKKHERHPIFGNIVDEVAYHEKYPTIYHLRKKLVDSTDKADLRLIYLALAHMIKFRGHFLIEGDLNPDNSDVDKLFIQLVQTYNQLFEENPINASGVDAKAILSARLSKSRRLENLIAQLPGEKKNGLFGNLIALSLGLTPNFKSNFDLAEDAKLQLSKDTYDDDLDNLLAQIGDQYADLFLAAKNLSDAILLSDILRVNTEITKAPLSASMIKRYDEHHQDLTLLKALVRQQLPEKYKEIFFDQSKNGYAGYIDGGASQEEFYKFIKPILEKMDGTEELLVKLNREDLLRKQRTFDNGSIPHQIHLGELHAILRRQEDFYPFLKDNREKIEKILTFRIPYYVGPLARGNSRFAWMTRKSEETITPWNFEEVVDKGASAQSFIERMTNFDKNLPNEKVLPKHSLLYEYFTVYNELTKVKYVTEGMRKPAFLSGEQKKAIVDLLFKTNRKVTVKQLKEDYFKKIECFDSVEISGVEDRFNASLGTYHDLLKIIKDKDFLDNEENEDILEDIVLTLTLFEDREMIEERLKTYAHLFDDKVMKQLKRRRYTGWGRLSRKLINGIRDKQSGKTILDFLKSDGFANRNFMQLIHDDSLTFKEDIQKAQVSGQGDSLHEHIANLAGSPAIKKGILQTVKVVDELVKVMGRHKPENIVIEMARENQTTQKGQKNSRERMKRIEEGIKELGSQILKEHPVENTQLQNEKLYLYYLQNGRDMYVDQELDINRLSDYDVDHIVPQSFLKDDSIDNKVLTRSDKARGKSDNVPSEEVVKKMKNYWRQLLNAKLITQRKFDNLTKAERGGLSELDKAGFIKRQLVETRQITKHVAQILDSRMNTKYDENDKLIREVKVITLKSKLVSDFRKDFQFYKVREINNYHHAHDAYLNAVVGTALIKKYPKLESEFVYGDYKVYDVRKMIAKSEQEIGKATAKYFFYSNIMNFFKTEITLANGEIRKRPLIETNGETGEIVWDKGRDFATVRKVLSMPQVNIVKKTEVQTGGFSKESILPKRNSDKLIARKKDWDPKKYGGFDSPTVAYSVLVVAKVEKGKSKKLKSVKELLGITIMERSSFEKNPIDFLEAKGYKEVKKDLIIKLPKYSLFELENGRKRMLASAGELQKGNELALPSKYVNFLYLASHYEKLKGSPEDNEQKQLFVEQHKHYLDEIIEQISEFSKRVILADANLDKVLSAYNKHRDKPIREQAENIIHLFTLTNLGAPAAFKYFDTTIDRKRYTSTKEVLDATLIHQSITGLYETRIDLSQLGGDGGEAAAKGSSGGSGGVPWILKKPLELTIKLDLEEQQGTLLNNSILSKKGKEELKQLFEKYSALWQSWENQVGHRRIRPHKIATGTVKPTPQKQYHINPKAKPDIQIVINDLLKQGVLIQKESTMNTPVYPVPKPNGRWRMVLDYRAVNKVTPLIAVQNQHSYGILGSLFKGRYKTTIDLSNGFWAHPIVPEDYWITAFTWQGKQYCWTVLPQGFLNSPGLFNGDVVDLLQGIPNVEVYVDDVYISHDSEKEHLEYLDILFNRLKEAGYIISLKKSNIANSIVDFLGFQITNEGRGLTDTFKEKLENITAPTTLKQLQSILGKLNFARNFIPDFTELIAPLYALIPKSPKNYVPWQIEHSTTLETLITKLNGAEYLQGRKGDKTLIMKVNASYTTGYIRYYNEGEKKPISYVSIVFSKTELKFTELEKLLTTVHKGLLKALDLSMGQNIHVYSPIVSMQNIQKTPQTAKKALASRWLSWLSYLEDPRIRFFYDPQMPALKDLPAVDTGKDNKKHPSNFQHIFYTDGSAITSPTKEGHLNAGMGIVYFINKDGNLQKQQEWSISLGNHTAQFAEIAAFEFALKKCLPLGGNILVVTDSNYVAKAYNEELDVWASNGFVNNRKKPLKHISKWKSVADLKRLRPDVVVTHEPGHQKLDSSPHAYGNNLADQLATQASFKVHAGKRTADGSEFEKRTADGSEFESPKKKAKVE

SEQ ID NO: 7109 - protein, 2094 aa, synthetic construct
MPAAKRVKLDGGDKKYSIGLDIGTNSVGWAVITDEYKVPSKKFKVLGNTDRHSIKKNLIGALLFDSGETAEATRLKRTARRRYTRRKNRICYLQEIFSNEMAKVDDSFFHRLEESFLVEEDKKHERHPIFGNIVDEVAYHEKYPTIYHLRKKLVDSTDKADLRLIYLALAHMIKFRGHFLIEGDLNPDNSDVDKLFIQLVQTYNQLFEENPINASGVDAKAILSARLSKSRRLENLIAQLPGEKKNGLFGNLIALSLGLTPNFKSNFDLAEDAKLQLSKDTYDDDLDNLLAQIGDQYADLFLAAKNLSDAILLSDILRVNTEITKAPLSASMIKRYDEHHQDLTLLKALVRQQLPEKYKEIFFDQSKNGYAGYIDGGASQEEFYKFIKPILEKMDGTEELLVKLNREDLLRKQRTFDNGSIPHQIHLGELHAILRRQEDFYPFLKDNREKIEKILTFRIPYYVGPLARGNSRFAWMTRKSEETITPWNFEEVVDKGASAQSFIERMTNFDKNLPNEKVLPKHSLLYEYFTVYNELTKVKYVTEGMRKPAFLSGEQKKAIVDLLFKTNRKVTVKQLKEDYFKKIECFDSVEISGVEDRFNASLGTYHDLLKIIKDKDFLDNEENEDILEDIVLTLTLFEDREMIEERLKTYAHLFDDKVMKQLKRRRYTGWGRLSRKLINGIRDKQSGKTILDFLKSDGFANRNFMQLIHDDSLTFKEDIQKAQVSGQGDSLHEHIANLAGSPAIKKGILQTVKVVDELVKVMGRHKPENIVIEMARENQTTQKGQKNSRERMKRIEEGIKELGSQILKEHPVENTQLQNEKLYLYYLQNGRDMYVDQELDINRLSDYDVDHIVPQSFLKDDSIDNKVLTRSDKARGKSDNVPSEEVVKKMKNYWRQLLNAKLITQRKFDNLTKAERGGLSELDKAGFIKRQLVETRQITKHVAQILDSRMNTKYDENDKLIREVKVITLKSKLVSDFRKDFQFYKVREINNYHHAHDAYLNAVVGTALIKKYPKLESEFVYGDYKVYDVRKMIAKSEQEIGKATAKYFFYSNIMNFFKTEITLANGEIRKRPLIETNGETGEIVWDKGRDFATVRKVLSMPQVNIVKKTEVQTGGFSKESILPKRNSDKLIARKKDWDPKKYGGFDSPTVAYSVLVVAKVEKGKSKKLKSVKELLGITIMERSSFEKNPIDFLEAKGYKEVKKDLIIKLPKYSLFELENGRKRMLASAGELQKGNELALPSKYVNFLYLASHYEKLKGSPEDNEQKQLFVEQHKHYLDEIIEQISEFSKRVILADANLDKVLSAYNKHRDKPIREQAENIIHLFTLTNLGAPAAFKYFDTTIDRKRYTSTKEVLDATLIHQSITGLYETRIDLSQLGGDGGEAAAKGSSGGSGGVLNLEEEYRLHEKPVPSSIDPSWLQLFPTVWAERAGMGLANQVPPVVVELRSGASPVAVRQYPMSKEAREGIRPHIQKFLDLGVLVPCRSPWNTPLLPVKKPGTNDYRPVQDLREINKRVQDIHPTVPNPYNLLSSLPPSYTWYSVLDLKDAFFCLRLHPNSQPLFAFEWKDPEKGNTGQLTWTRLPQGFKNSPTLFNEALHRDLAPFRALNPQVVLLQYVDDLLVAAPTYEDCKKGTQKLLQELSKLGYRVSAKKAQLCQREVTYLGYLLKEGKRWLTPARKATVMKIPVPTTPRQVREFLGTAGFCRLWIPGFASLAAPLYPLTKPSIPFIWTEEHQQAFDHIKKALLSAPALALPDLTKPFTLYIDERAGVARGVLTQTLGPWRRPVAYLSKKLDPVASGWPTCLKAVAAVALLLKDADKLTLGQNVTVIASHSLESIVRQPPDRWMTNARMTHYQSLLLNERVSFAPPAVLNPATLLPVESEATPVHRCSEILAEETGTRRDLEDQPLPGVPTWYTDGSSFITEGKRRAGAPIVDGKRTVWASSLPEGTSAQKAELVALTQALRLAEGKNINIYTDSRYAFATAHIHGAIYKQRGWLTSAGKDIKNKEEILALLEAIHLPRRVAIIHCPGHQRGSNPVATGNRRADEAAKQAALSTRVLAGTTKPAGKRTADGSEFEKRTADGSEFESPKKKAKVE

SEQ ID NO: 7110 - protein, 2127 aa, synthetic construct
MPAAKRVKLDGGDKKYSIGLDIGTNSVGWAVITDEYKVPSKKFKVLGNTDRHSIKKNLIGALLFDSGETAEATRLKRTARRRYTRRKNRICYLQEIFSNEMAKVDDSFFHRLEESFLVEEDKKHERHPIFGNIVDEVAYHEKYPTIYHLRKKLVDSTDKADLRLIYLALAHMIKFRGHFLIEGDLNPDNSDVDKLFIQLVQTYNQLFEENPINASGVDAKAILSARLSKSRRLENLIAQLPGEKKNGLFGNLIALSLGLTPNFKSNFDLAEDAKLQLSKDTYDDDLDNLLAQIGDQYADLFLAAKNLSDAILLSDILRVNTEITKAPLSASMIKRYDEHHQDLTLLKALVRQQLPEKYKEIFFDQSKNGYAGYIDGGASQEEFYKFIKPILEKMDGTEELLVKLNREDLLRKQRTFDNGSIPHQIHLGELHAILRRQEDFYPFLKDNREKIEKILTFRIPYYVGPLARGNSRFAWMTRKSEETITPWNFEEVVDKGASAQSFIERMTNFDKNLPNEKVLPKHSLLYEYFTVYNELTKVKYVTEGMRKPAFLSGEQKKAIVDLLFKTNRKVTVKQLKEDYFKKIECFDSVEISGVEDRFNASLGTYHDLLKIIKDKDFLDNEENEDILEDIVLTLTLFEDREMIEERLKTYAHLFDDKVMKQLKRRRYTGWGRLSRKLINGIRDKQSGKTILDFLKSDGFANRNFMQLIHDDSLTFKEDIQKAQVSGQGDSLHEHIANLAGSPAIKKGILQTVKVVDELVKVMGRHKPENIVIEMARENQTTQKGQKNSRERMKRIEEGIKELGSQILKEHPVENTQLQNEKLYLYYLQNGRDMYVDQELDINRLSDYDVDHIVPQSFLKDDSIDNKVLTRSDKARGKSDNVPSEEVVKKMKNYWRQLLNAKLITQRKFDNLTKAERGGLSELDKAGFIKRQLVETRQITKHVAQILDSRMNTKYDENDKLIREVKVITLKSKLVSDFRKDFQFYKVREINNYHHAHDAYLNAVVGTALIKKYPKLESEFVYGDYKVYDVRKMIAKSEQEIGKATAKYFFYSNIMNFFKTEITLANGEIRKRPLIETNGETGEIVWDKGRDFATVRKVLSMPQVNIVKKTEVQTGGFSKESILPKRNSDKLIARKKDWDPKKYGGFDSPTVAYSVLVVAKVEKGKSKKLKSVKELLGITIMERSSFEKNPIDFLEAKGYKEVKKDLIIKLPKYSLFELENGRKRMLASAGELQKGNELALPSKYVNFLYLASHYEKLKGSPEDNEQKQLFVEQHKHYLDEIIEQISEFSKRVILADANLDKVLSAYNKHRDKPIREQAENIIHLFTLTNLGAPAAFKYFDTTIDRKRYTSTKEVLDATLIHQSITGLYETRIDLSQLGGDGGEAAAKGSSGGSGGLLGRDLLTKLKAQIQFSTEGPQVTWEDRPAMCLVLNLEEEYRLHEKPVPPSIDPSWLQLFPMVWAEKAGMGLANQVPPVVVELKSDASPVAVRQYPMSKEAREGIRPHIQRFLDLGILVPCQSPWNTPLLPVKKPGTNDYRPVQDLREVNKRVQDIHPTVPNPYNLLSSLPPSHTWYSVLDLKDAFFCLKLHPNSQPLFAFEWRDPEKGNTGQLTWTRLPQGFKNSPTLFNEALHRDLASFRALNPQVVMLQYVDDLLVAAPTYRDCKEGTRRLLQELSKLGYRVSAKKAQLCREEVTYLGYLLKGGKRWLTPARKATVMKIPTPTTPRQVREFLGTAGFCRLWIPGFASLAAPLYPLTRPKVPFTWTEAHQEAFGRIKEALLSAPALALPDLTKPFALYVDEKEGVARGVLTQTLGPWRRPVAYLSKKLDPVASGWPTCLKAIAAVALLLKDADKLTLGQNVLVIAPHNLESIVRQPPDRWMTNARMTHYQSLLLNERVSFAPPAILNPATLLPVESDDTPIHICSEILAEETGTRPDLRDQPLPGVPAWYTDGSSFIMDGRRQAGAAIVDNKRTVWASNLPEGTSAQKAELIALTQALRLAEGKSINIYTDSRYAFATAHVHGAIYKQRGWLTSAGKDIKNKEEILALLEAIHLPKRVAIIHCPGHQRGTDPVATGNRKADEAAKQAAQSTRILTETTKNAGKRTADGSEFEKRTADGSEFESPKKKAKVE

SEQ ID NO: 7111 - protein, 2218 aa, synthetic construct
MPAAKRVKLDGGDKKYSIGLDIGTNSVGWAVITDEYKVPSKKFKVLGNTDRHSIKKNLIGALLFDSGETAEATRLKRTARRRYTRRKNRICYLQEIFSNEMAKVDDSFFHRLEESFLVEEDKKHERHPIFGNIVDEVAYHEKYPTIYHLRKKLVDSTDKADLRLIYLALAHMIKFRGHFLIEGDLNPDNSDVDKLFIQLVQTYNQLFEENPINASGVDAKAILSARLSKSRRLENLIAQLPGEKKNGLFGNLIALSLGLTPNFKSNFDLAEDAKLQLSKDTYDDDLDNLLAQIGDQYADLFLAAKNLSDAILLSDILRVNTEITKAPLSASMIKRYDEHHQDLTLLKALVRQQLPEKYKEIFFDQSKNGYAGYIDGGASQEEFYKFIKPILEKMDGTEELLVKLNREDLLRKQRTFDNGSIPHQIHLGELHAILRRQEDFYPFLKDNREKIEKILTFRIPYYVGPLARGNSRFAWMTRKSEETITPWNFEEVVDKGASAQSFIERMTNFDKNLPNEKVLPKHSLLYEYFTVYNELTKVKYVTEGMRKPAFLSGEQKKAIVDLLFKTNRKVTVKQLKEDYFKKIECFDSVEISGVEDRFNASLGTYHDLLKIIKDKDFLDNEENEDILEDIVLTLTLFEDREMIEERLKTYAHLFDDKVMKQLKRRRYTGWGRLSRKLINGIRDKQSGKTILDFLKSDGFANRNFMQLIHDDSLTFKEDIQKAQVSGQGDSLHEHIANLAGSPAIKKGILQTVKVVDELVKVMGRHKPENIVIEMARENQTTQKGQKNSRERMKRIEEGIKELGSQILKEHPVENTQLQNEKLYLYYLQNGRDMYVDQELDINRLSDYDVDHIVPQSFLKDDSIDNKVLTRSDKARGKSDNVPSEEVVKKMKNYWRQLLNAKLITQRKFDNLTKAERGGLSELDKAGFIKRQLVETRQITKHVAQILDSRMNTKYDENDKLIREVKVITLKSKLVSDFRKDFQFYKVREINNYHHAHDAYLNAVVGTALIKKYPKLESEFVYGDYKVYDVRKMIAKSEQEIGKATAKYFFYSNIMNFFKTEITLANGEIRKRPLIETNGETGEIVWDKGRDFATVRKVLSMPQVNIVKKTEVQTGGFSKESILPKRNSDKLIARKKDWDPKKYGGFDSPTVAYSVLVVAKVEKGKSKKLKSVKELLGITIMERSSFEKNPIDFLEAKGYKEVKKDLIIKLPKYSLFELENGRKRMLASAGELQKGNELALPSKYVNFLYLASHYEKLKGSPEDNEQKQLFVEQHKHYLDEIIEQISEFSKRVILADANLDKVLSAYNKHRDKPIREQAENIIHLFTLTNLGAPAAFKYFDTTIDRKRYTSTKEVLDATLIHQSITGLYETRIDLSQLGGDGGEAAAKGSSGGSGGTLGDQGSRGSDPLPEPRVTLTVEGIPTEFLVNTGAEHSVLTKPMGKMGSKRTVVAGATGSKVYPWTTKRLLKIGQKQVTHSFLVIPECPAPLLGRDLLTKLKAQIQFSTEGPQVTWEDRPAMCLVLNLEEEYRLHEKPVPPSIDPSWLQLFPMVWAEKAGMGLANQVPPVVVELKSDASPVAVRQYPMSKEAREGIRPHIQRFLDLGILVPCQSPWNTPLLPVKKPGTNDYRPVQDLREVNKRVQDIHPTVPNPYNLLSSLPPSHTWYSVLDLKDAFFCLKLHPNSQPLFAFEWRDPEKGNTGQLTWTRLPQGFKNSPTLFNEALHRDLASFRALNPQVVMLQYVDDLLVAAPTYRDCKEGTRRLLQELSKLGYRVSAKKAQLCREEVTYLGYLLKGGKRWLTPARKATVMKIPTPTTPRQVREFLGTAGFCRLWIPGFASLAAPLYPLTRPKVPFTWTEAHQEAFGRIKEALLSAPALALPDLTKPFALYVDEKEGVARGVLTQTLGPWRRPVAYLSKKLDPVASGWPTCLKAIAAVALLLKDADKLTLGQNVLVIAPHNLESIVRQPPDRWMTNARMTHYQSLLLNERVSFAPPAILNPATLLPVESDDTPIHICSEILAEETGTRPDLRDQPLPGVPAWYTDGSSFIMDGRRQAGAAIVDNKRTVWASNLPEGTSAQKAELIALTQALRLAEGKSINIYTDSRYAFATAHVHGAIYKQRGWLTSAGKDIKNKEEILALLEAIHLPKRVAIIHCPGHQRGTDPVATGNRKADEAAKQAAQSTRILTETTKNAGKRTADGSEFEKRTADGSEFESPKKKAKVE

SEQ ID NO: 7112 - protein, 2218 aa, synthetic construct
MPAAKRVKLDGGDKKYSIGLDIGTNSVGWAVITDEYKVPSKKFKVLGNTDRHSIKKNLIGALLFDSGETAEATRLKRTARRRYTRRKNRICYLQEIFSNEMAKVDDSFFHRLEESFLVEEDKKHERHPIFGNIVDEVAYHEKYPTIYHLRKKLVDSTDKADLRLIYLALAHMIKFRGHFLIEGDLNPDNSDVDKLFIQLVQTYNQLFEENPINASGVDAKAILSARLSKSRRLENLIAQLPGEKKNGLFGNLIALSLGLTPNFKSNFDLAEDAKLQLSKDTYDDDLDNLLAQIGDQYADLFLAAKNLSDAILLSDILRVNTEITKAPLSASMIKRYDEHHQDLTLLKALVRQQLPEKYKEIFFDQSKNGYAGYIDGGASQEEFYKFIKPILEKMDGTEELLVKLNREDLLRKQRTFDNGSIPHQIHLGELHAILRRQEDFYPFLKDNREKIEKILTFRIPYYVGPLARGNSRFAWMTRKSEETITPWNFEEVVDKGASAQSFIERMTNFDKNLPNEKVLPKHSLLYEYFTVYNELTKVKYVTEGMRKPAFLSGEQKKAIVDLLFKTNRKVTVKQLKEDYFKKIECFDSVEISGVEDRFNASLGTYHDLLKIIKDKDFLDNEENEDILEDIVLTLTLFEDREMIEERLKTYAHLFDDKVMKQLKRRRYTGWGRLSRKLINGIRDKQSGKTILDFLKSDGFANRNFMQLIHDDSLTFKEDIQKAQVSGQGDSLHEHIANLAGSPAIKKGILQTVKVVDELVKVMGRHKPENIVIEMARENQTTQKGQKNSRERMKRIEEGIKELGSQILKEHPVENTQLQNEKLYLYYLQNGRDMYVDQELDINRLSDYDVDHIVPQSFLKDDSIDNKVLTRSDKARGKSDNVPSEEVVKKMKNYWRQLLNAKLITQRKFDNLTKAERGGLSELDKAGFIKRQLVETRQITKHVAQILDSRMNTKYDENDKLIREVKVITLKSKLVSDFRKDFQFYKVREINNYHHAHDAYLNAVVGTALIKKYPKLESEFVYGDYKVYDVRKMIAKSEQEIGKATAKYFFYSNIMNFFKTEITLANGEIRKRPLIETNGETGEIVWDKGRDFATVRKVLSMPQVNIVKKTEVQTGGFSKESILPKRNSDKLIARKKDWDPKKYGGFDSPTVAYSVLVVAKVEKGKSKKLKSVKELLGITIMERSSFEKNPIDFLEAKGYKEVKKDLIIKLPKYSLFELENGRKRMLASAGELQKGNELALPSKYVNFLYLASHYEKLKGSPEDNEQKQLFVEQHKHYLDEIIEQISEFSKRVILADANLDKVLSAYNKHRDKPIREQAENIIHLFTLTNLGAPAAFKYFDTTIDRKRYTSTKEVLDATLIHQSITGLYETRIDLSQLGGDGGEAAAKGSSGGSGGTLGDQGSRGSDPLPEPRVTLTVEGIPTEFLVNTGAEHSVLTKPMGKMGSKRTVVAGATGSKVYPWTTKRLLKIGQKQVTHSFLVIPECPAPLLGRDLLTKLKAQIQFSTEGPQVTWEDRPAMCLVLNLEEEYRLHEKPVPPSIDPSWLQLFPMVWAEKAGMGLANQVPPVVVELKSDASPVAVRQYPMSKEAREGIRPHIQRFLDLGILVPCQSPWNTPLLPVKKPGTNDYRPVQDLREVNKRVQDIHPTVPNPYNLLSSLPPSHTWYSVLDLKDAFFCLKLHPNSQPLFAFEWRDPEKGNTGQLTWTRLPQGFKNSPTLFNEALHRDLASFRALNPQVVMLQYVDDLLVAAPTYRDCKEGTRRLLQELSKLGYRVSAKKAQLCREEVTYLGYLLKGGKRWLTPARKATVMKIPTPTTPRQVREFLGKAGFCRLFIPGFASLAAPLYPLTRPKVPFTWTEAHQEAFGRIKEALLSAPALALPDLTKPFALYVDEKEGVARGVLTQTLGPWRRPVAYLSKKLDPVASGWPTCLKAIAAVALLLKDADKLTLGQNVLVIAPHNLESIVRQPPDRWMTNARMTHYQSLLLNERVSFAPPAILNPATLLPVESDDTPIHICSEILAEETGTRPDLRDQPLPGVPAWYTDGSSFIMDGRRQAGAAIVDNKRTVWASNLPEGTSAQKAELIALTQALRLAEGKSINIYTDSRYAFATAHVHGAIYKQRGWLTSAGKDIKNKEEILALLEAIHLPKRVAIIHCPGHQRGTDPVATGNRKADEAAKQAAQSTRILTETTKNAGKRTADGSEFEKRTADGSEFESPKKKAKVE

SEQ ID NO: 7113 - protein, 2096 aa, synthetic construct
MPAAKRVKLDGGDKKYSIGLDIGTNSVGWAVITDEYKVPSKKFKVLGNTDRHSIKKNLIGALLFDSGETAEATRLKRTARRRYTRRKNRICYLQEIFSNEMAKVDDSFFHRLEESFLVEEDKKHERHPIFGNIVDEVAYHEKYPTIYHLRKKLVDSTDKADLRLIYLALAHMIKFRGHFLIEGDLNPDNSDVDKLFIQLVQTYNQLFEENPINASGVDAKAILSARLSKSRRLENLIAQLPGEKKNGLFGNLIALSLGLTPNFKSNFDLAEDAKLQLSKDTYDDDLDNLLAQIGDQYADLFLAAKNLSDAILLSDILRVNTEITKAPLSASMIKRYDEHHQDLTLLKALVRQQLPEKYKEIFFDQSKNGYAGYIDGGASQEEFYKFIKPILEKMDGTEELLVKLNREDLLRKQRTFDNGSIPHQIHLGELHAILRRQEDFYPFLKDNREKIEKILTFRIPYYVGPLARGNSRFAWMTRKSEETITPWNFEEVVDKGASAQSFIERMTNFDKNLPNEKVLPKHSLLYEYFTVYNELTKVKYVTEGMRKPAFLSGEQKKAIVDLLFKTNRKVTVKQLKEDYFKKIECFDSVEISGVEDRFNASLGTYHDLLKIIKDKDFLDNEENEDILEDIVLTLTLFEDREMIEERLKTYAHLFDDKVMKQLKRRRYTGWGRLSRKLINGIRDKQSGKTILDFLKSDGFANRNFMQLIHDDSLTFKEDIQKAQVSGQGDSLHEHIANLAGSPAIKKGILQTVKVVDELVKVMGRHKPENIVIEMARENQTTQKGQKNSRERMKRIEEGIKELGSQILKEHPVENTQLQNEKLYLYYLQNGRDMYVDQELDINRLSDYDVDHIVPQSFLKDDSIDNKVLTRSDKARGKSDNVPSEEVVKKMKNYWRQLLNAKLITQRKFDNLTKAERGGLSELDKAGFIKRQLVETRQITKHVAQILDSRMNTKYDENDKLIREVKVITLKSKLVSDFRKDFQFYKVREINNYHHAHDAYLNAVVGTALIKKYPKLESEFVYGDYKVYDVRKMIAKSEQEIGKATAKYFFYSNIMNFFKTEITLANGEIRKRPLIETNGETGEIVWDKGRDFATVRKVLSMPQVNIVKKTEVQTGGFSKESILPKRNSDKLIARKKDWDPKKYGGFDSPTVAYSVLVVAKVEKGKSKKLKSVKELLGITIMERSSFEKNPIDFLEAKGYKEVKKDLIIKLPKYSLFELENGRKRMLASAGELQKGNELALPSKYVNFLYLASHYEKLKGSPEDNEQKQLFVEQHKHYLDEIIEQISEFSKRVILADANLDKVLSAYNKHRDKPIREQAENIIHLFTLTNLGAPAAFKYFDTTIDRKRYTSTKEVLDATLIHQSITGLYETRIDLSQLGGDGGEAAAKGSSGGSGGTLNLEDEYRLYETSAEPEVSPGSTWLSDFPQAWAETGGMGLAVRQAPLIIPLKATSTPVSIKQYPMSQEAKLGIKPHIQRLLDQGILVPCQSPWNTPLLPVKKPGTNDYRPVQDLREVNKRVEDIHPTVPNPYNLLSGLPPSHRWYTVLDLKDAFFCLRLHPTSQPLFAFEWRDPGMGISGQLTWTRLPQGFKNSPTLFNEALHRDLADFRIQHPDLILLQYVDDILLAATSELDCQQGTRALLLTLGNLGYRASAKKAQLCQKQVKYLGYLLKEGQRWLTEARKETVMGQPTPKTPRQLREFLGTAGFCRLWIPGFAEMAAPLYPLTKPGTLFNWGPDQQKAYQEIKQALLTAPALGLPDLTKPFELFVDEKQGYAKGVLTQKLGPWRRPVAYLSKKLDPVAAGWPPCLRMVAAIAVLRKDAGKLTMGQPLVILAPHAVEALVKQPPDRWLSNARMTHYQAMLLDTDRVQFGPVVALNPATLLPLPEEGAPHDCLEILAETHGTRPDLTDQPIPDADHTWYTDGSSFLQEGQRKAGAAVTTETEVIWARALPAGTSAQRAELIALTQALKMAEGKRLNVYTDSRYAFATAHIHGEIYRRRGWLTSEGREIKNKSEILALLKALFLPKRLSIIHCLGHQKGDSAEARGNRLADQAAREAAIKTPPDTSTLLAGKRTADGSEFEKRTADGSEFESPKKKAKVE

SEQ ID NO: 7114 - protein, 2096 aa, synthetic construct
MPAAKRVKLDGGDKKYSIGLDIGTNSVGWAVITDEYKVPSKKFKVLGNTDRHSIKKNLIGALLFDSGETAEATRLKRTARRRYTRRKNRICYLQEIFSNEMAKVDDSFFHRLEESFLVEEDKKHERHPIFGNIVDEVAYHEKYPTIYHLRKKLVDSTDKADLRLIYLALAHMIKFRGHFLIEGDLNPDNSDVDKLFIQLVQTYNQLFEENPINASGVDAKAILSARLSKSRRLENLIAQLPGEKKNGLFGNLIALSLGLTPNFKSNFDLAEDAKLQLSKDTYDDDLDNLLAQIGDQYADLFLAAKNLSDAILLSDILRVNTEITKAPLSASMIKRYDEHHQDLTLLKALVRQQLPEKYKEIFFDQSKNGYAGYIDGGASQEEFYKFIKPILEKMDGTEELLVKLNREDLLRKQRTFDNGSIPHQIHLGELHAILRRQEDFYPFLKDNREKIEKILTFRIPYYVGPLARGNSRFAWMTRKSEETITPWNFEEVVDKGASAQSFIERMTNFDKNLPNEKVLPKHSLLYEYFTVYNELTKVKYVTEGMRKPAFLSGEQKKAIVDLLFKTNRKVTVKQLKEDYFKKIECFDSVEISGVEDRFNASLGTYHDLLKIIKDKDFLDNEENEDILEDIVLTLTLFEDREMIEERLKTYAHLFDDKVMKQLKRRRYTGWGRLSRKLINGIRDKQSGKTILDFLKSDGFANRNFMQLIHDDSLTFKEDIQKAQVSGQGDSLHEHIANLAGSPAIKKGILQTVKVVDELVKVMGRHKPENIVIEMARENQTTQKGQKNSRERMKRIEEGIKELGSQILKEHPVENTQLQNEKLYLYYLQNGRDMYVDQELDINRLSDYDVDHIVPQSFLKDDSIDNKVLTRSDKARGKSDNVPSEEVVKKMKNYWRQLLNAKLITQRKFDNLTKAERGGLSELDKAGFIKRQLVETRQITKHVAQILDSRMNTKYDENDKLIREVKVITLKSKLVSDFRKDFQFYKVREINNYHHAHDAYLNAVVGTALIKKYPKLESEFVYGDYKVYDVRKMIAKSEQEIGKATAKYFFYSNIMNFFKTEITLANGEIRKRPLIETNGETGEIVWDKGRDFATVRKVLSMPQVNIVKKTEVQTGGFSKESILPKRNSDKLIARKKDWDPKKYGGFDSPTVAYSVLVVAKVEKGKSKKLKSVKELLGITIMERSSFEKNPIDFLEAKGYKEVKKDLIIKLPKYSLFELENGRKRMLASAGELQKGNELALPSKYVNFLYLASHYEKLKGSPEDNEQKQLFVEQHKHYLDEIIEQISEFSKRVILADANLDKVLSAYNKHRDKPIREQAENIIHLFTLTNLGAPAAFKYFDTTIDRKRYTSTKEVLDATLIHQSITGLYETRIDLSQLGGDGGEAAAKGSSGGSGGTLNIEDEYRLHETSKGPDVPLGSTWLSDFPQAWAETGGMGLAVRQAPLIIPLKATSTPVSIKQYPMSQEARLGIKPHIQRLLDQGILVPCQSPWNTPLLPVKKPGTNDYRPVQDLREVNKRVEDIHPTVPNPYNLLSGLPPSHQWYTVLDLKDAFFCLRLHPTSQSLFAFEWRDPEMGISGQLTWTRLPQGFKNSPTLFDEALHRDLADFRIQHPDLILLQYVDDLLLAATSELDCQQGTRALLQTLGDLGYRASAKKAQICQKQVKYLGYLLKEGQRWLTEARKETVMGQPTPKTPRQLREFLGTAGFCRLWIPGFAEMAAPLYPLTKTGTLFEWGPDQQKAYQEIKQALLTAPALGLPDLTKPFELFVDEKQGYAKGVLTQKLGPWRRPVAYLSKKLDPVAAGWPPCLRMVAAIAVLTKDAGKLTMGQPLVILAPHAVEALVKQPPDRWLSNARMTHYQALLLDTDRVQFGPIVALNPATLLPLPEEGLQHDCLDILAEAHGTRPDLTDQPLPDADHTWYTDGSSFLQEGQRKAGAAVTTETEVVWAKALPAGTSAQRAELIALTQALKMAEGKKLNVYTDSRYAFATAHIHGEIYRRRGLLTSEGKEIKNKDEILALLKALFLPKRLSIIHCPGHQKGNRAEARGNRMADQAAREVATRETPETSTLLAGKRTADGSEFEKRTADGSEFESPKKKAKVE

SEQ ID NO: 7115 - protein, 2096 aa, synthetic construct
MPAAKRVKLDGGDKKYSIGLDIGTNSVGWAVITDEYKVPSKKFKVLGNTDRHSIKKNLIGALLFDSGETAEATRLKRTARRRYTRRKNRICYLQEIFSNEMAKVDDSFFHRLEESFLVEEDKKHERHPIFGNIVDEVAYHEKYPTIYHLRKKLVDSTDKADLRLIYLALAHMIKFRGHFLIEGDLNPDNSDVDKLFIQLVQTYNQLFEENPINASGVDAKAILSARLSKSRRLENLIAQLPGEKKNGLFGNLIALSLGLTPNFKSNFDLAEDAKLQLSKDTYDDDLDNLLAQIGDQYADLFLAAKNLSDAILLSDILRVNTEITKAPLSASMIKRYDEHHQDLTLLKALVRQQLPEKYKEIFFDQSKNGYAGYIDGGASQEEFYKFIKPILEKMDGTEELLVKLNREDLLRKQRTFDNGSIPHQIHLGELHAILRRQEDFYPFLKDNREKIEKILTFRIPYYVGPLARGNSRFAWMTRKSEETITPWNFEEVVDKGASAQSFIERMTNFDKNLPNEKVLPKHSLLYEYFTVYNELTKVKYVTEGMRKPAFLSGEQKKAIVDLLFKTNRKVTVKQLKEDYFKKIECFDSVEISGVEDRFNASLGTYHDLLKIIKDKDFLDNEENEDILEDIVLTLTLFEDREMIEERLKTYAHLFDDKVMKQLKRRRYTGWGRLSRKLINGIRDKQSGKTILDFLKSDGFANRNFMQLIHDDSLTFKEDIQKAQVSGQGDSLHEHIANLAGSPAIKKGILQTVKVVDELVKVMGRHKPENIVIEMARENQTTQKGQKNSRERMKRIEEGIKELGSQILKEHPVENTQLQNEKLYLYYLQNGRDMYVDQELDINRLSDYDVDHIVPQSFLKDDSIDNKVLTRSDKARGKSDNVPSEEVVKKMKNYWRQLLNAKLITQRKFDNLTKAERGGLSELDKAGFIKRQLVETRQITKHVAQILDSRMNTKYDENDKLIREVKVITLKSKLVSDFRKDFQFYKVREINNYHHAHDAYLNAVVGTALIKKYPKLESEFVYGDYKVYDVRKMIAKSEQEIGKATAKYFFYSNIMNFFKTEITLANGEIRKRPLIETNGETGEIVWDKGRDFATVRKVLSMPQVNIVKKTEVQTGGFSKESILPKRNSDKLIARKKDWDPKKYGGFDSPTVAYSVLVVAKVEKGKSKKLKSVKELLGITIMERSSFEKNPIDFLEAKGYKEVKKDLIIKLPKYSLFELENGRKRMLASAGELQKGNELALPSKYVNFLYLASHYEKLKGSPEDNEQKQLFVEQHKHYLDEIIEQISEFSKRVILADANLDKVLSAYNKHRDKPIREQAENIIHLFTLTNLGAPAAFKYFDTTIDRKRYTSTKEVLDATLIHQSITGLYETRIDLSQLGGDGGEAAAKGSSGGSGGTLNIEDEYRLHETSKGPDVPLGSTWLSDFPQAWAETGGMGLAVRQAPLIIPLKATSTPVSIKQYPMSQEARLGIKPHIQRLLDQGILVPCQSPWNTPLLPVKKPGTNDYRPVQDLREVNKRVEDIHPTVPNPYNLLSGLPPSHQWYTVLDLKDAFFCLRLHPTSQSLFAFEWRDPEMGISGQLTWTRLPQGFKNSPTLFNEALHRDLADFRIQHPDLILLQYVDDLLLAATSELDCQQGTRALLQTLGDLGYRASAKKAQICQKQVKYLGYLLKEGQRWLTEARKETVMGQPTPKTPRQLREFLGKAGFCRLFIPGFAEMAAPLYPLTKPGTLFEWGPDQQKAYQEIKQALLTAPALGLPDLTKPFELFVDEKQGYAKGVLTQKLGPWRRPVAYLSKKLDPVAAGWPPCLRMVAAIAVLTKDAGKLTMGQPLVILAPHAVEALVKQPPDRWLSNARMTHYQALLLDTDRVQFGPIVALNPATLLPLPEEGLQHDCLDILAEAHGTRPDLTDQPLPDADHTWYTDGSSFLQEGQRKAGAAVTTETEVVWAKALPAGTSAQRAELIALTQALKMAEGKKLNVYTDSRYAFATAHIHGEIYRRRGWLTSEGKEIKNKDEILALLKALFLPKRLSIIHCPGHQKGNRAEARGNRMADQAAREVATRETPETSTLLAGKRTADGSEFEKRTADGSEFESPKKKAKVE

SEQ ID NO: 7116 - protein, 2096 aa, synthetic construct
MPAAKRVKLDGGDKKYSIGLDIGTNSVGWAVITDEYKVPSKKFKVLGNTDRHSIKKNLIGALLFDSGETAEATRLKRTARRRYTRRKNRICYLQEIFSNEMAKVDDSFFHRLEESFLVEEDKKHERHPIFGNIVDEVAYHEKYPTIYHLRKKLVDSTDKADLRLIYLALAHMIKFRGHFLIEGDLNPDNSDVDKLFIQLVQTYNQLFEENPINASGVDAKAILSARLSKSRRLENLIAQLPGEKKNGLFGNLIALSLGLTPNFKSNFDLAEDAKLQLSKDTYDDDLDNLLAQIGDQYADLFLAAKNLSDAILLSDILRVNTEITKAPLSASMIKRYDEHHQDLTLLKALVRQQLPEKYKEIFFDQSKNGYAGYIDGGASQEEFYKFIKPILEKMDGTEELLVKLNREDLLRKQRTFDNGSIPHQIHLGELHAILRRQEDFYPFLKDNREKIEKILTFRIPYYVGPLARGNSRFAWMTRKSEETITPWNFEEVVDKGASAQSFIERMTNFDKNLPNEKVLPKHSLLYEYFTVYNELTKVKYVTEGMRKPAFLSGEQKKAIVDLLFKTNRKVTVKQLKEDYFKKIECFDSVEISGVEDRFNASLGTYHDLLKIIKDKDFLDNEENEDILEDIVLTLTLFEDREMIEERLKTYAHLFDDKVMKQLKRRRYTGWGRLSRKLINGIRDKQSGKTILDFLKSDGFANRNFMQLIHDDSLTFKEDIQKAQVSGQGDSLHEHIANLAGSPAIKKGILQTVKVVDELVKVMGRHKPENIVIEMARENQTTQKGQKNSRERMKRIEEGIKELGSQILKEHPVENTQLQNEKLYLYYLQNGRDMYVDQELDINRLSDYDVDHIVPQSFLKDDSIDNKVLTRSDKARGKSDNVPSEEVVKKMKNYWRQLLNAKLITQRKFDNLTKAERGGLSELDKAGFIKRQLVETRQITKHVAQILDSRMNTKYDENDKLIREVKVITLKSKLVSDFRKDFQFYKVREINNYHHAHDAYLNAVVGTALIKKYPKLESEFVYGDYKVYDVRKMIAKSEQEIGKATAKYFFYSNIMNFFKTEITLANGEIRKRPLIETNGETGEIVWDKGRDFATVRKVLSMPQVNIVKKTEVQTGGFSKESILPKRNSDKLIARKKDWDPKKYGGFDSPTVAYSVLVVAKVEKGKSKKLKSVKELLGITIMERSSFEKNPIDFLEAKGYKEVKKDLIIKLPKYSLFELENGRKRMLASAGELQKGNELALPSKYVNFLYLASHYEKLKGSPEDNEQKQLFVEQHKHYLDEIIEQISEFSKRVILADANLDKVLSAYNKHRDKPIREQAENIIHLFTLTNLGAPAAFKYFDTTIDRKRYTSTKEVLDATLIHQSITGLYETRIDLSQLGGDGGEAAAKGSSGGSGGTLNIEDEHRLHETSKEPDVSLGSTWLSDFPQAWAETGGMGLAVRQAPLIIPLKATSTPVSIKQYPMSQEARLGIKPHIQRLLDQGILVPCQSPWNTPLLPVKKPGTNDYRPVQDLREVNKRVEDIHPTVPNPYNLLSGLPPSHQWYTVLDLKDAFFCLRLHPTSQPLFAFEWRDPEMGISGQLTWTRLPQGFKNSPTLFDEALHRDLADFRIQHPDLILLQYVDDLLLAATSELDCQQGTRALLQTLGNLGYRASAKKAQICQKQVKYLGYLLKEGQRWLTEARKETVMGQPTPKTPRQLREFLGTAGFCRLWIPGFAEMAAPLYPLTKTGTLFNWGPDQQKAYQEIKQALLTAPALGLPDLTKPFELFVDEKQGYAKGVLTQKLGPWRRPVAYLSKKLDPVAAGWPPCLRMVAAIAVLTKDAGKLTMGQPLVILAPHAVEALVKQPPDRWLSNARMTHYQALLLDTDRVQFGPVVALNPATLLPLPEEGLQHNCLDILAEAHGTRPDLTDQPLPDADHTWYTDGSSLLQEGQRKAGAAVTTETEVIWAKALPAGTSAQRAELIALTQALKMAEGKKLNVYTDSRYAFATAHIHGEIYRRRGLLTSEGKEIKNKDEILALLKALFLPKRLSIIHCPGHQKGHSAEARGNRMADQAARKAAITETPDTSTLLAGKRTADGSEFEKRTADGSEFESPKKKAKVE

SEQ ID NO: 7117 - protein, 2090 aa, synthetic construct
MPAAKRVKLDGGDKKYSIGLDIGTNSVGWAVITDEYKVPSKKFKVLGNTDRHSIKKNLIGALLFDSGETAEATRLKRTARRRYTRRKNRICYLQEIFSNEMAKVDDSFFHRLEESFLVEEDKKHERHPIFGNIVDEVAYHEKYPTIYHLRKKLVDSTDKADLRLIYLALAHMIKFRGHFLIEGDLNPDNSDVDKLFIQLVQTYNQLFEENPINASGVDAKAILSARLSKSRRLENLIAQLPGEKKNGLFGNLIALSLGLTPNFKSNFDLAEDAKLQLSKDTYDDDLDNLLAQIGDQYADLFLAAKNLSDAILLSDILRVNTEITKAPLSASMIKRYDEHHQDLTLLKALVRQQLPEKYKEIFFDQSKNGYAGYIDGGASQEEFYKFIKPILEKMDGTEELLVKLNREDLLRKQRTFDNGSIPHQIHLGELHAILRRQEDFYPFLKDNREKIEKILTFRIPYYVGPLARGNSRFAWMTRKSEETITPWNFEEVVDKGASAQSFIERMTNFDKNLPNEKVLPKHSLLYEYFTVYNELTKVKYVTEGMRKPAFLSGEQKKAIVDLLFKTNRKVTVKQLKEDYFKKIECFDSVEISGVEDRFNASLGTYHDLLKIIKDKDFLDNEENEDILEDIVLTLTLFEDREMIEERLKTYAHLFDDKVMKQLKRRRYTGWGRLSRKLINGIRDKQSGKTILDFLKSDGFANRNFMQLIHDDSLTFKEDIQKAQVSGQGDSLHEHIANLAGSPAIKKGILQTVKVVDELVKVMGRHKPENIVIEMARENQTTQKGQKNSRERMKRIEEGIKELGSQILKEHPVENTQLQNEKLYLYYLQNGRDMYVDQELDINRLSDYDVDHIVPQSFLKDDSIDNKVLTRSDKARGKSDNVPSEEVVKKMKNYWRQLLNAKLITQRKFDNLTKAERGGLSELDKAGFIKRQLVETRQITKHVAQILDSRMNTKYDENDKLIREVKVITLKSKLVSDFRKDFQFYKVREINNYHHAHDAYLNAVVGTALIKKYPKLESEFVYGDYKVYDVRKMIAKSEQEIGKATAKYFFYSNIMNFFKTEITLANGEIRKRPLIETNGETGEIVWDKGRDFATVRKVLSMPQVNIVKKTEVQTGGFSKESILPKRNSDKLIARKKDWDPKKYGGFDSPTVAYSVLVVAKVEKGKSKKLKSVKELLGITIMERSSFEKNPIDFLEAKGYKEVKKDLIIKLPKYSLFELENGRKRMLASAGELQKGNELALPSKYVNFLYLASHYEKLKGSPEDNEQKQLFVEQHKHYLDEIIEQISEFSKRVILADANLDKVLSAYNKHRDKPIREQAENIIHLFTLTNLGAPAAFKYFDTTIDRKRYTSTKEVLDATLIHQSITGLYETRIDLSQLGGDGGEAAAKGSSGGSGGTLQLDDEYRLYSPLVKPDQNIQFWLEQFPQAWAETAGMGLAKQVPPQVIQLKASATPVSVRQYPLSKEAQEGIRPHVQRLIQQGILVPVQSPWNTPLLPVRKPGTNDYRPVQDLREVNKRVQDIHPTVPNPYNLLCALPPQRSWYTVLDLKDAFFCLRLHPTSQPLFAFEWRDPGTGRTGQLTWTRLPQGFKNSPTIFDEALHRDLANFRIQHPQVTLLQYVDDLLLAGATKQDCLEGTKALLLELSDLGYRASAKKAQICRREVTYLGYSLRDGQRWLTEARKKTVVQIPAPTTAKQVREFLGTAGFCRLWIPGFATLAAPLYPLTKEKGEFSWAPEHQKAFDAIKKALLSAPALALPDVTKPFTLYVDERKGVARGVLTQTLGPWRRPVAYLSKKLDPVASGWPVCLKAIAAVAILVKDADKLTLGQNITVIAPHALENIVRQPPDRWMTNARMTHYQSLLLTERVTFAPPAALNPATLLPEETDEPVTHDCHQLLIEETGVRKDLTDIPLTGEVLTWFTDGSSYVVEGKRMAGAAVVDGTRTIWASSLPEGTSAQKAELMALTQALRLAEGKSINIYTDSRYAFATAHVHGAIYKQRGLLTSAGREIKNKEEILSLLEALHLPKRLAIIHCPGHQKAKDPISRGNQMADRVAKQAAQGVNLLAGKRTADGSEFEKRTADGSEFESPKKKAKVE

SEQ ID NO: 7118 - protein, 2176 aa, synthetic construct
MPAAKRVKLDGGDKKYSIGLDIGTNSVGWAVITDEYKVPSKKFKVLGNTDRHSIKKNLIGALLFDSGETAEATRLKRTARRRYTRRKNRICYLQEIFSNEMAKVDDSFFHRLEESFLVEEDKKHERHPIFGNIVDEVAYHEKYPTIYHLRKKLVDSTDKADLRLIYLALAHMIKFRGHFLIEGDLNPDNSDVDKLFIQLVQTYNQLFEENPINASGVDAKAILSARLSKSRRLENLIAQLPGEKKNGLFGNLIALSLGLTPNFKSNFDLAEDAKLQLSKDTYDDDLDNLLAQIGDQYADLFLAAKNLSDAILLSDILRVNTEITKAPLSASMIKRYDEHHQDLTLLKALVRQQLPEKYKEIFFDQSKNGYAGYIDGGASQEEFYKFIKPILEKMDGTEELLVKLNREDLLRKQRTFDNGSIPHQIHLGELHAILRRQEDFYPFLKDNREKIEKILTFRIPYYVGPLARGNSRFAWMTRKSEETITPWNFEEVVDKGASAQSFIERMTNFDKNLPNEKVLPKHSLLYEYFTVYNELTKVKYVTEGMRKPAFLSGEQKKAIVDLLFKTNRKVTVKQLKEDYFKKIECFDSVEISGVEDRFNASLGTYHDLLKIIKDKDFLDNEENEDILEDIVLTLTLFEDREMIEERLKTYAHLFDDKVMKQLKRRRYTGWGRLSRKLINGIRDKQSGKTILDFLKSDGFANRNFMQLIHDDSLTFKEDIQKAQVSGQGDSLHEHIANLAGSPAIKKGILQTVKVVDELVKVMGRHKPENIVIEMARENQTTQKGQKNSRERMKRIEEGIKELGSQILKEHPVENTQLQNEKLYLYYLQNGRDMYVDQELDINRLSDYDVDHIVPQSFLKDDSIDNKVLTRSDKARGKSDNVPSEEVVKKMKNYWRQLLNAKLITQRKFDNLTKAERGGLSELDKAGFIKRQLVETRQITKHVAQILDSRMNTKYDENDKLIREVKVITLKSKLVSDFRKDFQFYKVREINNYHHAHDAYLNAVVGTALIKKYPKLESEFVYGDYKVYDVRKMIAKSEQEIGKATAKYFFYSNIMNFFKTEITLANGEIRKRPLIETNGETGEIVWDKGRDFATVRKVLSMPQVNIVKKTEVQTGGFSKESILPKRNSDKLIARKKDWDPKKYGGFDSPTVAYSVLVVAKVEKGKSKKLKSVKELLGITIMERSSFEKNPIDFLEAKGYKEVKKDLIIKLPKYSLFELENGRKRMLASAGELQKGNELALPSKYVNFLYLASHYEKLKGSPEDNEQKQLFVEQHKHYLDEIIEQISEFSKRVILADANLDKVLSAYNKHRDKPIREQAENIIHLFTLTNLGAPAAFKYFDTTIDRKRYTSTKEVLDATLIHQSITGLYETRIDLSQLGGDGGEAAAKGSSGGSGGMDPLQLLQPLEAEIKGTKLKAHWNSGATITCVPQAFLEEEVPIKNIWIKTIHGEKEQPVYYLTFKIQGRKVEAEVISSPYDYILVSPSDIPWLMKKPLQLTTLVPLQEYEERLLKQTMLTGSYKEKLQSLFLKYDALWQHWENQVGHRRIKPHHIATGTVNPRPQKQYPINPKAKASIQTVINDLLKQGVLIQQNSIMNTPVYPVPKPDGKWRMVLDYREVNKTIPLIAAQNQHSAGILSSIFRGKYKTTLDLSNGFWAHSITPESYWLTAFTWLGQQYCWTRLPQGFLNSPALFNADVVDLLKEVPNVQVYVDDIYISHDDPREHLEQLEKVFSLLLNAGYVVSLKKSEIAQHEVEFLGFNITKEGRGLTETFKQKLLNITPPRDLKQLQSILGLLNFARNFIPNFSELVKPLYNIIATAPGKYITWTTDNSQQLQNIISMLNSAENLEERNPEVRLIMKVNTSPSAGYIRFYNEFAKRPIMYLNYVYTKAEVKFTNTEKLLTTIHKGLIKALDLGMGQEILVYSPIVSMTKIQKTPLPERKALPIRWITWMSYLEDPRIQFHYDKTLPELQQVPTVTDDIIAKIKHPSEFSMVFYTDGSAIKHPNVNKSHNAGMGIAQVQFKPEFTVINTWSIPLGDHTAQLAEVAAVEFACKKALKIDGPVLIVTDSFYVAESVNKELPYWQSNGFFNNKKKPLKHVSKWKSIADCIQLKPDIIIIHEKGHQPTASTFHTEGNNLADKLATQGSYVVNAGKRTADGSEFEKRTADGSEFESPKKKAKVE

SEQ ID NO: 7119 - protein, 2094 aa, synthetic construct
MPAAKRVKLDGGDKKYSIGLDIGTNSVGWAVITDEYKVPSKKFKVLGNTDRHSIKKNLIGALLFDSGETAEATRLKRTARRRYTRRKNRICYLQEIFSNEMAKVDDSFFHRLEESFLVEEDKKHERHPIFGNIVDEVAYHEKYPTIYHLRKKLVDSTDKADLRLIYLALAHMIKFRGHFLIEGDLNPDNSDVDKLFIQLVQTYNQLFEENPINASGVDAKAILSARLSKSRRLENLIAQLPGEKKNGLFGNLIALSLGLTPNFKSNFDLAEDAKLQLSKDTYDDDLDNLLAQIGDQYADLFLAAKNLSDAILLSDILRVNTEITKAPLSASMIKRYDEHHQDLTLLKALVRQQLPEKYKEIFFDQSKNGYAGYIDGGASQEEFYKFIKPILEKMDGTEELLVKLNREDLLRKQRTFDNGSIPHQIHLGELHAILRRQEDFYPFLKDNREKIEKILTFRIPYYVGPLARGNSRFAWMTRKSEETITPWNFEEVVDKGASAQSFIERMTNFDKNLPNEKVLPKHSLLYEYFTVYNELTKVKYVTEGMRKPAFLSGEQKKAIVDLLFKTNRKVTVKQLKEDYFKKIECFDSVEISGVEDRFNASLGTYHDLLKIIKDKDFLDNEENEDILEDIVLTLTLFEDREMIEERLKTYAHLFDDKVMKQLKRRRYTGWGRLSRKLINGIRDKQSGKTILDFLKSDGFANRNFMQLIHDDSLTFKEDIQKAQVSGQGDSLHEHIANLAGSPAIKKGILQTVKVVDELVKVMGRHKPENIVIEMARENQTTQKGQKNSRERMKRIEEGIKELGSQILKEHPVENTQLQNEKLYLYYLQNGRDMYVDQELDINRLSDYDVDHIVPQSFLKDDSIDNKVLTRSDKARGKSDNVPSEEVVKKMKNYWRQLLNAKLITQRKFDNLTKAERGGLSELDKAGFIKRQLVETRQITKHVAQILDSRMNTKYDENDKLIREVKVITLKSKLVSDFRKDFQFYKVREINNYHHAHDAYLNAVVGTALIKKYPKLESEFVYGDYKVYDVRKMIAKSEQEIGKATAKYFFYSNIMNFFKTEITLANGEIRKRPLIETNGETGEIVWDKGRDFATVRKVLSMPQVNIVKKTEVQTGGFSKESILPKRNSDKLIARKKDWDPKKYGGFDSPTVAYSVLVVAKVEKGKSKKLKSVKELLGITIMERSSFEKNPIDFLEAKGYKEVKKDLIIKLPKYSLFELENGRKRMLASAGELQKGNELALPSKYVNFLYLASHYEKLKGSPEDNEQKQLFVEQHKHYLDEIIEQISEFSKRVILADANLDKVLSAYNKHRDKPIREQAENIIHLFTLTNLGAPAAFKYFDTTIDRKRYTSTKEVLDATLIHQSITGLYETRIDLSQLGGDGGEAAAKGSSGGSGGVLNLEEEYRLHEKPVPSSIDPSWLQLFPTVWAERAGMGLANQVPPVVVELRSGASPVAVRQYPMSKEAREGIRPHIQRFLDLGVLVPCQSPWNTPLLPVKKPGTNDYRPVQDLREINKRVQDIHPTVPNPYNLLSSLPPSHTWYSVLDLKDAFFCLKLHPNSQPLFAFEWRDPEKGNTGQLTWTRLPQGFKNSPTLFDEALHRDLAPFRALNPQVVLLQYVDDLLVAAPTYRDCKEGTQKLLQELSKLGYRVSAKKAQLCQKEVTYLGYLLKEGKRWLTPARKATVMKIPPPTTPRQVREFLGTAGFCRLWIPGFASLAAPLYPLTKESIPFIWTEEHQKAFDRIKEALLSAPALALPDLTKPFTLYVDERAGVARGVLTQTLGPWRRPVAYLSKKLDPVASGWPTCLKAVAAVALLLKDADKLTLGQNVTVIASHSLESIVRQPPDRWMTNARMTHYQSLLLNERVSFAPPAVLNPATLLPVESEATPVHRCSEILAEETGTRRDLKDQPLPGVPAWYTDGSSFIAEGKRRAGAAIVDGKRTVWASSLPEGTSAQKAELVALTQALRLAEGKDINIYTDSRYAFATAHIHGAIYKQRGLLTSAGKDIKNKEEILALLEAIHLPKRVAIIHCPGHQKGNDPVATGNRRADEAAKQAALSTRVLAETTKPAGKRTADGSEFEKRTADGSEFESPKKKAKVE

SEQ ID NO: 7120 - protein, 2094 aa, synthetic construct
MPAAKRVKLDGGDKKYSIGLDIGTNSVGWAVITDEYKVPSKKFKVLGNTDRHSIKKNLIGALLFDSGETAEATRLKRTARRRYTRRKNRICYLQEIFSNEMAKVDDSFFHRLEESFLVEEDKKHERHPIFGNIVDEVAYHEKYPTIYHLRKKLVDSTDKADLRLIYLALAHMIKFRGHFLIEGDLNPDNSDVDKLFIQLVQTYNQLFEENPINASGVDAKAILSARLSKSRRLENLIAQLPGEKKNGLFGNLIALSLGLTPNFKSNFDLAEDAKLQLSKDTYDDDLDNLLAQIGDQYADLFLAAKNLSDAILLSDILRVNTEITKAPLSASMIKRYDEHHQDLTLLKALVRQQLPEKYKEIFFDQSKNGYAGYIDGGASQEEFYKFIKPILEKMDGTEELLVKLNREDLLRKQRTFDNGSIPHQIHLGELHAILRRQEDFYPFLKDNREKIEKILTFRIPYYVGPLARGNSRFAWMTRKSEETITPWNFEEVVDKGASAQSFIERMTNFDKNLPNEKVLPKHSLLYEYFTVYNELTKVKYVTEGMRKPAFLSGEQKKAIVDLLFKTNRKVTVKQLKEDYFKKIECFDSVEISGVEDRFNASLGTYHDLLKIIKDKDFLDNEENEDILEDIVLTLTLFEDREMIEERLKTYAHLFDDKVMKQLKRRRYTGWGRLSRKLINGIRDKQSGKTILDFLKSDGFANRNFMQLIHDDSLTFKEDIQKAQVSGQGDSLHEHIANLAGSPAIKKGILQTVKVVDELVKVMGRHKPENIVIEMARENQTTQKGQKNSRERMKRIEEGIKELGSQILKEHPVENTQLQNEKLYLYYLQNGRDMYVDQELDINRLSDYDVDHIVPQSFLKDDSIDNKVLTRSDKARGKSDNVPSEEVVKKMKNYWRQLLNAKLITQRKFDNLTKAERGGLSELDKAGFIKRQLVETRQITKHVAQILDSRMNTKYDENDKLIREVKVITLKSKLVSDFRKDFQFYKVREINNYHHAHDAYLNAVVGTALIKKYPKLESEFVYGDYKVYDVRKMIAKSEQEIGKATAKYFFYSNIMNFFKTEITLANGEIRKRPLIETNGETGEIVWDKGRDFATVRKVLSMPQVNIVKKTEVQTGGFSKESILPKRNSDKLIARKKDWDPKKYGGFDSPTVAYSVLVVAKVEKGKSKKLKSVKELLGITIMERSSFEKNPIDFLEAKGYKEVKKDLIIKLPKYSLFELENGRKRMLASAGELQKGNELALPSKYVNFLYLASHYEKLKGSPEDNEQKQLFVEQHKHYLDEIIEQISEFSKRVILADANLDKVLSAYNKHRDKPIREQAENIIHLFTLTNLGAPAAFKYFDTTIDRKRYTSTKEVLDATLIHQSITGLYETRIDLSQLGGDGGEAAAKGSSGGSGGVLNLEEEYRLHEKPVPSSIDPSWLQLFPTVWAERAGMGLANQVPPVVVELRSGASPVAVRQYPMSKEAREGIRPHIQRFLDLGVLVPCQSPWNTPLLPVKKPGTNDYRPVQDLREINKRVQDIHPTVPNPYNLLSSLPPSHTWYSVLDLKDAFFCLKLHPNSQPLFAFEWRDPEKGNTGQLTWTRLPQGFKNSPTLFNEALHRDLAPFRALNPQVVLLQYVDDLLVAAPTYRDCKEGTQKLLQELSKLGYRVSAKKAQLCQKEVTYLGYLLKEGKRWLTPARKATVMKIPPPTTPRQVREFLGTAGFCRLWIPGFASLAAPLYPLTKPSIPFIWTEEHQKAFDRIKEALLSAPALALPDLTKPFTLYVDERAGVARGVLTQTLGPWRRPVAYLSKKLDPVASGWPTCLKAVAAVALLLKDADKLTLGQNVTVIASHSLESIVRQPPDRWMTNARMTHYQSLLLNERVSFAPPAVLNPATLLPVESEATPVHRCSEILAEETGTRRDLKDQPLPGVPAWYTDGSSFIAEGKRRAGAAIVDGKRTVWASSLPEGTSAQKAELVALTQALRLAEGKDINIYTDSRYAFATAHIHGAIYKQRGWLTSAGKDIKNKEEILALLEAIHLPKRVAIIHCPGHQKGNDPVATGNRRADEAAKQAALSTRVLAETTKPAGKRTADGSEFEKRTADGSEFESPKKKAKVE

SEQ ID NO: 7121 - protein, 2096 aa, synthetic construct; identical to SEQ ID NO: 4524

SEQ ID NO: 7122 - protein, 2096 aa, synthetic construct
MPAAKRVKLDGGDKKYSIGLDIGTNSVGWAVITDEYKVPSKKFKVLGNTDRHSIKKNLIGALLFDSGETAEATRLKRTARRRYTRRKNRICYLQEIFSNEMAKVDDSFFHRLEESFLVEEDKKHERHPIFGNIVDEVAYHEKYPTIYHLRKKLVDSTDKADLRLIYLALAHMIKFRGHFLIEGDLNPDNSDVDKLFIQLVQTYNQLFEENPINASGVDAKAILSARLSKSRRLENLIAQLPGEKKNGLFGNLIALSLGLTPNFKSNFDLAEDAKLQLSKDTYDDDLDNLLAQIGDQYADLFLAAKNLSDAILLSDILRVNTEITKAPLSASMIKRYDEHHQDLTLLKALVRQQLPEKYKEIFFDQSKNGYAGYIDGGASQEEFYKFIKPILEKMDGTEELLVKLNREDLLRKQRTFDNGSIPHQIHLGELHAILRRQEDFYPFLKDNREKIEKILTFRIPYYVGPLARGNSRFAWMTRKSEETITPWNFEEVVDKGASAQSFIERMTNFDKNLPNEKVLPKHSLLYEYFTVYNELTKVKYVTEGMRKPAFLSGEQKKAIVDLLFKTNRKVTVKQLKEDYFKKIECFDSVEISGVEDRFNASLGTYHDLLKIIKDKDFLDNEENEDILEDIVLTLTLFEDREMIEERLKTYAHLFDDKVMKQLKRRRYTGWGRLSRKLINGIRDKQSGKTILDFLKSDGFANRNFMQLIHDDSLTFKEDIQKAQVSGQGDSLHEHIANLAGSPAIKKGILQTVKVVDELVKVMGRHKPENIVIEMARENQTTQKGQKNSRERMKRIEEGIKELGSQILKEHPVENTQLQNEKLYLYYLQNGRDMYVDQELDINRLSDYDVDHIVPQSFLKDDSIDNKVLTRSDKARGKSDNVPSEEVVKKMKNYWRQLLNAKLITQRKFDNLTKAERGGLSELDKAGFIKRQLVETRQITKHVAQILDSRMNTKYDENDKLIREVKVITLKSKLVSDFRKDFQFYKVREINNYHHAHDAYLNAVVGTALIKKYPKLESEFVYGDYKVYDVRKMIAKSEQEIGKATAKYFFYSNIMNFFKTEITLANGEIRKRPLIETNGETGEIVWDKGRDFATVRKVLSMPQVNIVKKTEVQTGGFSKESILPKRNSDKLIARKKDWDPKKYGGFDSPTVAYSVLVVAKVEKGKSKKLKSVKELLGITIMERSSFEKNPIDFLEAKGYKEVKKDLIIKLPKYSLFELENGRKRMLASAGELQKGNELALPSKYVNFLYLASHYEKLKGSPEDNEQKQLFVEQHKHYLDEIIEQISEFSKRVILADANLDKVLSAYNKHRDKPIREQAENIIHLFTLTNLGAPAAFKYFDTTIDRKRYTSTKEVLDATLIHQSITGLYETRIDLSQLGGDGGGGSGSSPAPGGTAPLEEEYRLFLEAPIQNVTLLEQWKREIPKVWAEINPPGLASTQAPIHVQLLSTALPVRVRQYPITLEAKRSLRETIRKFRAAGILRPVHSPWNTPLLPVRKSGTSEYRMVQDLREVNKRVETIHPTVPNPYTLLSLLPPDRIWYSVLDLKDAFFCIPLAPESQLIFAFEWADAEEGESGQLTWTRLPQGFKNSPTLFNEALNRDLQGFRLDHPSVSLLQYVDDLLIAADTQAACLSATRDLLMTLAELGYRVSGKKAQLCQEEVTYLGFKIHKGSRSLSNSRTQAILQIPVPKTKRQVREFLGTIGYCRLWIPGFAELAQPLYAATRPGNDPLVWGEKEEEAFQSLKLALTQPPALALPSLDKPFQLFVEETSGAAKGVLTQALGPWKRPVAYLSKRLDPVAAGWPRCLRAIAAAALLTREASKLTFGQDIEITSSHNLESLLRSPPDKWLTNARITQYQVLLLDPPRVRFKQTAALNPATLLPETDDTLPIHHCLDTLDSLTSTRPDLTDQPLAQAEATLFTDGSSYIRDGKRYAGAAVVTLDSVIWAEPLPIGTSAQKAELIALTKALEWSKDKSVNIYTDSRYAFATLHVHGMIYRERGWLTAGGKAIKNAPEILALLTAVWLPKRVAVMHCKGHQKDDAPTSTGNRRADEVAREVAIRPLSTQATISAGKRTADGSEFEKRTADGSEFESPKKKAKVE

SEQ ID NO: 7123 - protein, 2096 aa, synthetic construct
MPAAKRVKLDGGDKKYSIGLDIGTNSVGWAVITDEYKVPSKKFKVLGNTDRHSIKKNLIGALLFDSGETAEATRLKRTARRRYTRRKNRICYLQEIFSNEMAKVDDSFFHRLEESFLVEEDKKHERHPIFGNIVDEVAYHEKYPTIYHLRKKLVDSTDKADLRLIYLALAHMIKFRGHFLIEGDLNPDNSDVDKLFIQLVQTYNQLFEENPINASGVDAKAILSARLSKSRRLENLIAQLPGEKKNGLFGNLIALSLGLTPNFKSNFDLAEDAKLQLSKDTYDDDLDNLLAQIGDQYADLFLAAKNLSDAILLSDILRVNTEITKAPLSASMIKRYDEHHQDLTLLKALVRQQLPEKYKEIFFDQSKNGYAGYIDGGASQEEFYKFIKPILEKMDGTEELLVKLNREDLLRKQRTFDNGSIPHQIHLGELHAILRRQEDFYPFLKDNREKIEKILTFRIPYYVGPLARGNSRFAWMTRKSEETITPWNFEEVVDKGASAQSFIERMTNFDKNLPNEKVLPKHSLLYEYFTVYNELTKVKYVTEGMRKPAFLSGEQKKAIVDLLFKTNRKVTVKQLKEDYFKKIECFDSVEISGVEDRFNASLGTYHDLLKIIKDKDFLDNEENEDILEDIVLTLTLFEDREMIEERLKTYAHLFDDKVMKQLKRRRYTGWGRLSRKLINGIRDKQSGKTILDFLKSDGFANRNFMQLIHDDSLTFKEDIQKAQVSGQGDSLHEHIANLAGSPAIKKGILQTVKVVDELVKVMGRHKPENIVIEMARENQTTQKGQKNSRERMKRIEEGIKELGSQILKEHPVENTQLQNEKLYLYYLQNGRDMYVDQELDINRLSDYDVDHIVPQSFLKDDSIDNKVLTRSDKARGKSDNVPSEEVVKKMKNYWRQLLNAKLITQRKFDNLTKAERGGLSELDKAGFIKRQLVETRQITKHVAQILDSRMNTKYDENDKLIREVKVITLKSKLVSDFRKDFQFYKVREINNYHHAHDAYLNAVVGTALIKKYPKLESEFVYGDYKVYDVRKMIAKSEQEIGKATAKYFFYSNIMNFFKTEITLANGEIRKRPLIETNGETGEIVWDKGRDFATVRKVLSMPQVNIVKKTEVQTGGFSKESILPKRNSDKLIARKKDWDPKKYGGFDSPTVAYSVLVVAKVEKGKSKKLKSVKELLGITIMERSSFEKNPIDFLEAKGYKEVKKDLIIKLPKYSLFELENGRKRMLASAGELQKGNELALPSKYVNFLYLASHYEKLKGSPEDNEQKQLFVEQHKHYLDEIIEQISEFSKRVILADANLDKVLSAYNKHRDKPIREQAENIIHLFTLTNLGAPAAFKYFDTTIDRKRYTSTKEVLDATLIHQSITGLYETRIDLSQLGGDGGGGSGSSPAPGGTAPLEEEYRLFLEAPIQNVTLLEQWKREIPKVWAEINPPGLASTQAPIHVQLLSTALPVRVRQYPITLEAKRSLRETIRKFRAAGILRPVHSPWNTPLLPVRKSGTSEYRMVQDLREVNKRVETIHPTVPNPYTLLSLLPPDRIWYSVLDLKDAFFCIPLAPESQLIFAFEWADAEEGESGQLTWTRLPQGFKNSPTLFNEALNRDLQGFRLDHPSVSLLQYVDDLLIAADTQAACLSATRDLLMTLAELGYRVSGKKAQLCQEEVTYLGFKIHKGSRSLSNSRTQAILQIPVPKTKRQVREFLGKIGYCRLFIPGFAELAQPLYAATRPGNDPLVWGEKEEEAFQSLKLALTQPPALALPSLDKPFQLFVEETSGAAKGVLTQALGPWKRPVAYLSKRLDPVAAGWPRCLRAIAAAALLTREASKLTFGQDIEITSSHNLESLLRSPPDKWLTNARITQYQVLLLDPPRVRFKQTAALNPATLLPETDDTLPIHHCLDTLDSLTSTRPDLTDQPLAQAEATLFTDGSSYIRDGKRYAGAAVVTLDSVIWAEPLPIGTSAQKAELIALTKALEWSKDKSVNIYTDSRYAFATLHVHGMIYRERGWLTAGGKAIKNAPEILALLTAVWLPKRVAVMHCKGHQKDDAPTSTGNRRADEVAREVAIRPLSTQATISAGKRTADGSEFEKRTADGSEFESPKKKAKVE

SEQ ID NO: 7124 - protein, 2093 aa, synthetic construct
MPAAKRVKLDGGDKKYSIGLDIGTNSVGWAVITDEYKVPSKKFKVLGNTDRHSIKKNLIGALLFDSGETAEATRLKRTARRRYTRRKNRICYLQEIFSNEMAKVDDSFFHRLEESFLVEEDKKHERHPIFGNIVDEVAYHEKYPTIYHLRKKLVDSTDKADLRLIYLALAHMIKFRGHFLIEGDLNPDNSDVDKLFIQLVQTYNQLFEENPINASGVDAKAILSARLSKSRRLENLIAQLPGEKKNGLFGNLIALSLGLTPNFKSNFDLAEDAKLQLSKDTYDDDLDNLLAQIGDQYADLFLAAKNLSDAILLSDILRVNTEITKAPLSASMIKRYDEHHQDLTLLKALVRQQLPEKYKEIFFDQSKNGYAGYIDGGASQEEFYKFIKPILEKMDGTEELLVKLNREDLLRKQRTFDNGSIPHQIHLGELHAILRRQEDFYPFLKDNREKIEKILTFRIPYYVGPLARGNSRFAWMTRKSEETITPWNFEEVVDKGASAQSFIERMTNFDKNLPNEKVLPKHSLLYEYFTVYNELTKVKYVTEGMRKPAFLSGEQKKAIVDLLFKTNRKVTVKQLKEDYFKKIECFDSVEISGVEDRFNASLGTYHDLLKIIKDKDFLDNEENEDILEDIVLTLTLFEDREMIEERLKTYAHLFDDKVMKQLKRRRYTGWGRLSRKLINGIRDKQSGKTILDFLKSDGFANRNFMQLIHDDSLTFKEDIQKAQVSGQGDSLHEHIANLAGSPAIKKGILQTVKVVDELVKVMGRHKPENIVIEMARENQTTQKGQKNSRERMKRIEEGIKELGSQILKEHPVENTQLQNEKLYLYYLQNGRDMYVDQELDINRLSDYDVDHIVPQSFLKDDSIDNKVLTRSDKARGKSDNVPSEEVVKKMKNYWRQLLNAKLITQRKFDNLTKAERGGLSELDKAGFIKRQLVETRQITKHVAQILDSRMNTKYDENDKLIREVKVITLKSKLVSDFRKDFQFYKVREINNYHHAHDAYLNAVVGTALIKKYPKLESEFVYGDYKVYDVRKMIAKSEQEIGKATAKYFFYSNIMNFFKTEITLANGEIRKRPLIETNGETGEIVWDKGRDFATVRKVLSMPQVNIVKKTEVQTGGFSKESILPKRNSDKLIARKKDWDPKKYGGFDSPTVAYSVLVVAKVEKGKSKKLKSVKELLGITIMERSSFEKNPIDFLEAKGYKEVKKDLIIKLPKYSLFELENGRKRMLASAGELQKGNELALPSKYVNFLYLASHYEKLKGSPEDNEQKQLFVEQHKHYLDEIIEQISEFSKRVILADANLDKVLSAYNKHRDKPIREQAENIIHLFTLTNLGAPAAFKYFDTTIDRKRYTSTKEVLDATLIHQSITGLYETRIDLSQLGGDGGGGSGSSPAPGGTLQLEEEYRLFEPESTQKQEMDIWLKNFPQAWAETGGMGTAHCQAPVLIQLKATATPISIRQYPMPHEAYQGIKPHIRRMLDQGILKPCQSPWNTPLLPVKKPGTEDYRPVQDLREVNKRVEDIHPTVPNPYNLLSTLPPSHPWYTVLDLKDAFFCLRLHSESQLLFAFEWRDPEIGLSGQLTWTRLPQGFKNSPTLFNEALHSDLADFRVRYPALVLLQYVDDLLLAAATRTECLEGTKALLETLGNKGYRASAKKAQICLQEVTYLGYSLKDGQRWLTKARKEAILSIPVPKNSRQVREFLGTAGYCRLWIPGFAELAAPLYPLTRPGTLFQWGTEQQLAFEDIKKALLSSPALGLPDITKPFELFIDENSGFAKGVLVQKLGPWKRPVAYLSKKLDTVASGWPPCLRMVAAIAILVKDAGKLTLGQPLTILTSHPVEALVRQPPNKWLSNARMTHYQAMLLDAERVHFGPTVSLNPATLLPLPSGGNHHDCLQILAETHGTRPDLTDQPLPDADLTWYTDGSSFIRNGEREAGAAVTTESEVIWAAPLPPGTSAQRAELIALTQALKMAEGKKLTVYTDSRYAFATTHVHGEIYRRRGWLTSEGKEIKNKNEILALLEALFLPKRLSIIHCPGHQKGDSPQAKGNRLADDTAKKAATETHSSLTVLPAGKRTADGSEFEKRTADGSEFESPKKKAKVE

SEQ ID NO: 7125 - protein, 2085 aa, synthetic construct
MPAAKRVKLDGGDKKYSIGLDIGTNSVGWAVITDEYKVPSKKFKVLGNTDRHSIKKNLIGALLFDSGETAEATRLKRTARRRYTRRKNRICYLQEIFSNEMAKVDDSFFHRLEESFLVEEDKKHERHPIFGNIVDEVAYHEKYPTIYHLRKKLVDSTDKADLRLIYLALAHMIKFRGHFLIEGDLNPDNSDVDKLFIQLVQTYNQLFEENPINASGVDAKAILSARLSKSRRLENLIAQLPGEKKNGLFGNLIALSLGLTPNFKSNFDLAEDAKLQLSKDTYDDDLDNLLAQIGDQYADLFLAAKNLSDAILLSDILRVNTEITKAPLSASMIKRYDEHHQDLTLLKALVRQQLPEKYKEIFFDQSKNGYAGYIDGGASQEEFYKFIKPILEKMDGTEELLVKLNREDLLRKQRTFDNGSIPHQIHLGELHAILRRQEDFYPFLKDNREKIEKILTFRIPYYVGPLARGNSRFAWMTRKSEETITPWNFEEVVDKGASAQSFIERMTNFDKNLPNEKVLPKHSLLYEYFTVYNELTKVKYVTEGMRKPAFLSGEQKKAIVDLLFKTNRKVTVKQLKEDYFKKIECFDSVEISGVEDRFNASLGTYHDLLKIIKDKDFLDNEENEDILEDIVLTLTLFEDREMIEERLKTYAHLFDDKVMKQLKRRRYTGWGRLSRKLINGIRDKQSGKTILDFLKSDGFANRNFMQLIHDDSLTFKEDIQKAQVSGQGDSLHEHIANLAGSPAIKKGILQTVKVVDELVKVMGRHKPENIVIEMARENQTTQKGQKNSRERMKRIEEGIKELGSQILKEHPVENTQLQNEKLYLYYLQNGRDMYVDQELDINRLSDYDVDHIVPQSFLKDDSIDNKVLTRSDKARGKSDNVPSEEVVKKMKNYWRQLLNAKLITQRKFDNLTKAERGGLSELDKAGFIKRQLVETRQITKHVAQILDSRMNTKYDENDKLIREVKVITLKSKLVSDFRKDFQFYKVREINNYHHAHDAYLNAVVGTALIKKYPKLESEFVYGDYKVYDVRKMIAKSEQEIGKATAKYFFYSNIMNFFKTEITLANGEIRKRPLIETNGETGEIVWDKGRDFATVRKVLSMPQVNIVKKTEVQTGGFSKESILPKRNSDKLIARKKDWDPKKYGGFDSPTVAYSVLVVAKVEKGKSKKLKSVKELLGITIMERSSFEKNPIDFLEAKGYKEVKKDLIIKLPKYSLFELENGRKRMLASAGELQKGNELALPSKYVNFLYLASHYEKLKGSPEDNEQKQLFVEQHKHYLDEIIEQISEFSKRVILADANLDKVLSAYNKHRDKPIREQAENIIHLFTLTNLGAPAAFKYFDTTIDRKRYTSTKEVLDATLIHQSITGLYETRIDLSQLGGDGGGGSGSSPAPGGVPWLTQQPLQLTILVPLQEYQEKILSKTALPEDQKQQLKTLFVKYDNLWQHWENQVGHRKIRPHNIATGDYPPRPQKQYPINPKAKPSIQIVIDDLLKQGVLTPQNSTMNTPVYPVPKPDGRWRMVLDYREVNKTIPLTAAQNQHSAGILATIVRQKYKTTLDLANGFWAHPITPESYWLTAFTWQGKQYCWTRLPQGFLNSPALFNADVVDLLKEIPNVQVYVDDIYLSHDDPKEHVQQLEKVFQILLQAGYVVSLKKSEIGQKTVEFLGFNITKEGRGLTDTFKTKLLNITPPKDLKQLQSILGLLNFARNFIPNFAELVQPLYNLIAPAKGKYIEWSEENTKQLNMVIEALNTASNLEERLPEQRLVIKVNTSPSAGYVRYYNETGKKPIMYLNYVFSKAELKFSMLEKLLTTMHKALIKAMDLAMGQEILVYSPIVSMTKIQKTPLPERKALPIRWITWMTYLEDPRIQFHYDKTLPELKHIPDVYTSSQSPVKHPSQYEGVFYTDGSAIKSPDPTKSNNAGMGIVHATYKPEYQVLNQWSIPLGNHTAQMAEIAAVEFACKKALKIPGPVLVITDSFYVAESANKELPYWKSNGFVNNKKKPLKHISKWKSIAECLSMKPDITIQHEKGISLQIPVFILKGNALADKLATQGSYVVNAGKRTADGSEFEKRTADGSEFESPKKKAKVE

SEQ ID NO: 7126 - protein, 2216 aa, synthetic construct
MPAAKRVKLDGGDKKYSIGLDIGTNSVGWAVITDEYKVPSKKFKVLGNTDRHSIKKNLIGALLFDSGETAEATRLKRTARRRYTRRKNRICYLQEIFSNEMAKVDDSFFHRLEESFLVEEDKKHERHPIFGNIVDEVAYHEKYPTIYHLRKKLVDSTDKADLRLIYLALAHMIKFRGHFLIEGDLNPDNSDVDKLFIQLVQTYNQLFEENPINASGVDAKAILSARLSKSRRLENLIAQLPGEKKNGLFGNLIALSLGLTPNFKSNFDLAEDAKLQLSKDTYDDDLDNLLAQIGDQYADLFLAAKNLSDAILLSDILRVNTEITKAPLSASMIKRYDEHHQDLTLLKALVRQQLPEKYKEIFFDQSKNGYAGYIDGGASQEEFYKFIKPILEKMDGTEELLVKLNREDLLRKQRTFDNGSIPHQIHLGELHAILRRQEDFYPFLKDNREKIEKILTFRIPYYVGPLARGNSRFAWMTRKSEETITPWNFEEVVDKGASAQSFIERMTNFDKNLPNEKVLPKHSLLYEYFTVYNELTKVKYVTEGMRKPAFLSGEQKKAIVDLLFKTNRKVTVKQLKEDYFKKIECFDSVEISGVEDRFNASLGTYHDLLKIIKDKDFLDNEENEDILEDIVLTLTLFEDREMIEERLKTYAHLFDDKVMKQLKRRRYTGWGRLSRKLINGIRDKQSGKTILDFLKSDGFANRNFMQLIHDDSLTFKEDIQKAQVSGQGDSLHEHIANLAGSPAIKKGILQTVKVVDELVKVMGRHKPENIVIEMARENQTTQKGQKNSRERMKRIEEGIKELGSQILKEHPVENTQLQNEKLYLYYLQNGRDMYVDQELDINRLSDYDVDHIVPQSFLKDDSIDNKVLTRSDKARGKSDNVPSEEVVKKMKNYWRQLLNAKLITQRKFDNLTKAERGGLSELDKAGFIKRQLVETRQITKHVAQILDSRMNTKYDENDKLIREVKVITLKSKLVSDFRKDFQFYKVREINNYHHAHDAYLNAVVGTALIKKYPKLESEFVYGDYKVYDVRKMIAKSEQEIGKATAKYFFYSNIMNFFKTEITLANGEIRKRPLIETNGETGEIVWDKGRDFATVRKVLSMPQVNIVKKTEVQTGGFSKESILPKRNSDKLIARKKDWDPKKYGGFDSPTVAYSVLVVAKVEKGKSKKLKSVKELLGITIMERSSFEKNPIDFLEAKGYKEVKKDLIIKLPKYSLFELENGRKRMLASAGELQKGNELALPSKYVNFLYLASHYEKLKGSPEDNEQKQLFVEQHKHYLDEIIEQISEFSKRVILADANLDKVLSAYNKHRDKPIREQAENIIHLFTLTNLGAPAAFKYFDTTIDRKRYTSTKEVLDATLIHQSITGLYETRIDLSQLGGDGGGGSGSSPAPGGTLGDQGSRGSDPLPEPRVTLTVEGIPTEFLVNTGAEHSVLTKPMGKMGSKRTVVAGATGSKVYPWTTKRLLKIGQKQVTHSFLVIPECPAPLLGRDLLTKLKAQIQFSTEGPQVTWEDRPAMCLVLNLEEEYRLHEKPVPPSIDPSWLQLFPMVWAEKAGMGLANQVPPVVVELKSDASPVAVRQYPMSKEAREGIRPHIQRFLDLGILVPCQSPWNTPLLPVKKPGTNDYRPVQDLREVNKRVQDIHPTVPNPYNLLSSLPPSHTWYSVLDLKDAFFCLKLHPNSQPLFAFEWRDPEKGNTGQLTWTRLPQGFKNSPTLFDEALHRDLASFRALNPQVVMLQYVDDLLVAAPTYRDCKEGTRRLLQELSKLGYRVSAKKAQLCREEVTYLGYLLKGGKRWLTPARKATVMKIPTPTTPRQVREFLGTAGFCRLWIPGFASLAAPLYPLTREKVPFTWTEAHQEAFGRIKEALLSAPALALPDLTKPFALYVDEKEGVARGVLTQTLGPWRRPVAYLSKKLDPVASGWPTCLKAIAAVALLLKDADKLTLGQNVLVIAPHNLESIVRQPPDRWMTNARMTHYQSLLLNERVSFAPPAILNPATLLPVESDDTPIHICSEILAEETGTRPDLRDQPLPGVPAWYTDGSSFIMDGRRQAGAAIVDNKRTVWASNLPEGTSAQKAELIALTQALRLAEGKSINIYTDSRYAFATAHVHGAIYKQRGLLTSAGKDIKNKEEILALLEAIHLPKRVAIIHCPGHQRGTDPVATGNRKADEAAKQAAQSTRILTETTKNAGKRTADGSEFEKRTADGSEFESPKKKAKVE

SEQ ID NO: 7127 - protein, 2125 aa, synthetic construct
MPAAKRVKLDGGDKKYSIGLDIGTNSVGWAVITDEYKVPSKKFKVLGNTDRHSIKKNLIGALLFDSGETAEATRLKRTARRRYTRRKNRICYLQEIFSNEMAKVDDSFFHRLEESFLVEEDKKHERHPIFGNIVDEVAYHEKYPTIYHLRKKLVDSTDKADLRLIYLALAHMIKFRGHFLIEGDLNPDNSDVDKLFIQLVQTYNQLFEENPINASGVDAKAILSARLSKSRRLENLIAQLPGEKKNGLFGNLIALSLGLTPNFKSNFDLAEDAKLQLSKDTYDDDLDNLLAQIGDQYADLFLAAKNLSDAILLSDILRVNTEITKAPLSASMIKRYDEHHQDLTLLKALVRQQLPEKYKEIFFDQSKNGYAGYIDGGASQEEFYKFIKPILEKMDGTEELLVKLNREDLLRKQRTFDNGSIPHQIHLGELHAILRRQEDFYPFLKDNREKIEKILTFRIPYYVGPLARGNSRFAWMTRKSEETITPWNFEEVVDKGASAQSFIERMTNFDKNLPNEKVLPKHSLLYEYFTVYNELTKVKYVTEGMRKPAFLSGEQKKAIVDLLFKTNRKVTVKQLKEDYFKKIECFDSVEISGVEDRFNASLGTYHDLLKIIKDKDFLDNEENEDILEDIVLTLTLFEDREMIEERLKTYAHLFDDKVMKQLKRRRYTGWGRLSRKLINGIRDKQSGKTILDFLKSDGFANRNFMQLIHDDSLTFKEDIQKAQVSGQGDSLHEHIANLAGSPAIKKGILQTVKVVDELVKVMGRHKPENIVIEMARENQTTQKGQKNSRERMKRIEEGIKELGSQILKEHPVENTQLQNEKLYLYYLQNGRDMYVDQELDINRLSDYDVDHIVPQSFLKDDSIDNKVLTRSDKARGKSDNVPSEEVVKKMKNYWRQLLNAKLITQRKFDNLTKAERGGLSELDKAGFIKRQLVETRQITKHVAQILDSRMNTKYDENDKLIREVKVITLKSKLVSDFRKDFQFYKVREINNYHHAHDAYLNAVVGTALIKKYPKLESEFVYGDYKVYDVRKMIAKSEQEIGKATAKYFFYSNIMNFFKTEITLANGEIRKRPLIETNGETGEIVWDKGRDFATVRKVLSMPQVNIVKKTEVQTGGFSKESILPKRNSDKLIARKKDWDPKKYGGFDSPTVAYSVLVVAKVEKGKSKKLKSVKELLGITIMERSSFEKNPIDFLEAKGYKEVKKDLIIKLPKYSLFELENGRKRMLASAGELQKGNELALPSKYVNFLYLASHYEKLKGSPEDNEQKQLFVEQHKHYLDEIIEQISEFSKRVILADANLDKVLSAYNKHRDKPIREQAENIIHLFTLTNLGAPAAFKYFDTTIDRKRYTSTKEVLDATLIHQSITGLYETRIDLSQLGGDGGGGSGSSPAPGGLLGRDLLTKLKAQIQFSTEGPQVTWEDRPAMCLVLNLEEEYRLHEKPVPPSIDPSWLQLFPMVWAEKAGMGLANQVPPVVVELKSDASPVAVRQYPMSKEAREGIRPHIQRFLDLGILVPCQSPWNTPLLPVKKPGTNDYRPVQDLREVNKRVQDIHPTVPNPYNLLSSLPPSHTWYSVLDLKDAFFCLKLHPNSQPLFAFEWRDPEKGNTGQLTWTRLPQGFKNSPTLFNEALHRDLASFRALNPQVVMLQYVDDLLVAAPTYRDCKEGTRRLLQELSKLGYRVSAKKAQLCREEVTYLGYLLKGGKRWLTPARKATVMKIPTPTTPRQVREFLGKAGFCRLFIPGFASLAAPLYPLTRPKVPFTWTEAHQEAFGRIKEALLSAPALALPDLTKPFALYVDEKEGVARGVLTQTLGPWRRPVAYLSKKLDPVASGWPTCLKAIAAVALLLKDADKLTLGQNVLVIAPHNLESIVRQPPDRWMTNARMTHYQSLLLNERVSFAPPAILNPATLLPVESDDTPIHICSEILAEETGTRPDLRDQPLPGVPAWYTDGSSFIMDGRRQAGAAIVDNKRTVWASNLPEGTSAQKAELIALTQALRLAEGKSINIYTDSRYAFATAHVHGAIYKQRGWLTSAGKDIKNKEEILALLEAIHLPKRVAIIHCPGHQRGTDPVATGNRKADEAAKQAAQSTRILTETTKNAGKRTADGSEFEKRTADGSEFESPKKKAKVE

SEQ ID NO: 7128 - protein, 2216 aa, synthetic construct
MPAAKRVKLDGGDKKYSIGLDIGTNSVGWAVITDEYKVPSKKFKVLGNTDRHSIKKNLIGALLFDSGETAEATRLKRTARRRYTRRKNRICYLQEIFSNEMAKVDDSFFHRLEESFLVEEDKKHERHPIFGNIVDEVAYHEKYPTIYHLRKKLVDSTDKADLRLIYLALAHMIKFRGHFLIEGDLNPDNSDVDKLFIQLVQTYNQLFEENPINASGVDAKAILSARLSKSRRLENLIAQLPGEKKNGLFGNLIALSLGLTPNFKSNFDLAEDAKLQLSKDTYDDDLDNLLAQIGDQYADLFLAAKNLSDAILLSDILRVNTEITKAPLSASMIKRYDEHHQDLTLLKALVRQQLPEKYKEIFFDQSKNGYAGYIDGGASQEEFYKFIKPILEKMDGTEELLVKLNREDLLRKQRTFDNGSIPHQIHLGELHAILRRQEDFYPFLKDNREKIEKILTFRIPYYVGPLARGNSRFAWMTRKSEETITPWNFEEVVDKGASAQSFIERMTNFDKNLPNEKVLPKHSLLYEYFTVYNELTKVKYVTEGMRKPAFLSGEQKKAIVDLLFKTNRKVTVKQLKEDYFKKIECFDSVEISGVEDRFNASLGTYHDLLKIIKDKDFLDNEENEDILEDIVLTLTLFEDREMIEERLKTYAHLFDDKVMKQLKRRRYTGWGRLSRKLINGIRDKQSGKTILDFLKSDGFANRNFMQLIHDDSLTFKEDIQKAQVSGQGDSLHEHIANLAGSPAIKKGILQTVKVVDELVKVMGRHKPENIVIEMARENQTTQKGQKNSRERMKRIEEGIKELGSQILKEHPVENTQLQNEKLYLYYLQNGRDMYVDQELDINRLSDYDVDHIVPQSFLKDDSIDNKVLTRSDKARGKSDNVPSEEVVKKMKNYWRQLLNAKLITQRKFDNLTKAERGGLSELDKAGFIKRQLVETRQITKHVAQILDSRMNTKYDENDKLIREVKVITLKSKLVSDFRKDFQFYKVREINNYHHAHDAYLNAVVGTALIKKYPKLESEFVYGDYKVYDVRKMIAKSEQEIGKATAKYFFYSNIMNFFKTEITLANGEIRKRPLIETNGETGEIVWDKGRDFATVRKVLSMPQVNIVKKTEVQTGGFSKESILPKRNSDKLIARKKDWDPKKYGGFDSPTVAYSVLVVAKVEKGKSKKLKSVKELLGITIMERSSFEKNPIDFLEAKGYKEVKKDLIIKLPKYSLFELENGRKRMLASAGELQKGNELALPSKYVNFLYLASHYEKLKGSPEDNEQKQLFVEQHKHYLDEIIEQISEFSKRVILADANLDKVLSAYNKHRDKPIREQAENIIHLFTLTNLGAPAAFKYFDTTIDRKRYTSTKEVLDATLIHQSITGLYETRIDLSQLGGDGGGGSGSSPAPGGTLGDQGSRGSDPLPEPRVTLTVEGIPTEFLVNTGAEHSVLTKPMGKMGSKRTVVAGATGSKVYPWTTKRLLKIGQKQVTHSFLVIPECPAPLLGRDLLTKLKAQIQFSTEGPQVTWEDRPAMCLVLNLEEEYRLHEKPVPPSIDPSWLQLFPMVWAEKAGMGLANQVPPVVVELKSDASPVAVRQYPMSKEAREGIRPHIQRFLDLGILVPCQSPWNTPLLPVKKPGTNDYRPVQDLREVNKRVQDIHPTVPNPYNLLSSLPPSHTWYSVLDLKDAFFCLKLHPNSQPLFAFEWRDPEKGNTGQLTWTRLPQGFKNSPTLFNEALHRDLASFRALNPQVVMLQYVDDLLVAAPTYRDCKEGTRRLLQELSKLGYRVSAKKAQLCREEVTYLGYLLKGGKRWLTPARKATVMKIPTPTTPRQVREFLGKAGFCRLFIPGFASLAAPLYPLTRPKVPFTWTEAHQEAFGRIKEALLSAPALALPDLTKPFALYVDEKEGVARGVLTQTLGPWRRPVAYLSKKLDPVASGWPTCLKAIAAVALLLKDADKLTLGQNVLVIAPHNLESIVRQPPDRWMTNARMTHYQSLLLNERVSFAPPAILNPATLLPVESDDTPIHICSEILAEETGTRPDLRDQPLPGVPAWYTDGSSFIMDGRRQAGAAIVDNKRTVWASNLPEGTSAQKAELIALTQALRLAEGKSINIYTDSRYAFATAHVHGAIYKQRGWLTSAGKDIKNKEEILALLEAIHLPKRVAIIHCPGHQRGTDPVATGNRKADEAAKQAAQSTRILTETTKNAGKRTADGSEFEKRTADGSEFESPKKKAKVE

SEQ ID NO: 7129 - protein, 2094 aa, synthetic construct
MPAAKRVKLDGGDKKYSIGLDIGTNSVGWAVITDEYKVPSKKFKVLGNTDRHSIKKNLIGALLFDSGETAEATRLKRTARRRYTRRKNRICYLQEIFSNEMAKVDDSFFHRLEESFLVEEDKKHERHPIFGNIVDEVAYHEKYPTIYHLRKKLVDSTDKADLRLIYLALAHMIKFRGHFLIEGDLNPDNSDVDKLFIQLVQTYNQLFEENPINASGVDAKAILSARLSKSRRLENLIAQLPGEKKNGLFGNLIALSLGLTPNFKSNFDLAEDAKLQLSKDTYDDDLDNLLAQIGDQYADLFLAAKNLSDAILLSDILRVNTEITKAPLSASMIKRYDEHHQDLTLLKALVRQQLPEKYKEIFFDQSKNGYAGYIDGGASQEEFYKFIKPILEKMDGTEELLVKLNREDLLRKQRTFDNGSIPHQIHLGELHAILRRQEDFYPFLKDNREKIEKILTFRIPYYVGPLARGNSRFAWMTRKSEETITPWNFEEVVDKGASAQSFIERMTNFDKNLPNEKVLPKHSLLYEYFTVYNELTKVKYVTEGMRKPAFLSGEQKKAIVDLLFKTNRKVTVKQLKEDYFKKIECFDSVEISGVEDRFNASLGTYHDLLKIIKDKDFLDNEENEDILEDIVLTLTLFEDREMIEERLKTYAHLFDDKVMKQLKRRRYTGWGRLSRKLINGIRDKQSGKTILDFLKSDGFANRNFMQLIHDDSLTFKEDIQKAQVSGQGDSLHEHIANLAGSPAIKKGILQTVKVVDELVKVMGRHKPENIVIEMARENQTTQKGQKNSRERMKRIEEGIKELGSQILKEHPVENTQLQNEKLYLYYLQNGRDMYVDQELDINRLSDYDVDHIVPQSFLKDDSIDNKVLTRSDKARGKSDNVPSEEVVKKMKNYWRQLLNAKLITQRKFDNLTKAERGGLSELDKAGFIKRQLVETRQITKHVAQILDSRMNTKYDENDKLIREVKVITLKSKLVSDFRKDFQFYKVREINNYHHAHDAYLNAVVGTALIKKYPKLESEFVYGDYKVYDVRKMIAKSEQEIGKATAKYFFYSNIMNFFKTEITLANGEIRKRPLIETNGETGEIVWDKGRDFATVRKVLSMPQVNIVKKTEVQTGGFSKESILPKRNSDKLIARKKDWDPKKYGGFDSPTVAYSVLVVAKVEKGKSKKLKSVKELLGITIMERSSFEKNPIDFLEAKGYKEVKKDLIIKLPKYSLFELENGRKRMLASAGELQKGNELALPSKYVNFLYLASHYEKLKGSPEDNEQKQLFVEQHKHYLDEIIEQISEFSKRVILADANLDKVLSAYNKHRDKPIREQAENIIHLFTLTNLGAPAAFKYFDTTIDRKRYTSTKEVLDATLIHQSITGLYETRIDLSQLGGDGGGGSGSSPAPGGTLNLEDEYRLYETSAEPEVSPGSTWLSDFPQAWAETGGMGLAVRQAPLIIPLKATSTPVSIKQYPMSQEAKLGIKPHIQRLLDQGILVPCQSPWNTPLLPVKKPGTNDYRPVQDLREVNKRVEDIHPTVPNPYNLLSGLPPSHRWYTVLDLKDAFFCLRLHPTSQPLFAFEWRDPGMGISGQLTWTRLPQGFKNSPTLFNEALHRDLADFRIQHPDLILLQYVDDILLAATSELDCQQGTRALLLTLGNLGYRASAKKAQLCQKQVKYLGYLLKEGQRWLTEARKETVMGQPTPKTPRQLREFLGKAGFCRLFIPGFAEMAAPLYPLTKPGTLFNWGPDQQKAYQEIKQALLTAPALGLPDLTKPFELFVDEKQGYAKGVLTQKLGPWRRPVAYLSKKLDPVAAGWPPCLRMVAAIAVLRKDAGKLTMGQPLVILAPHAVEALVKQPPDRWLSNARMTHYQAMLLDTDRVQFGPVVALNPATLLPLPEEGAPHDCLEILAETHGTRPDLTDQPIPDADHTWYTDGSSFLQEGQRKAGAAVTTETEVIWARALPAGTSAQRAELIALTQALKMAEGKRLNVYTDSRYAFATAHIHGEIYRRRGWLTSEGREIKNKSEILALLKALFLPKRLSIIHCLGHQKGDSAEARGNRLADQAAREAAIKTPPDTSTLLAGKRTADGSEFEKRTADGSEFESPKKKAKVE

SEQ ID NO: 7130 - protein, 2094 aa, synthetic construct
MPAAKRVKLDGGDKKYSIGLDIGTNSVGWAVITDEYKVPSKKFKVLGNTDRHSIKKNLIGALLFDSGETAEATRLKRTARRRYTRRKNRICYLQEIFSNEMAKVDDSFFHRLEESFLVEEDKKHERHPIFGNIVDEVAYHEKYPTIYHLRKKLVDSTDKADLRLIYLALAHMIKFRGHFLIEGDLNPDNSDVDKLFIQLVQTYNQLFEENPINASGVDAKAILSARLSKSRRLENLIAQLPGEKKNGLFGNLIALSLGLTPNFKSNFDLAEDAKLQLSKDTYDDDLDNLLAQIGDQYADLFLAAKNLSDAILLSDILRVNTEITKAPLSASMIKRYDEHHQDLTLLKALVRQQLPEKYKEIFFDQSKNGYAGYIDGGASQEEFYKFIKPILEKMDGTEELLVKLNREDLLRKQRTFDNGSIPHQIHLGELHAILRRQEDFYPFLKDNREKIEKILTFRIPYYVGPLARGNSRFAWMTRKSEETITPWNFEEVVDKGASAQSFIERMTNFDKNLPNEKVLPKHSLLYEYFTVYNELTKVKYVTEGMRKPAFLSGEQKKAIVDLLFKTNRKVTVKQLKEDYFKKIECFDSVEISGVEDRFNASLGTYHDLLKIIKDKDFLDNEENEDILEDIVLTLTLFEDREMIEERLKTYAHLFDDKVMKQLKRRRYTGWGRLSRKLINGIRDKQSGKTILDFLKSDGFANRNFMQLIHDDSLTFKEDIQKAQVSGQGDSLHEHIANLAGSPAIKKGILQTVKVVDELVKVMGRHKPENIVIEMARENQTTQKGQKNSRERMKRIEEGIKELGSQILKEHPVENTQLQNEKLYLYYLQNGRDMYVDQELDINRLSDYDVDHIVPQSFLKDDSIDNKVLTRSDKARGKSDNVPSEEVVKKMKNYWRQLLNAKLITQRKFDNLTKAERGGLSELDKAGFIKRQLVETRQITKHVAQILDSRMNTKYDENDKLIREVKVITLKSKLVSDFRKDFQFYKVREINNYHHAHDAYLNAVVGTALIKKYPKLESEFVYGDYKVYDVRKMIAKSEQEIGKATAKYFFYSNIMNFFKTEITLANGEIRKRPLIETNGETGEIVWDKGRDFATVRKVLSMPQVNIVKKTEVQTGGFSKESILPKRNSDKLIARKKDWDPKKYGGFDSPTVAYSVLVVAKVEKGKSKKLKSVKELLGITIMERSSFEKNPIDFLEAKGYKEVKKDLIIKLPKYSLFELENGRKRMLASAGELQKGNELALPSKYVNFLYLASHYEKLKGSPEDNEQKQLFVEQHKHYLDEIIEQISEFSKRVILADANLDKVLSAYNKHRDKPIREQAENIIHLFTLTNLGAPAAFKYFDTTIDRKRYTSTKEVLDATLIHQSITGLYETRIDLSQLGGDGGGGSGSSPAPGGLGIEDEYRLHETSTEPDVSLGSTWLSDFPQAWAETGGMGLAVRQAPLIIPLKATSTPVSIQQYPMSHEARLGIKPHIQRLLDQGILVPCQSPWNTPLLPVKKPGTNDYRPVQDLREVNKRVEDIHPTVPNPYNLLSGLPPSHQWYTVLDLKDAFFCLRLHPTSQPLFAFEWRDPGMGISGQLTWTRLPQGFKNSPTLFNEALHRDLADFRIQHPDLILLQYVDDILLAATSELDCQQGTRALLQTLGDLGYRASAKKAQICQKQVKYLGYLLREGQRWLTEARKETVMGQPVPKTPRQLREFLGKAGFCRLFIPGFAEMAAPLYPLTKPGTLFSWGPDQQKAYQEIKQALLTAPALGLPDLTKPFELFVDEKQGYAKGVLTQKLGPWRRPVAYLSKKLDPVAAGWPPCLRMVAAIAVLTKDAGKLTMGQPLVILAPHAVEALVKQPPDRWLSNARMTHYQAMLLDTDRVQFGPVVALNPATLLPLPEEGAPHDCLEILAETHGTRPDLTDQPIPDADHTWYTDGSSFLQEGQRKAGAAVTTETEVIWAGALPAGTSAQRAELIALTQALKMAEGKRLNVYTDSRYAFATAHIHGEIYRRRGWLTSEGREIKNKSEILALLKALFLPKRLSIIHCLGHQKGDSAEARGNRLADQAAREAAIKTPPDTSTLLIAGKRTADGSEFEKRTADGSEFESPKKKAKVE

SEQ ID NO: 7131 - protein, 2094 aa, synthetic construct; identical to SEQ ID NO: 7130

SEQ ID NO: 7132 - protein, 2094 aa, synthetic construct
MPAAKRVKLDGGDKKYSIGLDIGTNSVGWAVITDEYKVPSKKFKVLGNTDRHSIKKNLIGALLFDSGETAEATRLKRTARRRYTRRKNRICYLQEIFSNEMAKVDDSFFHRLEESFLVEEDKKHERHPIFGNIVDEVAYHEKYPTIYHLRKKLVDSTDKADLRLIYLALAHMIKFRGHFLIEGDLNPDNSDVDKLFIQLVQTYNQLFEENPINASGVDAKAILSARLSKSRRLENLIAQLPGEKKNGLFGNLIALSLGLTPNFKSNFDLAEDAKLQLSKDTYDDDLDNLLAQIGDQYADLFLAAKNLSDAILLSDILRVNTEITKAPLSASMIKRYDEHHQDLTLLKALVRQQLPEKYKEIFFDQSKNGYAGYIDGGASQEEFYKFIKPILEKMDGTEELLVKLNREDLLRKQRTFDNGSIPHQIHLGELHAILRRQEDFYPFLKDNREKIEKILTFRIPYYVGPLARGNSRFAWMTRKSEETITPWNFEEVVDKGASAQSFIERMTNFDKNLPNEKVLPKHSLLYEYFTVYNELTKVKYVTEGMRKPAFLSGEQKKAIVDLLFKTNRKVTVKQLKEDYFKKIECFDSVEISGVEDRFNASLGTYHDLLKIIKDKDFLDNEENEDILEDIVLTLTLFEDREMIEERLKTYAHLFDDKVMKQLKRRRYTGWGRLSRKLINGIRDKQSGKTILDFLKSDGFANRNFMQLIHDDSLTFKEDIQKAQVSGQGDSLHEHIANLAGSPAIKKGILQTVKVVDELVKVMGRHKPENIVIEMARENQTTQKGQKNSRERMKRIEEGIKELGSQILKEHPVENTQLQNEKLYLYYLQNGRDMYVDQELDINRLSDYDVDHIVPQSFLKDDSIDNKVLTRSDKARGKSDNVPSEEVVKKMKNYWRQLLNAKLITQRKFDNLTKAERGGLSELDKAGFIKRQLVETRQITKHVAQILDSRMNTKYDENDKLIREVKVITLKSKLVSDFRKDFQFYKVREINNYHHAHDAYLNAVVGTALIKKYPKLESEFVYGDYKVYDVRKMIAKSEQEIGKATAKYFFYSNIMNFFKTEITLANGEIRKRPLIETNGETGEIVWDKGRDFATVRKVLSMPQVNIVKKTEVQTGGFSKESILPKRNSDKLIARKKDWDPKKYGGFDSPTVAYSVLVVAKVEKGKSKKLKSVKELLGITIMERSSFEKNPIDFLEAKGYKEVKKDLIIKLPKYSLFELENGRKRMLASAGELQKGNELALPSKYVNFLYLASHYEKLKGSPEDNEQKQLFVEQHKHYLDEIIEQISEFSKRVILADANLDKVLSAYNKHRDKPIREQAENIIHLFTLTNLGAPAAFKYFDTTIDRKRYTSTKEVLDATLIHQSITGLYETRIDLSQLGGDGGGGSGSSPAPGGTLNIEDEYRLHETSKGPDVPLGSTWLSDFPQAWAETGGMGLAVRQAPLIIPLKATSTPVSIKQYPMSQEARLGIKPHIQRLLDQGILVPCQSPWNTPLLPVKKPGTNDYRPVQDLREVNKRVEDIHPTVPNPYNLLSGLPPSHQWYTVLDLKDAFFCLRLHPTSQSLFAFEWRDPEMGISGQLTWTRLPQGFKNSPTLFNEALHRDLADFRIQHPDLILLQYVDDLLLAATSELDCQQGTRALLQTLGDLGYRASAKKAQICQKQVKYLGYLLKEGQRWLTEARKETVMGQPTPKTPRQLREFLGTAGFCRLWIPGFAEMAAPLYPLTKPGTLFEWGPDQQKAYQEIKQALLTAPALGLPDLTKPFELFVDEKQGYAKGVLTQKLGPWRRPVAYLSKKLDPVAAGWPPCLRMVAAIAVLTKDAGKLTMGQPLVILAPHAVEALVKQPPDRWLSNARMTHYQALLLDTDRVQFGPIVALNPATLLPLPEEGLQHDCLDILAEAHGTRPDLTDQPLPDADHTWYTDGSSFLQEGQRKAGAAVTTETEVVWAKALPAGTSAQRAELIALTQALKMAEGKKLNVYTDSRYAFATAHIHGEIYRRRGWLTSEGKEIKNKDEILALLKALFLPKRLSIIHCPGHQKGNRAEARGNRMADQAAREVATRETPETSTLLAGKRTADGSEFEKRTADGSEFESPKKKAKVE

SEQ ID NO: 7133 - protein, 2094 aa, synthetic construct
MPAAKRVKLDGGDKKYSIGLDIGTNSVGWAVITDEYKVPSKKFKVLGNTDRHSIKKNLIGALLFDSGETAEATRLKRTARRRYTRRKNRICYLQEIFSNEMAKVDDSFFHRLEESFLVEEDKKHERHPIFGNIVDEVAYHEKYPTIYHLRKKLVDSTDKADLRLIYLALAHMIKFRGHFLIEGDLNPDNSDVDKLFIQLVQTYNQLFEENPINASGVDAKAILSARLSKSRRLENLIAQLPGEKKNGLFGNLIALSLGLTPNFKSNFDLAEDAKLQLSKDTYDDDLDNLLAQIGDQYADLFLAAKNLSDAILLSDILRVNTEITKAPLSASMIKRYDEHHQDLTLLKALVRQQLPEKYKEIFFDQSKNGYAGYIDGGASQEEFYKFIKPILEKMDGTEELLVKLNREDLLRKQRTFDNGSIPHQIHLGELHAILRRQEDFYPFLKDNREKIEKILTFRIPYYVGPLARGNSRFAWMTRKSEETITPWNFEEVVDKGASAQSFIERMTNFDKNLPNEKVLPKHSLLYEYFTVYNELTKVKYVTEGMRKPAFLSGEQKKAIVDLLFKTNRKVTVKQLKEDYFKKIECFDSVEISGVEDRFNASLGTYHDLLKIIKDKDFLDNEENEDILEDIVLTLTLFEDREMIEERLKTYAHLFDDKVMKQLKRRRYTGWGRLSRKLINGIRDKQSGKTILDFLKSDGFANRNFMQLIHDDSLTFKEDIQKAQVSGQGDSLHEHIANLAGSPAIKKGILQTVKVVDELVKVMGRHKPENIVIEMARENQTTQKGQKNSRERMKRIEEGIKELGSQILKEHPVENTQLQNEKLYLYYLQNGRDMYVDQELDINRLSDYDVDHIVPQSFLKDDSIDNKVLTRSDKARGKSDNVPSEEVVKKMKNYWRQLLNAKLITQRKFDNLTKAERGGLSELDKAGFIKRQLVETRQITKHVAQILDSRMNTKYDENDKLIREVKVITLKSKLVSDFRKDFQFYKVREINNYHHAHDAYLNAVVGTALIKKYPKLESEFVYGDYKVYDVRKMIAKSEQEIGKATAKYFFYSNIMNFFKTEITLANGEIRKRPLIETNGETGEIVWDKGRDFATVRKVLSMPQVNIVKKTEVQTGGFSKESILPKRNSDKLIARKKDWDPKKYGGFDSPTVAYSVLVVAKVEKGKSKKLKSVKELLGITIMERSSFEKNPIDFLEAKGYKEVKKDLIIKLPKYSLFELENGRKRMLASAGELQKGNELALPSKYVNFLYLASHYEKLKGSPEDNEQKQLFVEQHKHYLDEIIEQISEFSKRVILADANLDKVLSAYNKHRDKPIREQAENIIHLFTLTNLGAPAAFKYFDTTIDRKRYTSTKEVLDATLIHQSITGLYETRIDLSQLGGDGGGGSGSSPAPGGTLNIEDEYRLHEISTEPDVSPGSTWLSDFPQAWAETGGMGLAVRQAPLIIPLKATSTPVSIKQYPMSQEAKLGIKPHIQRLLDQGILVPCQSPWNTPLLPVKKPGTNDYRPVQGLREVNKRVEDIHPTVPNPYNLLSGLPTSHRWYTVLDLKDAFFCLRLHPTSQPLFASEWRDPGMGISGQLTWTRLPQGFKNSPTLFNEALHRGLADFRIQHPDLILLQYVDDLLLAATSELDCQQGTRALLKTLGNLGYRASAKKAQICQKQVKYLGYLLREGQRWLTEARKETVMGQPTPKTPRQLREFLGTAGFCRLWIPRFAEMAAPLYPLTKPGTLFNWGPDQQKAYHEIKQALLTAPALGLPDLTKPFELFVDEKQGYAKGVLTQKLGPWRRPVAYLSKKLDPVAAGWPPCLRMVAAIAVLTKDAGKLTMGQPLVILAPHAVEALVKQPPDRWLSNARMTHYQAMLLDTDRVQFGPVVALNPATLLPLPEEGAPHDCLEILAETHGTEPDLTDQPIPDADHTWYTDGSSFLQEGQRKAGAAVTTETEVIWARALPAGTSAQRAELIALTQALKMAEGKRLNVYTDSRYAFATAHIHGEIYKRRGWLTSEGREIKNKSEILALLKALFLPKRLSIIHCLGHQKGDSAEARGNRLADQAAREAAIKTPPDTSTLLAGKRTADGSEFEKRTADGSEFESPKKKAKVE

SEQ ID NO: 7134 - protein, 2088 aa, synthetic construct
MPAAKRVKLDGGDKKYSIGLDIGTNSVGWAVITDEYKVPSKKFKVLGNTDRHSIKKNLIGALLFDSGETAEATRLKRTARRRYTRRKNRICYLQEIFSNEMAKVDDSFFHRLEESFLVEEDKKHERHPIFGNIVDEVAYHEKYPTIYHLRKKLVDSTDKADLRLIYLALAHMIKFRGHFLIEGDLNPDNSDVDKLFIQLVQTYNQLFEENPINASGVDAKAILSARLSKSRRLENLIAQLPGEKKNGLFGNLIALSLGLTPNFKSNFDLAEDAKLQLSKDTYDDDLDNLLAQIGDQYADLFLAAKNLSDAILLSDILRVNTEITKAPLSASMIKRYDEHHQDLTLLKALVRQQLPEKYKEIFFDQSKNGYAGYIDGGASQEEFYKFIKPILEKMDGTEELLVKLNREDLLRKQRTFDNGSIPHQIHLGELHAILRRQEDFYPFLKDNREKIEKILTFRIPYYVGPLARGNSRFAWMTRKSEETITPWNFEEVVDKGASAQSFIERMTNFDKNLPNEKVLPKHSLLYEYFTVYNELTKVKYVTEGMRKPAFLSGEQKKAIVDLLFKTNRKVTVKQLKEDYFKKIECFDSVEISGVEDRFNASLGTYHDLLKIIKDKDFLDNEENEDILEDIVLTLTLFEDREMIEERLKTYAHLFDDKVMKQLKRRRYTGWGRLSRKLINGIRDKQSGKTILDFLKSDGFANRNFMQLIHDDSLTFKEDIQKAQVSGQGDSLHEHIANLAGSPAIKKGILQTVKVVDELVKVMGRHKPENIVIEMARENQTTQKGQKNSRERMKRIEEGIKELGSQILKEHPVENTQLQNEKLYLYYLQNGRDMYVDQELDINRLSDYDVDHIVPQSFLKDDSIDNKVLTRSDKARGKSDNVPSEEVVKKMKNYWRQLLNAKLITQRKFDNLTKAERGGLSELDKAGFIKRQLVETRQITKHVAQILDSRMNTKYDENDKLIREVKVITLKSKLVSDFRKDFQFYKVREINNYHHAHDAYLNAVVGTALIKKYPKLESEFVYGDYKVYDVRKMIAKSEQEIGKATAKYFFYSNIMNFFKTEITLANGEIRKRPLIETNGETGEIVWDKGRDFATVRKVLSMPQVNIVKKTEVQTGGFSKESILPKRNSDKLIARKKDWDPKKYGGFDSPTVAYSVLVVAKVEKGKSKKLKSVKELLGITIMERSSFEKNPIDFLEAKGYKEVKKDLIIKLPKYSLFELENGRKRMLASAGELQKGNELALPSKYVNFLYLASHYEKLKGSPEDNEQKQLFVEQHKHYLDEIIEQISEFSKRVILADANLDKVLSAYNKHRDKPIREQAENIIHLFTLTNLGAPAAFKYFDTTIDRKRYTSTKEVLDATLIHQSITGLYETRIDLSQLGGDGGGGSGSSPAPGGTLQLDDEYRLYSPLVKPDQNIQFWLEQFPQAWAETAGMGLAKQVPPQVIQLKASATPVSVRQYPLSKEAQEGIRPHVQRLIQQGILVPVQSPWNTPLLPVRKPGTNDYRPVQDLREVNKRVQDIHPTVPNPYNLLCALPPQRSWYTVLDLKDAFFCLRLHPTSQPLFAFEWRDPGTGRTGQLTWTRLPQGFKNSPTIFDEALHRDLANFRIQHPQVTLLQYVDDLLLAGATKQDCLEGTKALLLELSDLGYRASAKKAQICRREVTYLGYSLRDGQRWLTEARKKTVVQIPAPTTAKQVREFLGTAGFCRLWIPGFATLAAPLYPLTKEKGEFSWAPEHQKAFDAIKKALLSAPALALPDVTKPFTLYVDERKGVARGVLTQTLGPWRRPVAYLSKKLDPVASGWPVCLKAIAAVAILVKDADKLTLGQNITVIAPHALENIVRQPPDRWMTNARMTHYQSLLLTERVTFAPPAALNPATLLPEETDEPVTHDCHQLLIEETGVRKDLTDIPLTGEVLTWFTDGSSYVVEGKRMAGAAVVDGTRTIWASSLPEGTSAQKAELMALTQALRLAEGKSINIYTDSRYAFATAHVHGAIYKQRGLLTSAGREIKNKEEILSLLEALHLPKRLAIIHCPGHQKAKDPISRGNQMADRVAKQAAQGVNLLAGKRTADGSEFEKRTADGSEFESPKKKAKVE

SEQ ID NO: 7135 - protein, 2092 aa, synthetic construct
MPAAKRVKLDGGDKKYSIGLDIGTNSVGWAVITDEYKVPSKKFKVLGNTDRHSIKKNLIGALLFDSGETAEATRLKRTARRRYTRRKNRICYLQEIFSNEMAKVDDSFFHRLEESFLVEEDKKHERHPIFGNIVDEVAYHEKYPTIYHLRKKLVDSTDKADLRLIYLALAHMIKFRGHFLIEGDLNPDNSDVDKLFIQLVQTYNQLFEENPINASGVDAKAILSARLSKSRRLENLIAQLPGEKKNGLFGNLIALSLGLTPNFKSNFDLAEDAKLQLSKDTYDDDLDNLLAQIGDQYADLFLAAKNLSDAILLSDILRVNTEITKAPLSASMIKRYDEHHQDLTLLKALVRQQLPEKYKEIFFDQSKNGYAGYIDGGASQEEFYKFIKPILEKMDGTEELLVKLNREDLLRKQRTFDNGSIPHQIHLGELHAILRRQEDFYPFLKDNREKIEKILTFRIPYYVGPLARGNSRFAWMTRKSEETITPWNFEEVVDKGASAQSFIERMTNFDKNLPNEKVLPKHSLLYEYFTVYNELTKVKYVTEGMRKPAFLSGEQKKAIVDLLFKTNRKVTVKQLKEDYFKKIECFDSVEISGVEDRFNASLGTYHDLLKIIKDKDFLDNEENEDILEDIVLTLTLFEDREMIEERLKTYAHLFDDKVMKQLKRRRYTGWGRLSRKLINGIRDKQSGKTILDFLKSDGFANRNFMQLIHDDSLTFKEDIQKAQVSGQGDSLHEHIANLAGSPAIKKGILQTVKVVDELVKVMGRHKPENIVIEMARENQTTQKGQKNSRERMKRIEEGIKELGSQILKEHPVENTQLQNEKLYLYYLQNGRDMYVDQELDINRLSDYDVDHIVPQSFLKDDSIDNKVLTRSDKARGKSDNVPSEEVVKKMKNYWRQLLNAKLITQRKFDNLTKAERGGLSELDKAGFIKRQLVETRQITKHVAQILDSRMNTKYDENDKLIREVKVITLKSKLVSDFRKDFQFYKVREINNYHHAHDAYLNAVVGTALIKKYPKLESEFVYGDYKVYDVRKMIAKSEQEIGKATAKYFFYSNIMNFFKTEITLANGEIRKRPLIETNGETGEIVWDKGRDFATVRKVLSMPQVNIVKKTEVQTGGFSKESILPKRNSDKLIARKKDWDPKKYGGFDSPTVAYSVLVVAKVEKGKSKKLKSVKELLGITIMERSSFEKNPIDFLEAKGYKEVKKDLIIKLPKYSLFELENGRKRMLASAGELQKGNELALPSKYVNFLYLASHYEKLKGSPEDNEQKQLFVEQHKHYLDEIIEQISEFSKRVILADANLDKVLSAYNKHRDKPIREQAENIIHLFTLTNLGAPAAFKYFDTTIDRKRYTSTKEVLDATLIHQSITGLYETRIDLSQLGGDGGGGSGSSPAPGGVLNLEEEYRLHEKPVPSSIDPSWLQLFPTVWAERAGMGLANQVPPVVVELRSGASPVAVRQYPMSKEAREGIRPHIQRFLDLGVLVPCQSPWNTPLLPVKKPGTNDYRPVQDLREINKRVQDIHPTVPNPYNLLSSLPPSHTWYSVLDLKDAFFCLKLHPNSQPLFAFEWRDPEKGNTGQLTWTRLPQGFKNSPTLFNEALHRDLAPFRALNPQVVLLQYVDDLLVAAPTYRDCKEGTQKLLQELSKLGYRVSAKKAQLCQKEVTYLGYLLKEGKRWLTPARKATVMKIPPPTTPRQVREFLGTAGFCRLWIPGFASLAAPLYPLTKPSIPFIWTEEHQKAFDRIKEALLSAPALALPDLTKPFTLYVDERAGVARGVLTQTLGPWRRPVAYLSKKLDPVASGWPTCLKAVAAVALLLKDADKLTLGQNVTVIASHSLESIVRQPPDRWMTNARMTHYQSLLLNERVSFAPPAVLNPATLLPVESEATPVHRCSEILAEETGTRRDLKDQPLPGVPAWYTDGSSFIAEGKRRAGAAIVDGKRTVWASSLPEGTSAQKAELVALTQALRLAEGKDINIYTDSRYAFATAHIHGAIYKQRGWLTSAGKDIKNKEEILALLEAIHLPKRVAIIHCPGHQKGNDPVATGNRRADEAAKQAALSTRVLAETTKPAGKRTADGSEFEKRTADGSEFESPKKKAKVE

SEQ ID NO: 7136 - protein, 2094 aa, synthetic construct
MPAAKRVKLDGGDKKYSIGLDIGTNSVGWAVITDEYKVPSKKFKVLGNTDRHSIKKNLIGALLFDSGETAEATRLKRTARRRYTRRKNRICYLQEIFSNEMAKVDDSFFHRLEESFLVEEDKKHERHPIFGNIVDEVAYHEKYPTIYHLRKKLVDSTDKADLRLIYLALAHMIKFRGHFLIEGDLNPDNSDVDKLFIQLVQTYNQLFEENPINASGVDAKAILSARLSKSRRLENLIAQLPGEKKNGLFGNLIALSLGLTPNFKSNFDLAEDAKLQLSKDTYDDDLDNLLAQIGDQYADLFLAAKNLSDAILLSDILRVNTEITKAPLSASMIKRYDEHHQDLTLLKALVRQQLPEKYKEIFFDQSKNGYAGYIDGGASQEEFYKFIKPILEKMDGTEELLVKLNREDLLRKQRTFDNGSIPHQIHLGELHAILRRQEDFYPFLKDNREKIEKILTFRIPYYVGPLARGNSRFAWMTRKSEETITPWNFEEVVDKGASAQSFIERMTNFDKNLPNEKVLPKHSLLYEYFTVYNELTKVKYVTEGMRKPAFLSGEQKKAIVDLLFKTNRKVTVKQLKEDYFKKIECFDSVEISGVEDRFNASLGTYHDLLKIIKDKDFLDNEENEDILEDIVLTLTLFEDREMIEERLKTYAHLFDDKVMKQLKRRRYTGWGRLSRKLINGIRDKQSGKTILDFLKSDGFANRNFMQLIHDDSLTFKEDIQKAQVSGQGDSLHEHIANLAGSPAIKKGILQTVKVVDELVKVMGRHKPENIVIEMARENQTTQKGQKNSRERMKRIEEGIKELGSQILKEHPVENTQLQNEKLYLYYLQNGRDMYVDQELDINRLSDYDVDHIVPQSFLKDDSIDNKVLTRSDKARGKSDNVPSEEVVKKMKNYWRQLLNAKLITQRKFDNLTKAERGGLSELDKAGFIKRQLVETRQITKHVAQILDSRMNTKYDENDKLIREVKVITLKSKLVSDFRKDFQFYKVREINNYHHAHDAYLNAVVGTALIKKYPKLESEFVYGDYKVYDVRKMIAKSEQEIGKATAKYFFYSNIMNFFKTEITLANGEIRKRPLIETNGETGEIVWDKGRDFATVRKVLSMPQVNIVKKTEVQTGGFSKESILPKRNSDKLIARKKDWDPKKYGGFDSPTVAYSVLVVAKVEKGKSKKLKSVKELLGITIMERSSFEKNPIDFLEAKGYKEVKKDLIIKLPKYSLFELENGRKRMLASAGELQKGNELALPSKYVNFLYLASHYEKLKGSPEDNEQKQLFVEQHKHYLDEIIEQISEFSKRVILADANLDKVLSAYNKHRDKPIREQAENIIHLFTLTNLGAPAAFKYFDTTIDRKRYTSTKEVLDATLIHQSITGLYETRIDLSQLGGDGGGGSGSSPAPGGTLNIEDEYRLHETSKEPDVPLGSTWLSDFPQAWAETGGMGLAVRQAPLIIPLKATSTPVSIKQYPMSQEARLGIKPHIQRLLDQGILVPCQSPWNTPLLPVKKPGTNDYRPVQDLREVNKRVEDIHPTVPNPYNLLSGLPPSHQWYTVLDLKDAFFCLRLHPTSQPLFAFEWRDPEMGISGQLTWTRLPQGFKNSPTLFDEALHRDLADFRIQHPDLILLQYVDDLLLAATSEQDCQRGTRALLQTLGNLGYRASAKKAQICQKQVKYLGYLLKEGQRWLTEARKETVMGQPTPKTPRQLREFLGTAGFCRLWIPGFAEMAAPLYPLTKTGTLFNWGPDQQKAYQEIKQALLTAPALGLPDLTKPFELFVDEKQGYAKGVLTQKLGPWRRPVAYLSKKLDPVAAGWPPCLRMVAAIAVLTKDAGKLTMGQPLVILAPHAVEALVKQPPDRWLSNARMTHYQAMLLDTDRVQFGPVVALNPATLLPLPEKEAPHDCLEILAETHGTRPDLTDQPIPDADYTWYTDGSSFLQEGQRRAGAAVTTETEVIWARALPAGTSAQRAELIALTQALKMAEGKKLNVYTDSRYAFATAHVHGEIYRRRGLLTSEGREIKNKNEILALLKALFLPKRLSIIHCPGHQKGNSAEARGNRMADQAAREAAMKAVLETSTLLAGKRTADGSEFEKRTADGSEFESPKKKAKVE

SEQ ID NO: 7137 - protein, 2094 aa, synthetic construct
MPAAKRVKLDGGDKKYSIGLDIGTNSVGWAVITDEYKVPSKKFKVLGNTDRHSIKKNLIGALLFDSGETAEATRLKRTARRRYTRRKNRICYLQEIFSNEMAKVDDSFFHRLEESFLVEEDKKHERHPIFGNIVDEVAYHEKYPTIYHLRKKLVDSTDKADLRLIYLALAHMIKFRGHFLIEGDLNPDNSDVDKLFIQLVQTYNQLFEENPINASGVDAKAILSARLSKSRRLENLIAQLPGEKKNGLFGNLIALSLGLTPNFKSNFDLAEDAKLQLSKDTYDDDLDNLLAQIGDQYADLFLAAKNLSDAILLSDILRVNTEITKAPLSASMIKRYDEHHQDLTLLKALVRQQLPEKYKEIFFDQSKNGYAGYIDGGASQEEFYKFIKPILEKMDGTEELLVKLNREDLLRKQRTFDNGSIPHQIHLGELHAILRRQEDFYPFLKDNREKIEKILTFRIPYYVGPLARGNSRFAWMTRKSEETITPWNFEEVVDKGASAQSFIERMTNFDKNLPNEKVLPKHSLLYEYFTVYNELTKVKYVTEGMRKPAFLSGEQKKAIVDLLFKTNRKVTVKQLKEDYFKKIECFDSVEISGVEDRFNASLGTYHDLLKIIKDKDFLDNEENEDILEDIVLTLTLFEDREMIEERLKTYAHLFDDKVMKQLKRRRYTGWGRLSRKLINGIRDKQSGKTILDFLKSDGFANRNFMQLIHDDSLTFKEDIQKAQVSGQGDSLHEHIANLAGSPAIKKGILQTVKVVDELVKVMGRHKPENIVIEMARENQTTQKGQKNSRERMKRIEEGIKELGSQILKEHPVENTQLQNEKLYLYYLQNGRDMYVDQELDINRLSDYDVDHIVPQSFLKDDSIDNKVLTRSDKARGKSDNVPSEEVVKKMKNYWRQLLNAKLITQRKFDNLTKAERGGLSELDKAGFIKRQLVETRQITKHVAQILDSRMNTKYDENDKLIREVKVITLKSKLVSDFRKDFQFYKVREINNYHHAHDAYLNAVVGTALIKKYPKLESEFVYGDYKVYDVRKMIAKSEQEIGKATAKYFFYSNIMNFFKTEITLANGEIRKRPLIETNGETGEIVWDKGRDFATVRKVLSMPQVNIVKKTEVQTGGFSKESILPKRNSDKLIARKKDWDPKKYGGFDSPTVAYSVLVVAKVEKGKSKKLKSVKELLGITIMERSSFEKNPIDFLEAKGYKEVKKDLIIKLPKYSLFELENGRKRMLASAGELQKGNELALPSKYVNFLYLASHYEKLKGSPEDNEQKQLFVEQHKHYLDEIIEQISEFSKRVILADANLDKVLSAYNKHRDKPIREQAENIIHLFTLTNLGAPAAFKYFDTTIDRKRYTSTKEVLDATLIHQSITGLYETRIDLSQLGGDGGGGSGSSPAPGGTLNIEDEYRLHETSKEPDVPLGSTWLSDFPQAWAETGGMGLAVRQAPLIIPLKATSTPVSIKQYPMSQEARLGIKPHIQRLLDQGILVPCQSPWNTPLLPVKKPGTNDYRPVQDLREVNKRVEDIHPTVPNPYNLLSGLPPSHQWYTVLDLKDAFFCLRLHPTSQPLFAFEWRDPEMGISGQLTWTRLPQGFKNSPTLFNEALHRDLADFRIQHPDLILLQYVDDLLLAATSEQDCQRGTRALLQTLGNLGYRASAKKAQICQKQVKYLGYLLKEGQRWLTEARKETVMGQPTPKTPRQLREFLGTAGFCRLWIPGFAEMAAPLYPLTKPGTLFNWGPDQQKAYQEIKQALLTAPALGLPDLTKPFELFVDEKQGYAKGVLTQKLGPWRRPVAYLSKKLDPVAAGWPPCLRMVAAIAVLTKDAGKLTMGQPLVILAPHAVEALVKQPPDRWLSNARMTHYQAMLLDTDRVQFGPVVALNPATLLPLPEKEAPHDCLEILAETHGTRPDLTDQPIPDADYTWYTDGSSFLQEGQRRAGAAVTTETEVIWARALPAGTSAQRAELIALTQALKMAEGKKLNVYTDSRYAFATAHVHGEIYRRRGWLTSEGREIKNKNEILALLKALFLPKRLSIIHCPGHQKGNSAEARGNRMADQAAREAAMKAVLETSTLLAGKRTADGSEFEKRTADGSEFESPKKKAKVE

SEQ ID NO: 7138 - protein, 2093 aa, synthetic construct
MPAAKRVKLDGGDKKYSIGLDIGTNSVGWAVITDEYKVPSKKFKVLGNTDRHSIKKNLIGALLFDSGETAEATRLKRTARRRYTRRKNRICYLQEIFSNEMAKVDDSFFHRLEESFLVEEDKKHERHPIFGNIVDEVAYHEKYPTIYHLRKKLVDSTDKADLRLIYLALAHMIKFRGHFLIEGDLNPDNSDVDKLFIQLVQTYNQLFEENPINASGVDAKAILSARLSKSRRLENLIAQLPGEKKNGLFGNLIALSLGLTPNFKSNFDLAEDAKLQLSKDTYDDDLDNLLAQIGDQYADLFLAAKNLSDAILLSDILRVNTEITKAPLSASMIKRYDEHHQDLTLLKALVRQQLPEKYKEIFFDQSKNGYAGYIDGGASQEEFYKFIKPILEKMDGTEELLVKLNREDLLRKQRTFDNGSIPHQIHLGELHAILRRQEDFYPFLKDNREKIEKILTFRIPYYVGPLARGNSRFAWMTRKSEETITPWNFEEVVDKGASAQSFIERMTNFDKNLPNEKVLPKHSLLYEYFTVYNELTKVKYVTEGMRKPAFLSGEQKKAIVDLLFKTNRKVTVKQLKEDYFKKIECFDSVEISGVEDRFNASLGTYHDLLKIIKDKDFLDNEENEDILEDIVLTLTLFEDREMIEERLKTYAHLFDDKVMKQLKRRRYTGWGRLSRKLINGIRDKQSGKTILDFLKSDGFANRNFMQLIHDDSLTFKEDIQKAQVSGQGDSLHEHIANLAGSPAIKKGILQTVKVVDELVKVMGRHKPENIVIEMARENQTTQKGQKNSRERMKRIEEGIKELGSQILKEHPVENTQLQNEKLYLYYLQNGRDMYVDQELDINRLSDYDVDHIVPQSFLKDDSIDNKVLTRSDKARGKSDNVPSEEVVKKMKNYWRQLLNAKLITQRKFDNLTKAERGGLSELDKAGFIKRQLVETRQITKHVAQILDSRMNTKYDENDKLIREVKVITLKSKLVSDFRKDFQFYKVREINNYHHAHDAYLNAVVGTALIKKYPKLESEFVYGDYKVYDVRKMIAKSEQEIGKATAKYFFYSNIMNFFKTEITLANGEIRKRPLIETNGETGEIVWDKGRDFATVRKVLSMPQVNIVKKTEVQTGGFSKESILPKRNSDKLIARKKDWDPKKYGGFDSPTVAYSVLVVAKVEKGKSKKLKSVKELLGITIMERSSFEKNPIDFLEAKGYKEVKKDLIIKLPKYSLFELENGRKRMLASAGELQKGNELALPSKYVNFLYLASHYEKLKGSPEDNEQKQLFVEQHKHYLDEIIEQISEFSKRVILADANLDKVLSAYNKHRDKPIREQAENIIHLFTLTNLGAPAAFKYFDTTIDRKRYTSTKEVLDATLIHQSITGLYETRIDLSQLGGDGGGGSPAPGSSGGTLQLEEEYRLFEPESTQKQEMDIWLKNFPQAWAETGGMGTAHCQAPVLIQLKATATPISIRQYPMPHEAYQGIKPHIRRMLDQGILKPCQSPWNTPLLPVKKPGTEDYRPVQDLREVNKRVEDIHPTVPNPYNLLSTLPPSHPWYTVLDLKDAFFCLRLHSESQLLFAFEWRDPEIGLSGQLTWTRLPQGFKNSPTLFNEALHSDLADFRVRYPALVLLQYVDDLLLAAATRTECLEGTKALLETLGNKGYRASAKKAQICLQEVTYLGYSLKDGQRWLTKARKEAILSIPVPKNSRQVREFLGTAGYCRLWIPGFAELAAPLYPLTRPGTLFQWGTEQQLAFEDIKKALLSSPALGLPDITKPFELFIDENSGFAKGVLVQKLGPWKRPVAYLSKKLDTVASGWPPCLRMVAAIAILVKDAGKLTLGQPLTILTSHPVEALVRQPPNKWLSNARMTHYQAMLLDAERVHFGPTVSLNPATLLPLPSGGNHHDCLQILAETHGTRPDLTDQPLPDADLTWYTDGSSFIRNGEREAGAAVTTESEVIWAAPLPPGTSAQRAELIALTQALKMAEGKKLTVYTDSRYAFATTHVHGEIYRRRGWLTSEGKEIKNKNEILALLEALFLPKRLSIIHCPGHQKGDSPQAKGNRLADDTAKKAATETHSSLTVLPAGKRTADGSEFEKRTADGSEFESPKKKAKVE

SEQ ID NO: 7139 - protein, 2094 aa, synthetic construct
MPAAKRVKLDGGDKKYSIGLDIGTNSVGWAVITDEYKVPSKKFKVLGNTDRHSIKKNLIGALLFDSGETAEATRLKRTARRRYTRRKNRICYLQEIFSNEMAKVDDSFFHRLEESFLVEEDKKHERHPIFGNIVDEVAYHEKYPTIYHLRKKLVDSTDKADLRLIYLALAHMIKFRGHFLIEGDLNPDNSDVDKLFIQLVQTYNQLFEENPINASGVDAKAILSARLSKSRRLENLIAQLPGEKKNGLFGNLIALSLGLTPNFKSNFDLAEDAKLQLSKDTYDDDLDNLLAQIGDQYADLFLAAKNLSDAILLSDILRVNTEITKAPLSASMIKRYDEHHQDLTLLKALVRQQLPEKYKEIFFDQSKNGYAGYIDGGASQEEFYKFIKPILEKMDGTEELLVKLNREDLLRKQRTFDNGSIPHQIHLGELHAILRRQEDFYPFLKDNREKIEKILTFRIPYYVGPLARGNSRFAWMTRKSEETITPWNFEEVVDKGASAQSFIERMTNFDKNLPNEKVLPKHSLLYEYFTVYNELTKVKYVTEGMRKPAFLSGEQKKAIVDLLFKTNRKVTVKQLKEDYFKKIECFDSVEISGVEDRFNASLGTYHDLLKIIKDKDFLDNEENEDILEDIVLTLTLFEDREMIEERLKTYAHLFDDKVMKQLKRRRYTGWGRLSRKLINGIRDKQSGKTILDFLKSDGFANRNFMQLIHDDSLTFKEDIQKAQVSGQGDSLHEHIANLAGSPAIKKGILQTVKVVDELVKVMGRHKPENIVIEMARENQTTQKGQKNSRERMKRIEEGIKELGSQILKEHPVENTQLQNEKLYLYYLQNGRDMYVDQELDINRLSDYDVDHIVPQSFLKDDSIDNKVLTRSDKARGKSDNVPSEEVVKKMKNYWRQLLNAKLITQRKFDNLTKAERGGLSELDKAGFIKRQLVETRQITKHVAQILDSRMNTKYDENDKLIREVKVITLKSKLVSDFRKDFQFYKVREINNYHHAHDAYLNAVVGTALIKKYPKLESEFVYGDYKVYDVRKMIAKSEQEIGKATAKYFFYSNIMNFFKTEITLANGEIRKRPLIETNGETGEIVWDKGRDFATVRKVLSMPQVNIVKKTEVQTGGFSKESILPKRNSDKLIARKKDWDPKKYGGFDSPTVAYSVLVVAKVEKGKSKKLKSVKELLGITIMERSSFEKNPIDFLEAKGYKEVKKDLIIKLPKYSLFELENGRKRMLASAGELQKGNELALPSKYVNFLYLASHYEKLKGSPEDNEQKQLFVEQHKHYLDEIIEQISEFSKRVILADANLDKVLSAYNKHRDKPIREQAENIIHLFTLTNLGAPAAFKYFDTTIDRKRYTSTKEVLDATLIHQSITGLYETRIDLSQLGGDGGGGSPAPGSSGGTLNLEDEYRLYETSAEPEVSPGSTWLSDFPQAWAETGGMGLAVRQAPLIIPLKATSTPVSIKQYPMSQEAKLGIKPHIQRLLDQGILVPCQSPWNTPLLPVKKPGTNDYRPVQDLREVNKRVEDIHPTVPNPYNLLSGLPPSHRWYTVLDLKDAFFCLRLHPTSQPLFAFEWRDPGMGISGQLTWTRLPQGFKNSPTLFNEALHRDLADFRIQHPDLILLQYVDDILLAATSELDCQQGTRALLLTLGNLGYRASAKKAQLCQKQVKYLGYLLKEGQRWLTEARKETVMGQPTPKTPRQLREFLGTAGFCRLWIPGFAEMAAPLYPLTKPGTLFNWGPDQQKAYQEIKQALLTAPALGLPDLTKPFELFVDEKQGYAKGVLTQKLGPWRRPVAYLSKKLDPVAAGWPPCLRMVAAIAVLRKDAGKLTMGQPLVILAPHAVEALVKQPPDRWLSNARMTHYQAMLLDTDRVQFGPVVALNPATLLPLPEEGAPHDCLEILAETHGTRPDLTDQPIPDADHTWYTDGSSFLQEGQRKAGAAVTTETEVIWARALPAGTSAQRAELIALTQALKMAEGKRLNVYTDSRYAFATAHIHGEIYRRRGWLTSEGREIKNKSEILALLKALFLPKRLSIIHCLGHQKGDSAEARGNRLADQAAREAAIKTPPDTSTLLAGKRTADGSEFEKRTADGSEFESPKKKAKVE

SEQ ID NO: 7140 - protein, 2094 aa, synthetic construct
MPAAKRVKLDGGDKKYSIGLDIGTNSVGWAVITDEYKVPSKKFKVLGNTDRHSIKKNLIGALLFDSGETAEATRLKRTARRRYTRRKNRICYLQEIFSNEMAKVDDSFFHRLEESFLVEEDKKHERHPIFGNIVDEVAYHEKYPTIYHLRKKLVDSTDKADLRLIYLALAHMIKFRGHFLIEGDLNPDNSDVDKLFIQLVQTYNQLFEENPINASGVDAKAILSARLSKSRRLENLIAQLPGEKKNGLFGNLIALSLGLTPNFKSNFDLAEDAKLQLSKDTYDDDLDNLLAQIGDQYADLFLAAKNLSDAILLSDILRVNTEITKAPLSASMIKRYDEHHQDLTLLKALVRQQLPEKYKEIFFDQSKNGYAGYIDGGASQEEFYKFIKPILEKMDGTEELLVKLNREDLLRKQRTFDNGSIPHQIHLGELHAILRRQEDFYPFLKDNREKIEKILTFRIPYYVGPLARGNSRFAWMTRKSEETITPWNFEEVVDKGASAQSFIERMTNFDKNLPNEKVLPKHSLLYEYFTVYNELTKVKYVTEGMRKPAFLSGEQKKAIVDLLFKTNRKVTVKQLKEDYFKKIECFDSVEISGVEDRFNASLGTYHDLLKIIKDKDFLDNEENEDILEDIVLTLTLFEDREMIEERLKTYAHLFDDKVMKQLKRRRYTGWGRLSRKLINGIRDKQSGKTILDFLKSDGFANRNFMQLIHDDSLTFKEDIQKAQVSGQGDSLHEHIANLAGSPAIKKGILQTVKVVDELVKVMGRHKPENIVIEMARENQTTQKGQKNSRERMKRIEEGIKELGSQILKEHPVENTQLQNEKLYLYYLQNGRDMYVDQELDINRLSDYDVDHIVPQSFLKDDSIDNKVLTRSDKARGKSDNVPSEEVVKKMKNYWRQLLNAKLITQRKFDNLTKAERGGLSELDKAGFIKRQLVETRQITKHVAQILDSRMNTKYDENDKLIREVKVITLKSKLVSDFRKDFQFYKVREINNYHHAHDAYLNAVVGTALIKKYPKLESEFVYGDYKVYDVRKMIAKSEQEIGKATAKYFFYSNIMNFFKTEITLANGEIRKRPLIETNGETGEIVWDKGRDFATVRKVLSMPQVNIVKKTEVQTGGFSKESILPKRNSDKLIARKKDWDPKKYGGFDSPTVAYSVLVVAKVEKGKSKKLKSVKELLGITIMERSSFEKNPIDFLEAKGYKEVKKDLIIKLPKYSLFELENGRKRMLASAGELQKGNELALPSKYVNFLYLASHYEKLKGSPEDNEQKQLFVEQHKHYLDEIIEQISEFSKRVILADANLDKVLSAYNKHRDKPIREQAENIIHLFTLTNLGAPAAFKYFDTTIDRKRYTSTKEVLDATLIHQSITGLYETRIDLSQLGGDGGGGSPAPGSSGGTLNIEDEYRLHETSKGPDVPLGSTWLSDFPQAWAETGGMGLAVRQAPLIIPLKATSTPVSIKQYPMSQEARLGIKPHIQRLLDQGILVPCQSPWNTPLLPVKKPGTNDYRPVQDLREVNKRVEDIHPTVPNPYNLLSGLPPSHQWYTVLDLKDAFFCLRLHPTSQSLFAFEWRDPEMGISGQLTWTRLPQGFKNSPTLFNEALHRDLADFRIQHPDLILLQYVDDLLLAATSELDCQQGTRALLQTLGDLGYRASAKKAQICQKQVKYLGYLLKEGQRWLTEARKETVMGQPTPKTPRQLREFLGTAGFCRLWIPGFAEMAAPLYPLTKPGTLFEWGPDQQKAYQEIKQALLTAPALGLPDLTKPFELFVDEKQGYAKGVLTQKLGPWRRPVAYLSKKLDPVAAGWPPCLRMVAAIAVLTKDAGKLTMGQPLVILAPHAVEALVKQPPDRWLSNARMTHYQALLLDTDRVQFGPIVALNPATLLPLPEEGLQHDCLDILAEAHGTRPDLTDQPLPDADHTWYTDGSSFLQEGQRKAGAAVTTETEVVWAKALPAGTSAQRAELIALTQALKMAEGKKLNVYTDSRYAFATAHIHGEIYRRRGWLTSEGKEIKNKDEILALLKALFLPKRLSIIHCPGHQKGNRAEARGNRMADQAAREVATRETPETSTLLAGKRTADGSEFEKRTADGSEFESPKKKAKVE

SEQ ID NO: 7141 - protein, 2092 aa, synthetic construct
MPAAKRVKLDGGDKKYSIGLDIGTNSVGWAVITDEYKVPSKKFKVLGNTDRHSIKKNLIGALLFDSGETAEATRLKRTARRRYTRRKNRICYLQEIFSNEMAKVDDSFFHRLEESFLVEEDKKHERHPIFGNIVDEVAYHEKYPTIYHLRKKLVDSTDKADLRLIYLALAHMIKFRGHFLIEGDLNPDNSDVDKLFIQLVQTYNQLFEENPINASGVDAKAILSARLSKSRRLENLIAQLPGEKKNGLFGNLIALSLGLTPNFKSNFDLAEDAKLQLSKDTYDDDLDNLLAQIGDQYADLFLAAKNLSDAILLSDILRVNTEITKAPLSASMIKRYDEHHQDLTLLKALVRQQLPEKYKEIFFDQSKNGYAGYIDGGASQEEFYKFIKPILEKMDGTEELLVKLNREDLLRKQRTFDNGSIPHQIHLGELHAILRRQEDFYPFLKDNREKIEKILTFRIPYYVGPLARGNSRFAWMTRKSEETITPWNFEEVVDKGASAQSFIERMTNFDKNLPNEKVLPKHSLLYEYFTVYNELTKVKYVTEGMRKPAFLSGEQKKAIVDLLFKTNRKVTVKQLKEDYFKKIECFDSVEISGVEDRFNASLGTYHDLLKIIKDKDFLDNEENEDILEDIVLTLTLFEDREMIEERLKTYAHLFDDKVMKQLKRRRYTGWGRLSRKLINGIRDKQSGKTILDFLKSDGFANRNFMQLIHDDSLTFKEDIQKAQVSGQGDSLHEHIANLAGSPAIKKGILQTVKVVDELVKVMGRHKPENIVIEMARENQTTQKGQKNSRERMKRIEEGIKELGSQILKEHPVENTQLQNEKLYLYYLQNGRDMYVDQELDINRLSDYDVDHIVPQSFLKDDSIDNKVLTRSDKARGKSDNVPSEEVVKKMKNYWRQLLNAKLITQRKFDNLTKAERGGLSELDKAGFIKRQLVETRQITKHVAQILDSRMNTKYDENDKLIREVKVITLKSKLVSDFRKDFQFYKVREINNYHHAHDAYLNAVVGTALIKKYPKLESEFVYGDYKVYDVRKMIAKSEQEIGKATAKYFFYSNIMNFFKTEITLANGEIRKRPLIETNGETGEIVWDKGRDFATVRKVLSMPQVNIVKKTEVQTGGFSKESILPKRNSDKLIARKKDWDPKKYGGFDSPTVAYSVLVVAKVEKGKSKKLKSVKELLGITIMERSSFEKNPIDFLEAKGYKEVKKDLIIKLPKYSLFELENGRKRMLASAGELQKGNELALPSKYVNFLYLASHYEKLKGSPEDNEQKQLFVEQHKHYLDEIIEQISEFSKRVILADANLDKVLSAYNKHRDKPIREQAENIIHLFTLTNLGAPAAFKYFDTTIDRKRYTSTKEVLDATLIHQSITGLYETRIDLSQLGGDGGGGSPAPGSSGGVLNLEEEYRLHEKPVPSSIDPSWLQLFPTVWAERAGMGLANQVPPVVVELRSGASPVAVRQYPMSKEAREGIRPHIQRFLDLGVLVPCQSPWNTPLLPVKKPGTNDYRPVQDLREINKRVQDIHPTVPNPYNLLSSLPPSHTWYSVLDLKDAFFCLKLHPNSQPLFAFEWRDPEKGNTGQLTWTRLPQGFKNSPTLFNEALHRDLAPFRALNPQVVLLQYVDDLLVAAPTYRDCKEGTQKLLQELSKLGYRVSAKKAQLCQKEVTYLGYLLKEGKRWLTPARKATVMKIPPPTTPRQVREFLGTAGFCRLWIPGFASLAAPLYPLTKPSIPFIWTEEHQKAFDRIKEALLSAPALALPDLTKPFTLYVDERAGVARGVLTQTLGPWRRPVAYLSKKLDPVASGWPTCLKAVAAVALLLKDADKLTLGQNVTVIASHSLESIVRQPPDRWMTNARMTHYQSLLLNERVSFAPPAVLNPATLLPVESEATPVHRCSEILAEETGTRRDLKDQPLPGVPAWYTDGSSFIAEGKRRAGAAIVDGKRTVWASSLPEGTSAQKAELVALTQALRLAEGKDINIYTDSRYAFATAHIHGAIYKQRGWLTSAGKDIKNKEEILALLEAIHLPKRVAIIHCPGHQKGNDPVATGNRRADEAAKQAALSTRVLAETTKPAGKRTADGSEFEKRTADGSEFESPKKKAKVE

SEQ ID NO: 7142 - protein, 2094 aa, synthetic construct; identical to SEQ ID NO: 4525

SEQ ID NO: 7143 - protein, 2096 aa, synthetic construct
MPAAKRVKLDGGDKKYSIGLDIGTNSVGWAVITDEYKVPSKKFKVLGNTDRHSIKKNLIGALLFDSGETAEATRLKRTARRRYTRRKNRICYLQEIFSNEMAKVDDSFFHRLEESFLVEEDKKHERHPIFGNIVDEVAYHEKYPTIYHLRKKLVDSTDKADLRLIYLALAHMIKFRGHFLIEGDLNPDNSDVDKLFIQLVQTYNQLFEENPINASGVDAKAILSARLSKSRRLENLIAQLPGEKKNGLFGNLIALSLGLTPNFKSNFDLAEDAKLQLSKDTYDDDLDNLLAQIGDQYADLFLAAKNLSDAILLSDILRVNTEITKAPLSASMIKRYDEHHQDLTLLKALVRQQLPEKYKEIFFDQSKNGYAGYIDGGASQEEFYKFIKPILEKMDGTEELLVKLNREDLLRKQRTFDNGSIPHQIHLGELHAILRRQEDFYPFLKDNREKIEKILTFRIPYYVGPLARGNSRFAWMTRKSEETITPWNFEEVVDKGASAQSFIERMTNFDKNLPNEKVLPKHSLLYEYFTVYNELTKVKYVTEGMRKPAFLSGEQKKAIVDLLFKTNRKVTVKQLKEDYFKKIECFDSVEISGVEDRFNASLGTYHDLLKIIKDKDFLDNEENEDILEDIVLTLTLFEDREMIEERLKTYAHLFDDKVMKQLKRRRYTGWGRLSRKLINGIRDKQSGKTILDFLKSDGFANRNFMQLIHDDSLTFKEDIQKAQVSGQGDSLHEHIANLAGSPAIKKGILQTVKVVDELVKVMGRHKPENIVIEMARENQTTQKGQKNSRERMKRIEEGIKELGSQILKEHPVENTQLQNEKLYLYYLQNGRDMYVDQELDINRLSDYDVDHIVPQSFLKDDSIDNKVLTRSDKARGKSDNVPSEEVVKKMKNYWRQLLNAKLITQRKFDNLTKAERGGLSELDKAGFIKRQLVETRQITKHVAQILDSRMNTKYDENDKLIREVKVITLKSKLVSDFRKDFQFYKVREINNYHHAHDAYLNAVVGTALIKKYPKLESEFVYGDYKVYDVRKMIAKSEQEIGKATAKYFFYSNIMNFFKTEITLANGEIRKRPLIETNGETGEIVWDKGRDFATVRKVLSMPQVNIVKKTEVQTGGFSKESILPKRNSDKLIARKKDWDPKKYGGFDSPTVAYSVLVVAKVEKGKSKKLKSVKELLGITIMERSSFEKNPIDFLEAKGYKEVKKDLIIKLPKYSLFELENGRKRMLASAGELQKGNELALPSKYVNFLYLASHYEKLKGSPEDNEQKQLFVEQHKHYLDEIIEQISEFSKRVILADANLDKVLSAYNKHRDKPIREQAENIIHLFTLTNLGAPAAFKYFDTTIDRKRYTSTKEVLDATLIHQSITGLYETRIDLSQLGGDGGGSSGGSPAPGGTAPLEEEYRLFLEAPIQNVTLLEQWKREIPKVWAEINPPGLASTQAPIHVQLLSTALPVRVRQYPITLEAKRSLRETIRKFRAAGILRPVHSPWNTPLLPVRKSGTSEYRMVQDLREVNKRVETIHPTVPNPYTLLSLLPPDRIWYSVLDLKDAFFCIPLAPESQLIFAFEWADAEEGESGQLTWTRLPQGFKNSPTLFNEALNRDLQGFRLDHPSVSLLQYVDDLLIAADTQAACLSATRDLLMTLAELGYRVSGKKAQLCQEEVTYLGFKIHKGSRSLSNSRTQAILQIPVPKTKRQVREFLGKIGYCRLFIPGFAELAQPLYAATRPGNDPLVWGEKEEEAFQSLKLALTQPPALALPSLDKPFQLFVEETSGAAKGVLTQALGPWKRPVAYLSKRLDPVAAGWPRCLRAIAAAALLTREASKLTFGQDIEITSSHNLESLLRSPPDKWLTNARITQYQVLLLDPPRVRFKQTAALNPATLLPETDDTLPIHHCLDTLDSLTSTRPDLTDQPLAQAEATLFTDGSSYIRDGKRYAGAAVVTLDSVIWAEPLPIGTSAQKAELIALTKALEWSKDKSVNIYTDSRYAFATLHVHGMIYRERGWLTAGGKAIKNAPEILALLTAVWLPKRVAVMHCKGHQKDDAPTSTGNRRADEVAREVAIRPLSTQATISAGKRTADGSEFEKRTADGSEFESPKKKAKVE

SEQ ID NO: 7144 - protein, 2093 aa, synthetic construct
MPAAKRVKLDGGDKKYSIGLDIGTNSVGWAVITDEYKVPSKKFKVLGNTDRHSIKKNLIGALLFDSGETAEATRLKRTARRRYTRRKNRICYLQEIFSNEMAKVDDSFFHRLEESFLVEEDKKHERHPIFGNIVDEVAYHEKYPTIYHLRKKLVDSTDKADLRLIYLALAHMIKFRGHFLIEGDLNPDNSDVDKLFIQLVQTYNQLFEENPINASGVDAKAILSARLSKSRRLENLIAQLPGEKKNGLFGNLIALSLGLTPNFKSNFDLAEDAKLQLSKDTYDDDLDNLLAQIGDQYADLFLAAKNLSDAILLSDILRVNTEITKAPLSASMIKRYDEHHQDLTLLKALVRQQLPEKYKEIFFDQSKNGYAGYIDGGASQEEFYKFIKPILEKMDGTEELLVKLNREDLLRKQRTFDNGSIPHQIHLGELHAILRRQEDFYPFLKDNREKIEKILTFRIPYYVGPLARGNSRFAWMTRKSEETITPWNFEEVVDKGASAQSFIERMTNFDKNLPNEKVLPKHSLLYEYFTVYNELTKVKYVTEGMRKPAFLSGEQKKAIVDLLFKTNRKVTVKQLKEDYFKKIECFDSVEISGVEDRFNASLGTYHDLLKIIKDKDFLDNEENEDILEDIVLTLTLFEDREMIEERLKTYAHLFDDKVMKQLKRRRYTGWGRLSRKLINGIRDKQSGKTILDFLKSDGFANRNFMQLIHDDSLTFKEDIQKAQVSGQGDSLHEHIANLAGSPAIKKGILQTVKVVDELVKVMGRHKPENIVIEMARENQTTQKGQKNSRERMKRIEEGIKELGSQILKEHPVENTQLQNEKLYLYYLQNGRDMYVDQELDINRLSDYDVDHIVPQSFLKDDSIDNKVLTRSDKARGKSDNVPSEEVVKKMKNYWRQLLNAKLITQRKFDNLTKAERGGLSELDKAGFIKRQLVETRQITKHVAQILDSRMNTKYDENDKLIREVKVITLKSKLVSDFRKDFQFYKVREINNYHHAHDAYLNAVVGTALIKKYPKLESEFVYGDYKVYDVRKMIAKSEQEIGKATAKYFFYSNIMNFFKTEITLANGEIRKRPLIETNGETGEIVWDKGRDFATVRKVLSMPQVNIVKKTEVQTGGFSKESILPKRNSDKLIARKKDWDPKKYGGFDSPTVAYSVLVVAKVEKGKSKKLKSVKELLGITIMERSSFEKNPIDFLEAKGYKEVKKDLIIKLPKYSLFELENGRKRMLASAGELQKGNELALPSKYVNFLYLASHYEKLKGSPEDNEQKQLFVEQHKHYLDEIIEQISEFSKRVILADANLDKVLSAYNKHRDKPIREQAENIIHLFTLTNLGAPAAFKYFDTTIDRKRYTSTKEVLDATLIHQSITGLYETRIDLSQLGGDGGGSSGGSPAPGGTLQLEEEYRLFEPESTQKQEMDIWLKNFPQAWAETGGMGTAHCQAPVLIQLKATATPISIRQYPMPHEAYQGIKPHIRRMLDQGILKPCQSPWNTPLLPVKKPGTEDYRPVQDLREVNKRVEDIHPTVPNPYNLLSTLPPSHPWYTVLDLKDAFFCLRLHSESQLLFAFEWRDPEIGLSGQLTWTRLPQGFKNSPTLFNEALHSDLADFRVRYPALVLLQYVDDLLLAAATRTECLEGTKALLETLGNKGYRASAKKAQICLQEVTYLGYSLKDGQRWLTKARKEAILSIPVPKNSRQVREFLGKAGYCRLFIPGFAELAAPLYPLTRPGTLFQWGTEQQLAFEDIKKALLSSPALGLPDITKPFELFIDENSGFAKGVLVQKLGPWKRPVAYLSKKLDTVASGWPPCLRMVAAIAILVKDAGKLTLGQPLTILTSHPVEALVRQPPNKWLSNARMTHYQAMLLDAERVHFGPTVSLNPATLLPLPSGGNHHDCLQILAETHGTRPDLTDQPLPDADLTWYTDGSSFIRNGEREAGAAVTTESEVIWAAPLPPGTSAQRAELIALTQALKMAEGKKLTVYTDSRYAFATTHVHGEIYRRRGWLTSEGKEIKNKNEILALLEALFLPKRLSIIHCPGHQKGDSPQAKGNRLADDTAKKAATETHSSLTVLPAGKRTADGSEFEKRTADGSEFESPKKKAKVE

SEQ ID NO: 7145 - protein, 2174 aa, synthetic construct
MPAAKRVKLDGGDKKYSIGLDIGTNSVGWAVITDEYKVPSKKFKVLGNTDRHSIKKNLIGALLFDSGETAEATRLKRTARRRYTRRKNRICYLQEIFSNEMAKVDDSFFHRLEESFLVEEDKKHERHPIFGNIVDEVAYHEKYPTIYHLRKKLVDSTDKADLRLIYLALAHMIKFRGHFLIEGDLNPDNSDVDKLFIQLVQTYNQLFEENPINASGVDAKAILSARLSKSRRLENLIAQLPGEKKNGLFGNLIALSLGLTPNFKSNFDLAEDAKLQLSKDTYDDDLDNLLAQIGDQYADLFLAAKNLSDAILLSDILRVNTEITKAPLSASMIKRYDEHHQDLTLLKALVRQQLPEKYKEIFFDQSKNGYAGYIDGGASQEEFYKFIKPILEKMDGTEELLVKLNREDLLRKQRTFDNGSIPHQIHLGELHAILRRQEDFYPFLKDNREKIEKILTFRIPYYVGPLARGNSRFAWMTRKSEETITPWNFEEVVDKGASAQSFIERMTNFDKNLPNEKVLPKHSLLYEYFTVYNELTKVKYVTEGMRKPAFLSGEQKKAIVDLLFKTNRKVTVKQLKEDYFKKIECFDSVEISGVEDRFNASLGTYHDLLKIIKDKDFLDNEENEDILEDIVLTLTLFEDREMIEERLKTYAHLFDDKVMKQLKRRRYTGWGRLSRKLINGIRDKQSGKTILDFLKSDGFANRNFMQLIHDDSLTFKEDIQKAQVSGQGDSLHEHIANLAGSPAIKKGILQTVKVVDELVKVMGRHKPENIVIEMARENQTTQKGQKNSRERMKRIEEGIKELGSQILKEHPVENTQLQNEKLYLYYLQNGRDMYVDQELDINRLSDYDVDHIVPQSFLKDDSIDNKVLTRSDKARGKSDNVPSEEVVKKMKNYWRQLLNAKLITQRKFDNLTKAERGGLSELDKAGFIKRQLVETRQITKHVAQILDSRMNTKYDENDKLIREVKVITLKSKLVSDFRKDFQFYKVREINNYHHAHDAYLNAVVGTALIKKYPKLESEFVYGDYKVYDVRKMIAKSEQEIGKATAKYFFYSNIMNFFKTEITLANGEIRKRPLIETNGETGEIVWDKGRDFATVRKVLSMPQVNIVKKTEVQTGGFSKESILPKRNSDKLIARKKDWDPKKYGGFDSPTVAYSVLVVAKVEKGKSKKLKSVKELLGITIMERSSFEKNPIDFLEAKGYKEVKKDLIIKLPKYSLFELENGRKRMLASAGELQKGNELALPSKYVNFLYLASHYEKLKGSPEDNEQKQLFVEQHKHYLDEIIEQISEFSKRVILADANLDKVLSAYNKHRDKPIREQAENIIHLFTLTNLGAPAAFKYFDTTIDRKRYTSTKEVLDATLIHQSITGLYETRIDLSQLGGDGGGSSGGSPAPGGMNPLQLLQPLPAEIKGTKLLAHWNSGATITCIPESFLEDEQPIKKTLIKTIHGEKQQNVYYVTFKVKGRKVEAEVIASPYEYILLSPTDVPWLTQQPLQLTILVPLQEYQEKILSKTALPEDQKQQLKTLFVKYDNLWQHWENQVGHRKIRPHNIATGDYPPRPQKQYPINPKAKPSIQIVIDDLLKQGVLTPQNSTMNTPVYPVPKPDGRWRMVLDYREVNKTIPLTAAQNQHSAGILATIVRQKYKTTLDLANGFWAHPITPESYWLTAFTWQGKQYCWTRLPQGFLNSPALFNADVVDLLKEIPNVQVYVDDIYLSHDDPKEHVQQLEKVFQILLQAGYVVSLKKSEIGQKTVEFLGFNITKEGRGLTDTFKTKLLNITPPKDLKQLQSILGKLNFARNFIPNFAELVQPLYNLIAPAKGKYIEWSEENTKQLNMVIEALNTASNLEERLPEQRLVIKVNTSPSAGYVRYYNETGKKPIMYLNYVFSKAELKFSMLEKLLTTMHKALIKAMDLAMGQEILVYSPIVSMTKIQKTPLPERKALPIRWITWMTYLEDPRIQFHYDKTLPELKHIPDVYTSSQSPVKHPSQYEGVFYTDGSAIKSPDPTKSNNAGMGIVHATYKPEYQVLNQWSIPLGNHTAQMAEIAAVEFACKKALKIPGPVLVITDSFYVAESANKELPYWKSNGFVNNKKKPLKHISKWKSIAECLSMKPDITIQHEKGISLQIPVFILKGNALADKLATQGSYVVNAGKRTADGSEFEKRTADGSEFESPKKKAKVE

SEQ ID NO: 7146 - protein, 2092 aa, synthetic construct
MPAAKRVKLDGGDKKYSIGLDIGTNSVGWAVITDEYKVPSKKFKVLGNTDRHSIKKNLIGALLFDSGETAEATRLKRTARRRYTRRKNRICYLQEIFSNEMAKVDDSFFHRLEESFLVEEDKKHERHPIFGNIVDEVAYHEKYPTIYHLRKKLVDSTDKADLRLIYLALAHMIKFRGHFLIEGDLNPDNSDVDKLFIQLVQTYNQLFEENPINASGVDAKAILSARLSKSRRLENLIAQLPGEKKNGLFGNLIALSLGLTPNFKSNFDLAEDAKLQLSKDTYDDDLDNLLAQIGDQYADLFLAAKNLSDAILLSDILRVNTEITKAPLSASMIKRYDEHHQDLTLLKALVRQQLPEKYKEIFFDQSKNGYAGYIDGGASQEEFYKFIKPILEKMDGTEELLVKLNREDLLRKQRTFDNGSIPHQIHLGELHAILRRQEDFYPFLKDNREKIEKILTFRIPYYVGPLARGNSRFAWMTRKSEETITPWNFEEVVDKGASAQSFIERMTNFDKNLPNEKVLPKHSLLYEYFTVYNELTKVKYVTEGMRKPAFLSGEQKKAIVDLLFKTNRKVTVKQLKEDYFKKIECFDSVEISGVEDRFNASLGTYHDLLKIIKDKDFLDNEENEDILEDIVLTLTLFEDREMIEERLKTYAHLFDDKVMKQLKRRRYTGWGRLSRKLINGIRDKQSGKTILDFLKSDGFANRNFMQLIHDDSLTFKEDIQKAQVSGQGDSLHEHIANLAGSPAIKKGILQTVKVVDELVKVMGRHKPENIVIEMARENQTTQKGQKNSRERMKRIEEGIKELGSQILKEHPVENTQLQNEKLYLYYLQNGRDMYVDQELDINRLSDYDVDHIVPQSFLKDDSIDNKVLTRSDKARGKSDNVPSEEVVKKMKNYWRQLLNAKLITQRKFDNLTKAERGGLSELDKAGFIKRQLVETRQITKHVAQILDSRMNTKYDENDKLIREVKVITLKSKLVSDFRKDFQFYKVREINNYHHAHDAYLNAVVGTALIKKYPKLESEFVYGDYKVYDVRKMIAKSEQEIGKATAKYFFYSNIMNFFKTEITLANGEIRKRPLIETNGETGEIVWDKGRDFATVRKVLSMPQVNIVKKTEVQTGGFSKESILPKRNSDKLIARKKDWDPKKYGGFDSPTVAYSVLVVAKVEKGKSKKLKSVKELLGITIMERSSFEKNPIDFLEAKGYKEVKKDLIIKLPKYSLFELENGRKRMLASAGELQKGNELALPSKYVNFLYLASHYEKLKGSPEDNEQKQLFVEQHKHYLDEIIEQISEFSKRVILADANLDKVLSAYNKHRDKPIREQAENIIHLFTLTNLGAPAAFKYFDTTIDRKRYTSTKEVLDATLIHQSITGLYETRIDLSQLGGDGGGSSGGSPAPGGVLNLEEEYRLHEKPVPSSIDPSWLQLFPTVWAERAGMGLANQVPPVVVELRSGASPVAVRQYPMSKEAREGIRPHIQKFLDLGVLVPCRSPWNTPLLPVKKPGTNDYRPVQDLREINKRVQDIHPTVPNPYNLLSSLPPSYTWYSVLDLKDAFFCLRLHPNSQPLFAFEWKDPEKGNTGQLTWTRLPQGFKNSPTLFNEALHRDLAPFRALNPQVVLLQYVDDLLVAAPTYEDCKKGTQKLLQELSKLGYRVSAKKAQLCQREVTYLGYLLKEGKRWLTPARKATVMKIPVPTTPRQVREFLGKAGFCRLFIPGFASLAAPLYPLTKPSIPFIWTEEHQQAFDHIKKALLSAPALALPDLTKPFTLYIDERAGVARGVLTQTLGPWRRPVAYLSKKLDPVASGWPTCLKAVAAVALLLKDADKLTLGQNVTVIASHSLESIVRQPPDRWMTNARMTHYQSLLLNERVSFAPPAVLNPATLLPVESEATPVHRCSEILAEETGTRRDLEDQPLPGVPTWYTDGSSFITEGKRRAGAPIVDGKRTVWASSLPEGTSAQKAELVALTQALRLAEGKNINIYTDSRYAFATAHIHGAIYKQRGWLTSAGKDIKNKEEILALLEAIHLPRRVAIIHCPGHQRGSNPVATGNRRADEAAKQAALSTRVLAGTTKPAGKRTADGSEFEKRTADGSEFESPKKKAKVE

SEQ ID NO: 7147 - protein, 2094 aa, synthetic construct
MPAAKRVKLDGGDKKYSIGLDIGTNSVGWAVITDEYKVPSKKFKVLGNTDRHSIKKNLIGALLFDSGETAEATRLKRTARRRYTRRKNRICYLQEIFSNEMAKVDDSFFHRLEESFLVEEDKKHERHPIFGNIVDEVAYHEKYPTIYHLRKKLVDSTDKADLRLIYLALAHMIKFRGHFLIEGDLNPDNSDVDKLFIQLVQTYNQLFEENPINASGVDAKAILSARLSKSRRLENLIAQLPGEKKNGLFGNLIALSLGLTPNFKSNFDLAEDAKLQLSKDTYDDDLDNLLAQIGDQYADLFLAAKNLSDAILLSDILRVNTEITKAPLSASMIKRYDEHHQDLTLLKALVRQQLPEKYKEIFFDQSKNGYAGYIDGGASQEEFYKFIKPILEKMDGTEELLVKLNREDLLRKQRTFDNGSIPHQIHLGELHAILRRQEDFYPFLKDNREKIEKILTFRIPYYVGPLARGNSRFAWMTRKSEETITPWNFEEVVDKGASAQSFIERMTNFDKNLPNEKVLPKHSLLYEYFTVYNELTKVKYVTEGMRKPAFLSGEQKKAIVDLLFKTNRKVTVKQLKEDYFKKIECFDSVEISGVEDRFNASLGTYHDLLKIIKDKDFLDNEENEDILEDIVLTLTLFEDREMIEERLKTYAHLFDDKVMKQLKRRRYTGWGRLSRKLINGIRDKQSGKTILDFLKSDGFANRNFMQLIHDDSLTFKEDIQKAQVSGQGDSLHEHIANLAGSPAIKKGILQTVKVVDELVKVMGRHKPENIVIEMARENQTTQKGQKNSRERMKRIEEGIKELGSQILKEHPVENTQLQNEKLYLYYLQNGRDMYVDQELDINRLSDYDVDHIVPQSFLKDDSIDNKVLTRSDKARGKSDNVPSEEVVKKMKNYWRQLLNAKLITQRKFDNLTKAERGGLSELDKAGFIKRQLVETRQITKHVAQILDSRMNTKYDENDKLIREVKVITLKSKLVSDFRKDFQFYKVREINNYHHAHDAYLNAVVGTALIKKYPKLESEFVYGDYKVYDVRKMIAKSEQEIGKATAKYFFYSNIMNFFKTEITLANGEIRKRPLIETNGETGEIVWDKGRDFATVRKVLSMPQVNIVKKTEVQTGGFSKESILPKRNSDKLIARKKDWDPKKYGGFDSPTVAYSVLVVAKVEKGKSKKLKSVKELLGITIMERSSFEKNPIDFLEAKGYKEVKKDLIIKLPKYSLFELENGRKRMLASAGELQKGNELALPSKYVNFLYLASHYEKLKGSPEDNEQKQLFVEQHKHYLDEIIEQISEFSKRVILADANLDKVLSAYNKHRDKPIREQAENIIHLFTLTNLGAPAAFKYFDTTIDRKRYTSTKEVLDATLIHQSITGLYETRIDLSQLGGDGGGSSGGSPAPGGTLNIEDEYRLHETSKEPDVSLGSTWLSDFPQAWAETGGMGLAVRQAPLIIPLKATSTPVSIKQYPMSQEARLGIKPHIQRLLDQGILVPCQSPWNTPLLPVKKPGTNDYRPVQDLREVNKRVEDIHPTVPNPYNLLSGLPPSHQWYTVLDLKDAFFCLRLHPTSQPLFAFEWRDPEMGISGQLTWTRLPQGFKNSPTLFNEALHRDLAGFRIQHPDLILLQYVDDLLLAATSELDCQQGTRALLQTLGDLGYRASAKKAQICQKQVKYLGYLLKEGQRWLTEARKETVMGQPIPKTPRQLREFLGTAGFCRLWIPGFAEMAAPLYPLTKPGTLFNWGPDQQKAFQEIKQALLTAPALGLPDLTKPFELFVDEKQGYAKGVLTQKLGPWRRPVAYLSKKLDPVAAGWPPCLRMVAAIAVLTKDAGKLTMGQPLVILAPHAVEALVKQPPDRWLSNARMTHYQALLLDTDRVQFGPVVALNPATLLPLPEEGLQHDCLDILAEAHGTRSDLMDQPLPDADHTWYTDGSSFLQEGQRKAGAAVTTETEVIWARALPAGTSAQRAELIALTQALKMAEGKKLNVYTDSRYAFATAHIHGEIYRRRGWLTSEGKEIKNKDEILALLKALFLPKRLSIIHCPGHQKGNSAEARGNRMADQAAREVATRETPETSTLLAGKRTADGSEFEKRTADGSEFESPKKKAKVE

SEQ ID NO: 7148 - protein, 2092 aa, synthetic construct
MPAAKRVKLDGGDKKYSIGLDIGTNSVGWAVITDEYKVPSKKFKVLGNTDRHSIKKNLIGALLFDSGETAEATRLKRTARRRYTRRKNRICYLQEIFSNEMAKVDDSFFHRLEESFLVEEDKKHERHPIFGNIVDEVAYHEKYPTIYHLRKKLVDSTDKADLRLIYLALAHMIKFRGHFLIEGDLNPDNSDVDKLFIQLVQTYNQLFEENPINASGVDAKAILSARLSKSRRLENLIAQLPGEKKNGLFGNLIALSLGLTPNFKSNFDLAEDAKLQLSKDTYDDDLDNLLAQIGDQYADLFLAAKNLSDAILLSDILRVNTEITKAPLSASMIKRYDEHHQDLTLLKALVRQQLPEKYKEIFFDQSKNGYAGYIDGGASQEEFYKFIKPILEKMDGTEELLVKLNREDLLRKQRTFDNGSIPHQIHLGELHAILRRQEDFYPFLKDNREKIEKILTFRIPYYVGPLARGNSRFAWMTRKSEETITPWNFEEVVDKGASAQSFIERMTNFDKNLPNEKVLPKHSLLYEYFTVYNELTKVKYVTEGMRKPAFLSGEQKKAIVDLLFKTNRKVTVKQLKEDYFKKIECFDSVEISGVEDRFNASLGTYHDLLKIIKDKDFLDNEENEDILEDIVLTLTLFEDREMIEERLKTYAHLFDDKVMKQLKRRRYTGWGRLSRKLINGIRDKQSGKTILDFLKSDGFANRNFMQLIHDDSLTFKEDIQKAQVSGQGDSLHEHIANLAGSPAIKKGILQTVKVVDELVKVMGRHKPENIVIEMARENQTTQKGQKNSRERMKRIEEGIKELGSQILKEHPVENTQLQNEKLYLYYLQNGRDMYVDQELDINRLSDYDVDHIVPQSFLKDDSIDNKVLTRSDKARGKSDNVPSEEVVKKMKNYWRQLLNAKLITQRKFDNLTKAERGGLSELDKAGFIKRQLVETRQITKHVAQILDSRMNTKYDENDKLIREVKVITLKSKLVSDFRKDFQFYKVREINNYHHAHDAYLNAVVGTALIKKYPKLESEFVYGDYKVYDVRKMIAKSEQEIGKATAKYFFYSNIMNFFKTEITLANGEIRKRPLIETNGETGEIVWDKGRDFATVRKVLSMPQVNIVKKTEVQTGGFSKESILPKRNSDKLIARKKDWDPKKYGGFDSPTVAYSVLVVAKVEKGKSKKLKSVKELLGITIMERSSFEKNPIDFLEAKGYKEVKKDLIIKLPKYSLFELENGRKRMLASAGELQKGNELALPSKYVNFLYLASHYEKLKGSPEDNEQKQLFVEQHKHYLDEIIEQISEFSKRVILADANLDKVLSAYNKHRDKPIREQAENIIHLFTLTNLGAPAAFKYFDTTIDRKRYTSTKEVLDATLIHQSITGLYETRIDLSQLGGDGGGSSGGSPAPGGVLNLEEEYRLHEKPVPSSIDPSWLQLFPTVWAERAGMGLANQVPPVVVELRSGASPVAVRQYPMSKEAREGIRPHIQRFLDLGVLVPCQSPWNTPLLPVKKPGTNDYRPVQDLREINKRVQDIHPTVPNPYNLLSSLPPSHTWYSVLDLKDAFFCLKLHPNSQPLFAFEWRDPEKGNTGQLTWTRLPQGFKNSPTLFNEALHRDLAPFRALNPQVVLLQYVDDLLVAAPTYRDCKEGTQKLLQELSKLGYRVSAKKAQLCQKEVTYLGYLLKEGKRWLTPARKATVMKIPPPTTPRQVREFLGTAGFCRLWIPGFASLAAPLYPLTKPSIPFIWTEEHQKAFDRIKEALLSAPALALPDLTKPFTLYVDERAGVARGVLTQTLGPWRRPVAYLSKKLDPVASGWPTCLKAVAAVALLLKDADKLTLGQNVTVIASHSLESIVRQPPDRWMTNARMTHYQSLLLNERVSFAPPAVLNPATLLPVESEATPVHRCSEILAEETGTRRDLKDQPLPGVPAWYTDGSSFIAEGKRRAGAAIVDGKRTVWASSLPEGTSAQKAELVALTQALRLAEGKDINIYTDSRYAFATAHIHGAIYKQRGWLTSAGKDIKNKEEILALLEAIHLPKRVAIIHCPGHQKGNDPVATGNRRADEAAKQAALSTRVLAETTKPAGKRTADGSEFEKRTADGSEFESPKKKAKVE

SEQ ID NO: 7149 - protein, 2092 aa, synthetic construct
MPAAKRVKLDGGDKKYSIGLDIGTNSVGWAVITDEYKVPSKKFKVLGNTDRHSIKKNLIGALLFDSGETAEATRLKRTARRRYTRRKNRICYLQEIFSNEMAKVDDSFFHRLEESFLVEEDKKHERHPIFGNIVDEVAYHEKYPTIYHLRKKLVDSTDKADLRLIYLALAHMIKFRGHFLIEGDLNPDNSDVDKLFIQLVQTYNQLFEENPINASGVDAKAILSARLSKSRRLENLIAQLPGEKKNGLFGNLIALSLGLTPNFKSNFDLAEDAKLQLSKDTYDDDLDNLLAQIGDQYADLFLAAKNLSDAILLSDILRVNTEITKAPLSASMIKRYDEHHQDLTLLKALVRQQLPEKYKEIFFDQSKNGYAGYIDGGASQEEFYKFIKPILEKMDGTEELLVKLNREDLLRKQRTFDNGSIPHQIHLGELHAILRRQEDFYPFLKDNREKIEKILTFRIPYYVGPLARGNSRFAWMTRKSEETITPWNFEEVVDKGASAQSFIERMTNFDKNLPNEKVLPKHSLLYEYFTVYNELTKVKYVTEGMRKPAFLSGEQKKAIVDLLFKTNRKVTVKQLKEDYFKKIECFDSVEISGVEDRFNASLGTYHDLLKIIKDKDFLDNEENEDILEDIVLTLTLFEDREMIEERLKTYAHLFDDKVMKQLKRRRYTGWGRLSRKLINGIRDKQSGKTILDFLKSDGFANRNFMQLIHDDSLTFKEDIQKAQVSGQGDSLHEHIANLAGSPAIKKGILQTVKVVDELVKVMGRHKPENIVIEMARENQTTQKGQKNSRERMKRIEEGIKELGSQILKEHPVENTQLQNEKLYLYYLQNGRDMYVDQELDINRLSDYDVDHIVPQSFLKDDSIDNKVLTRSDKARGKSDNVPSEEVVKKMKNYWRQLLNAKLITQRKFDNLTKAERGGLSELDKAGFIKRQLVETRQITKHVAQILDSRMNTKYDENDKLIREVKVITLKSKLVSDFRKDFQFYKVREINNYHHAHDAYLNAVVGTALIKKYPKLESEFVYGDYKVYDVRKMIAKSEQEIGKATAKYFFYSNIMNFFKTEITLANGEIRKRPLIETNGETGEIVWDKGRDFATVRKVLSMPQVNIVKKTEVQTGGFSKESILPKRNSDKLIARKKDWDPKKYGGFDSPTVAYSVLVVAKVEKGKSKKLKSVKELLGITIMERSSFEKNPIDFLEAKGYKEVKKDLIIKLPKYSLFELENGRKRMLASAGELQKGNELALPSKYVNFLYLASHYEKLKGSPEDNEQKQLFVEQHKHYLDEIIEQISEFSKRVILADANLDKVLSAYNKHRDKPIREQAENIIHLFTLTNLGAPAAFKYFDTTIDRKRYTSTKEVLDATLIHQSITGLYETRIDLSQLGGDGGGSSGGSPAPGGVLNLEEEYRLHEKPVPSSIDPSWLQLFPTVWAERAGMGLANQVPPVVVELRSGASPVAVRQYPMSKEAREGIRPHIQRFLDLGVLVPCQSPWNTPLLPVKKPGTNDYRPVQDLREINKRVQDIHPTVPNPYNLLSSLPPSHTWYSVLDLKDAFFCLKLHPNSQPLFAFEWRDPEKGNTGQLTWTRLPQGFKNSPTLFNEALHRDLAPFRALNPQVVLLQYVDDLLVAAPTYRDCKEGTQKLLQELSKLGYRVSAKKAQLCQKEVTYLGYLLKEGKRWLTPARKATVMKIPPPTTPRQVREFLGKAGFCRLFIPGFASLAAPLYPLTKPSIPFIWTEEHQKAFDRIKEALLSAPALALPDLTKPFTLYVDERAGVARGVLTQTLGPWRRPVAYLSKKLDPVASGWPTCLKAVAAVALLLKDADKLTLGQNVTVIASHSLESIVRQPPDRWMTNARMTHYQSLLLNERVSFAPPAVLNPATLLPVESEATPVHRCSEILAEETGTRRDLKDQPLPGVPAWYTDGSSFIAEGKRRAGAAIVDGKRTVWASSLPEGTSAQKAELVALTQALRLAEGKDINIYTDSRYAFATAHIHGAIYKQRGWLTSAGKDIKNKEEILALLEAIHLPKRVAIIHCPGHQKGNDPVATGNRRADEAAKQAALSTRVLAETTKPAGKRTADGSEFEKRTADGSEFESPKKKAKVE

SEQ ID NO: 7150 - protein, 2094 aa, synthetic construct
MPAAKRVKLDGGDKKYSIGLDIGTNSVGWAVITDEYKVPSKKFKVLGNTDRHSIKKNLIGALLFDSGETAEATRLKRTARRRYTRRKNRICYLQEIFSNEMAKVDDSFFHRLEESFLVEEDKKHERHPIFGNIVDEVAYHEKYPTIYHLRKKLVDSTDKADLRLIYLALAHMIKFRGHFLIEGDLNPDNSDVDKLFIQLVQTYNQLFEENPINASGVDAKAILSARLSKSRRLENLIAQLPGEKKNGLFGNLIALSLGLTPNFKSNFDLAEDAKLQLSKDTYDDDLDNLLAQIGDQYADLFLAAKNLSDAILLSDILRVNTEITKAPLSASMIKRYDEHHQDLTLLKALVRQQLPEKYKEIFFDQSKNGYAGYIDGGASQEEFYKFIKPILEKMDGTEELLVKLNREDLLRKQRTFDNGSIPHQIHLGELHAILRRQEDFYPFLKDNREKIEKILTFRIPYYVGPLARGNSRFAWMTRKSEETITPWNFEEVVDKGASAQSFIERMTNFDKNLPNEKVLPKHSLLYEYFTVYNELTKVKYVTEGMRKPAFLSGEQKKAIVDLLFKTNRKVTVKQLKEDYFKKIECFDSVEISGVEDRFNASLGTYHDLLKIIKDKDFLDNEENEDILEDIVLTLTLFEDREMIEERLKTYAHLFDDKVMKQLKRRRYTGWGRLSRKLINGIRDKQSGKTILDFLKSDGFANRNFMQLIHDDSLTFKEDIQKAQVSGQGDSLHEHIANLAGSPAIKKGILQTVKVVDELVKVMGRHKPENIVIEMARENQTTQKGQKNSRERMKRIEEGIKELGSQILKEHPVENTQLQNEKLYLYYLQNGRDMYVDQELDINRLSDYDVDHIVPQSFLKDDSIDNKVLTRSDKARGKSDNVPSEEVVKKMKNYWRQLLNAKLITQRKFDNLTKAERGGLSELDKAGFIKRQLVETRQITKHVAQILDSRMNTKYDENDKLIREVKVITLKSKLVSDFRKDFQFYKVREINNYHHAHDAYLNAVVGTALIKKYPKLESEFVYGDYKVYDVRKMIAKSEQEIGKATAKYFFYSNIMNFFKTEITLANGEIRKRPLIETNGETGEIVWDKGRDFATVRKVLSMPQVNIVKKTEVQTGGFSKESILPKRNSDKLIARKKDWDPKKYGGFDSPTVAYSVLVVAKVEKGKSKKLKSVKELLGITIMERSSFEKNPIDFLEAKGYKEVKKDLIIKLPKYSLFELENGRKRMLASAGELQKGNELALPSKYVNFLYLASHYEKLKGSPEDNEQKQLFVEQHKHYLDEIIEQISEFSKRVILADANLDKVLSAYNKHRDKPIREQAENIIHLFTLTNLGAPAAFKYFDTTIDRKRYTSTKEVLDATLIHQSITGLYETRIDLSQLGGDGGGSSGGSPAPGGTLNIEDEYRLHETSKEPDVPLGSTWLSDFPQAWAETGGMGLAVRQAPLIIPLKATSTPVSIKQYPMSQEARLGIKPHIQRLLDQGILVPCQSPWNTPLLPVKKPGTNDYRPVQDLREVNKRVEDIHPTVPNPYNLLSGLPPSHQWYTVLDLKDAFFCLRLHPTSQPLFAFEWRDPEMGISGQLTWTRLPQGFKNSPTLFNEALHRDLADFRIQHPDLILLQYVDDLLLAATSEQDCQRGTRALLQTLGNLGYRASAKKAQICQKQVKYLGYLLKEGQRWLTEARKETVMGQPTPKTPRQLREFLGTAGFCRLWIPGFAEMAAPLYPLTKPGTLFNWGPDQQKAYQEIKQALLTAPALGLPDLTKPFELFVDEKQGYAKGVLTQKLGPWRRPVAYLSKKLDPVAAGWPPCLRMVAAIAVLTKDAGKLTMGQPLVILAPHAVEALVKQPPDRWLSNARMTHYQAMLLDTDRVQFGPVVALNPATLLPLPEKEAPHDCLEILAETHGTRPDLTDQPIPDADYTWYTDGSSFLQEGQRRAGAAVTTETEVIWARALPAGTSAQRAELIALTQALKMAEGKKLNVYTDSRYAFATAHVHGEIYRRRGWLTSEGREIKNKNEILALLKALFLPKRLSIIHCPGHQKGNSAEARGNRMADQAAREAAMKAVLETSTLLAGKRTADGSEFEKRTADGSEFESPKKKAKVE

SEQ ID NO: 7151 - protein, 2096 aa, synthetic construct
MPAAKRVKLDGGDKKYSIGLDIGTNSVGWAVITDEYKVPSKKFKVLGNTDRHSIKKNLIGALLFDSGETAEATRLKRTARRRYTRRKNRICYLQEIFSNEMAKVDDSFFHRLEESFLVEEDKKHERHPIFGNIVDEVAYHEKYPTIYHLRKKLVDSTDKADLRLIYLALAHMIKFRGHFLIEGDLNPDNSDVDKLFIQLVQTYNQLFEENPINASGVDAKAILSARLSKSRRLENLIAQLPGEKKNGLFGNLIALSLGLTPNFKSNFDLAEDAKLQLSKDTYDDDLDNLLAQIGDQYADLFLAAKNLSDAILLSDILRVNTEITKAPLSASMIKRYDEHHQDLTLLKALVRQQLPEKYKEIFFDQSKNGYAGYIDGGASQEEFYKFIKPILEKMDGTEELLVKLNREDLLRKQRTFDNGSIPHQIHLGELHAILRRQEDFYPFLKDNREKIEKILTFRIPYYVGPLARGNSRFAWMTRKSEETITPWNFEEVVDKGASAQSFIERMTNFDKNLPNEKVLPKHSLLYEYFTVYNELTKVKYVTEGMRKPAFLSGEQKKAIVDLLFKTNRKVTVKQLKEDYFKKIECFDSVEISGVEDRFNASLGTYHDLLKIIKDKDFLDNEENEDILEDIVLTLTLFEDREMIEERLKTYAHLFDDKVMKQLKRRRYTGWGRLSRKLINGIRDKQSGKTILDFLKSDGFANRNFMQLIHDDSLTFKEDIQKAQVSGQGDSLHEHIANLAGSPAIKKGILQTVKVVDELVKVMGRHKPENIVIEMARENQTTQKGQKNSRERMKRIEEGIKELGSQILKEHPVENTQLQNEKLYLYYLQNGRDMYVDQELDINRLSDYDVDHIVPQSFLKDDSIDNKVLTRSDKARGKSDNVPSEEVVKKMKNYWRQLLNAKLITQRKFDNLTKAERGGLSELDKAGFIKRQLVETRQITKHVAQILDSRMNTKYDENDKLIREVKVITLKSKLVSDFRKDFQFYKVREINNYHHAHDAYLNAVVGTALIKKYPKLESEFVYGDYKVYDVRKMIAKSEQEIGKATAKYFFYSNIMNFFKTEITLANGEIRKRPLIETNGETGEIVWDKGRDFATVRKVLSMPQVNIVKKTEVQTGGFSKESILPKRNSDKLIARKKDWDPKKYGGFDSPTVAYSVLVVAKVEKGKSKKLKSVKELLGITIMERSSFEKNPIDFLEAKGYKEVKKDLIIKLPKYSLFELENGRKRMLASAGELQKGNELALPSKYVNFLYLASHYEKLKGSPEDNEQKQLFVEQHKHYLDEIIEQISEFSKRVILADANLDKVLSAYNKHRDKPIREQAENIIHLFTLTNLGAPAAFKYFDTTIDRKRYTSTKEVLDATLIHQSITGLYETRIDLSQLGGDGGGSSPAPGGSGGTAPLEEEYRLFLEAPIQNVTLLEQWKREIPKVWAEINPPGLASTQAPIHVQLLSTALPVRVRQYPITLEAKRSLRETIRKFRAAGILRPVHSPWNTPLLPVRKSGTSEYRMVQDLREVNKRVETIHPTVPNPYTLLSLLPPDRIWYSVLDLKDAFFCIPLAPESQLIFAFEWADAEEGESGQLTWTRLPQGFKNSPTLFNEALNRDLQGFRLDHPSVSLLQYVDDLLIAADTQAACLSATRDLLMTLAELGYRVSGKKAQLCQEEVTYLGFKIHKGSRSLSNSRTQAILQIPVPKTKRQVREFLGTIGYCRLWIPGFAELAQPLYAATRPGNDPLVWGEKEEEAFQSLKLALTQPPALALPSLDKPFQLFVEETSGAAKGVLTQALGPWKRPVAYLSKRLDPVAAGWPRCLRAIAAAALLTREASKLTFGQDIEITSSHNLESLLRSPPDKWLTNARITQYQVLLLDPPRVRFKQTAALNPATLLPETDDTLPIHHCLDTLDSLTSTRPDLTDQPLAQAEATLFTDGSSYIRDGKRYAGAAVVTLDSVIWAEPLPIGTSAQKAELIALTKALEWSKDKSVNIYTDSRYAFATLHVHGMIYRERGWLTAGGKAIKNAPEILALLTAVWLPKRVAVMHCKGHQKDDAPTSTGNRRADEVAREVAIRPLSTQATISAGKRTADGSEFEKRTADGSEFESPKKKAKVE

SEQ ID NO: 7152 - protein, 2096 aa, synthetic construct
MPAAKRVKLDGGDKKYSIGLDIGTNSVGWAVITDEYKVPSKKFKVLGNTDRHSIKKNLIGALLFDSGETAEATRLKRTARRRYTRRKNRICYLQEIFSNEMAKVDDSFFHRLEESFLVEEDKKHERHPIFGNIVDEVAYHEKYPTIYHLRKKLVDSTDKADLRLIYLALAHMIKFRGHFLIEGDLNPDNSDVDKLFIQLVQTYNQLFEENPINASGVDAKAILSARLSKSRRLENLIAQLPGEKKNGLFGNLIALSLGLTPNFKSNFDLAEDAKLQLSKDTYDDDLDNLLAQIGDQYADLFLAAKNLSDAILLSDILRVNTEITKAPLSASMIKRYDEHHQDLTLLKALVRQQLPEKYKEIFFDQSKNGYAGYIDGGASQEEFYKFIKPILEKMDGTEELLVKLNREDLLRKQRTFDNGSIPHQIHLGELHAILRRQEDFYPFLKDNREKIEKILTFRIPYYVGPLARGNSRFAWMTRKSEETITPWNFEEVVDKGASAQSFIERMTNFDKNLPNEKVLPKHSLLYEYFTVYNELTKVKYVTEGMRKPAFLSGEQKKAIVDLLFKTNRKVTVKQLKEDYFKKIECFDSVEISGVEDRFNASLGTYHDLLKIIKDKDFLDNEENEDILEDIVLTLTLFEDREMIEERLKTYAHLFDDKVMKQLKRRRYTGWGRLSRKLINGIRDKQSGKTILDFLKSDGFANRNFMQLIHDDSLTFKEDIQKAQVSGQGDSLHEHIANLAGSPAIKKGILQTVKVVDELVKVMGRHKPENIVIEMARENQTTQKGQKNSRERMKRIEEGIKELGSQILKEHPVENTQLQNEKLYLYYLQNGRDMYVDQELDINRLSDYDVDHIVPQSFLKDDSIDNKVLTRSDKARGKSDNVPSEEVVKKMKNYWRQLLNAKLITQRKFDNLTKAERGGLSELDKAGFIKRQLVETRQITKHVAQILDSRMNTKYDENDKLIREVKVITLKSKLVSDFRKDFQFYKVREINNYHHAHDAYLNAVVGTALIKKYPKLESEFVYGDYKVYDVRKMIAKSEQEIGKATAKYFFYSNIMNFFKTEITLANGEIRKRPLIETNGETGEIVWDKGRDFATVRKVLSMPQVNIVKKTEVQTGGFSKESILPKRNSDKLIARKKDWDPKKYGGFDSPTVAYSVLVVAKVEKGKSKKLKSVKELLGITIMERSSFEKNPIDFLEAKGYKEVKKDLIIKLPKYSLFELENGRKRMLASAGELQKGNELALPSKYVNFLYLASHYEKLKGSPEDNEQKQLFVEQHKHYLDEIIEQISEFSKRVILADANLDKVLSAYNKHRDKPIREQAENIIHLFTLTNLGAPAAFKYFDTTIDRKRYTSTKEVLDATLIHQSITGLYETRIDLSQLGGDGGGSSPAPGGSGGTAPLEEEYRLFLEAPIQNVTLLEQWKREIPKVWAEINPPGLASTQAPIHVQLLSTALPVRVRQYPITLEAKRSLRETIRKFRAAGILRPVHSPWNTPLLPVRKSGTSEYRMVQDLREVNKRVETIHPTVPNPYTLLSLLPPDRIWYSVLDLKDAFFCIPLAPESQLIFAFEWADAEEGESGQLTWTRLPQGFKNSPTLFNEALNRDLQGFRLDHPSVSLLQYVDDLLIAADTQAACLSATRDLLMTLAELGYRVSGKKAQLCQEEVTYLGFKIHKGSRSLSNSRTQAILQIPVPKTKRQVREFLGKIGYCRLFIPGFAELAQPLYAATRPGNDPLVWGEKEEEAFQSLKLALTQPPALALPSLDKPFQLFVEETSGAAKGVLTQALGPWKRPVAYLSKRLDPVAAGWPRCLRAIAAAALLTREASKLTFGQDIEITSSHNLESLLRSPPDKWLTNARITQYQVLLLDPPRVRFKQTAALNPATLLPETDDTLPIHHCLDTLDSLTSTRPDLTDQPLAQAEATLFTDGSSYIRDGKRYAGAAVVTLDSVIWAEPLPIGTSAQKAELIALTKALEWSKDKSVNIYTDSRYAFATLHVHGMIYRERGWLTAGGKAIKNAPEILALLTAVWLPKRVAVMHCKGHQKDDAPTSTGNRRADEVAREVAIRPLSTQATISAGKRTADGSEFEKRTADGSEFESPKKKAKVE

SEQ ID NO: 7153 - protein, 2093 aa, synthetic construct
MPAAKRVKLDGGDKKYSIGLDIGTNSVGWAVITDEYKVPSKKFKVLGNTDRHSIKKNLIGALLFDSGETAEATRLKRTARRRYTRRKNRICYLQEIFSNEMAKVDDSFFHRLEESFLVEEDKKHERHPIFGNIVDEVAYHEKYPTIYHLRKKLVDSTDKADLRLIYLALAHMIKFRGHFLIEGDLNPDNSDVDKLFIQLVQTYNQLFEENPINASGVDAKAILSARLSKSRRLENLIAQLPGEKKNGLFGNLIALSLGLTPNFKSNFDLAEDAKLQLSKDTYDDDLDNLLAQIGDQYADLFLAAKNLSDAILLSDILRVNTEITKAPLSASMIKRYDEHHQDLTLLKALVRQQLPEKYKEIFFDQSKNGYAGYIDGGASQEEFYKFIKPILEKMDGTEELLVKLNREDLLRKQRTFDNGSIPHQIHLGELHAILRRQEDFYPFLKDNREKIEKILTFRIPYYVGPLARGNSRFAWMTRKSEETITPWNFEEVVDKGASAQSFIERMTNFDKNLPNEKVLPKHSLLYEYFTVYNELTKVKYVTEGMRKPAFLSGEQKKAIVDLLFKTNRKVTVKQLKEDYFKKIECFDSVEISGVEDRFNASLGTYHDLLKIIKDKDFLDNEENEDILEDIVLTLTLFEDREMIEERLKTYAHLFDDKVMKQLKRRRYTGWGRLSRKLINGIRDKQSGKTILDFLKSDGFANRNFMQLIHDDSLTFKEDIQKAQVSGQGDSLHEHIANLAGSPAIKKGILQTVKVVDELVKVMGRHKPENIVIEMARENQTTQKGQKNSRERMKRIEEGIKELGSQILKEHPVENTQLQNEKLYLYYLQNGRDMYVDQELDINRLSDYDVDHIVPQSFLKDDSIDNKVLTRSDKARGKSDNVPSEEVVKKMKNYWRQLLNAKLITQRKFDNLTKAERGGLSELDKAGFIKRQLVETRQITKHVAQILDSRMNTKYDENDKLIREVKVITLKSKLVSDFRKDFQFYKVREINNYHHAHDAYLNAVVGTALIKKYPKLESEFVYGDYKVYDVRKMIAKSEQEIGKATAKYFFYSNIMNFFKTEITLANGEIRKRPLIETNGETGEIVWDKGRDFATVRKVLSMPQVNIVKKTEVQTGGFSKESILPKRNSDKLIARKKDWDPKKYGGFDSPTVAYSVLVVAKVEKGKSKKLKSVKELLGITIMERSSFEKNPIDFLEAKGYKEVKKDLIIKLPKYSLFELENGRKRMLASAGELQKGNELALPSKYVNFLYLASHYEKLKGSPEDNEQKQLFVEQHKHYLDEIIEQISEFSKRVILADANLDKVLSAYNKHRDKPIREQAENIIHLFTLTNLGAPAAFKYFDTTIDRKRYTSTKEVLDATLIHQSITGLYETRIDLSQLGGDGGGSSPAPGGSGGTLQLEEEYRLFEPESTQKQEMDIWLKNFPQAWAETGGMGTAHCQAPVLIQLKATATPISIRQYPMPHEAYQGIKPHIRRMLDQGILKPCQSPWNTPLLPVKKPGTEDYRPVQDLREVNKRVEDIHPTVPNPYNLLSTLPPSHPWYTVLDLKDAFFCLRLHSESQLLFAFEWRDPEIGLSGQLTWTRLPQGFKNSPTLFNEALHSDLADFRVRYPALVLLQYVDDLLLAAATRTECLEGTKALLETLGNKGYRASAKKAQICLQEVTYLGYSLKDGQRWLTKARKEAILSIPVPKNSRQVREFLGKAGYCRLFIPGFAELAAPLYPLTRPGTLFQWGTEQQLAFEDIKKALLSSPALGLPDITKPFELFIDENSGFAKGVLVQKLGPWKRPVAYLSKKLDTVASGWPPCLRMVAAIAILVKDAGKLTLGQPLTILTSHPVEALVRQPPNKWLSNARMTHYQAMLLDAERVHFGPTVSLNPATLLPLPSGGNHHDCLQILAETHGTRPDLTDQPLPDADLTWYTDGSSFIRNGEREAGAAVTTESEVIWAAPLPPGTSAQRAELIALTQALKMAEGKKLTVYTDSRYAFATTHVHGEIYRRRGWLTSEGKEIKNKNEILALLEALFLPKRLSIIHCPGHQKGDSPQAKGNRLADDTAKKAATETHSSLTVLPAGKRTADGSEFEKRTADGSEFESPKKKAKVE

SEQ ID NO: 7154 - protein, 2125 aa, synthetic construct; identical to SEQ ID NO: 4526

SEQ ID NO: 7155 - protein, 2216 aa, synthetic construct
MPAAKRVKLDGGDKKYSIGLDIGTNSVGWAVITDEYKVPSKKFKVLGNTDRHSIKKNLIGALLFDSGETAEATRLKRTARRRYTRRKNRICYLQEIFSNEMAKVDDSFFHRLEESFLVEEDKKHERHPIFGNIVDEVAYHEKYPTIYHLRKKLVDSTDKADLRLIYLALAHMIKFRGHFLIEGDLNPDNSDVDKLFIQLVQTYNQLFEENPINASGVDAKAILSARLSKSRRLENLIAQLPGEKKNGLFGNLIALSLGLTPNFKSNFDLAEDAKLQLSKDTYDDDLDNLLAQIGDQYADLFLAAKNLSDAILLSDILRVNTEITKAPLSASMIKRYDEHHQDLTLLKALVRQQLPEKYKEIFFDQSKNGYAGYIDGGASQEEFYKFIKPILEKMDGTEELLVKLNREDLLRKQRTFDNGSIPHQIHLGELHAILRRQEDFYPFLKDNREKIEKILTFRIPYYVGPLARGNSRFAWMTRKSEETITPWNFEEVVDKGASAQSFIERMTNFDKNLPNEKVLPKHSLLYEYFTVYNELTKVKYVTEGMRKPAFLSGEQKKAIVDLLFKTNRKVTVKQLKEDYFKKIECFDSVEISGVEDRFNASLGTYHDLLKIIKDKDFLDNEENEDILEDIVLTLTLFEDREMIEERLKTYAHLFDDKVMKQLKRRRYTGWGRLSRKLINGIRDKQSGKTILDFLKSDGFANRNFMQLIHDDSLTFKEDIQKAQVSGQGDSLHEHIANLAGSPAIKKGILQTVKVVDELVKVMGRHKPENIVIEMARENQTTQKGQKNSRERMKRIEEGIKELGSQILKEHPVENTQLQNEKLYLYYLQNGRDMYVDQELDINRLSDYDVDHIVPQSFLKDDSIDNKVLTRSDKARGKSDNVPSEEVVKKMKNYWRQLLNAKLITQRKFDNLTKAERGGLSELDKAGFIKRQLVETRQITKHVAQILDSRMNTKYDENDKLIREVKVITLKSKLVSDFRKDFQFYKVREINNYHHAHDAYLNAVVGTALIKKYPKLESEFVYGDYKVYDVRKMIAKSEQEIGKATAKYFFYSNIMNFFKTEITLANGEIRKRPLIETNGETGEIVWDKGRDFATVRKVLSMPQVNIVKKTEVQTGGFSKESILPKRNSDKLIARKKDWDPKKYGGFDSPTVAYSVLVVAKVEKGKSKKLKSVKELLGITIMERSSFEKNPIDFLEAKGYKEVKKDLIIKLPKYSLFELENGRKRMLASAGELQKGNELALPSKYVNFLYLASHYEKLKGSPEDNEQKQLFVEQHKHYLDEIIEQISEFSKRVILADANLDKVLSAYNKHRDKPIREQAENIIHLFTLTNLGAPAAFKYFDTTIDRKRYTSTKEVLDATLIHQSITGLYETRIDLSQLGGDGGGSSPAPGGSGGTLGDQGSRGSDPLPEPRVTLTVEGIPTEFLVNTGAEHSVLTKPMGKMGSKRTVVAGATGSKVYPWTTKRLLKIGQKQVTHSFLVIPECPAPLLGRDLLTKLKAQIQFSTEGPQVTWEDRPAMCLVLNLEEEYRLHEKPVPPSIDPSWLQLFPMVWAEKAGMGLANQVPPVVVELKSDASPVAVRQYPMSKEAREGIRPHIQRFLDLGILVPCQSPWNTPLLPVKKPGTNDYRPVQDLREVNKRVQDIHPTVPNPYNLLSSLPPSHTWYSVLDLKDAFFCLKLHPNSQPLFAFEWRDPEKGNTGQLTWTRLPQGFKNSPTLFNEALHRDLASFRALNPQVVMLQYVDDLLVAAPTYRDCKEGTRRLLQELSKLGYRVSAKKAQLCREEVTYLGYLLKGGKRWLTPARKATVMKIPTPTTPRQVREFLGTAGFCRLWIPGFASLAAPLYPLTRPKVPFTWTEAHQEAFGRIKEALLSAPALALPDLTKPFALYVDEKEGVARGVLTQTLGPWRRPVAYLSKKLDPVASGWPTCLKAIAAVALLLKDADKLTLGQNVLVIAPHNLESIVRQPPDRWMTNARMTHYQSLLLNERVSFAPPAILNPATLLPVESDDTPIHICSEILAEETGTRPDLRDQPLPGVPAWYTDGSSFIMDGRRQAGAAIVDNKRTVWASNLPEGTSAQKAELIALTQALRLAEGKSINIYTDSRYAFATAHVHGAIYKQRGWLTSAGKDIKNKEEILALLEAIHLPKRVAIIHCPGHQRGTDPVATGNRKADEAAKQAAQSTRILTETTKNAGKRTADGSEFEKRTADGSEFESPKKKAKVE

SEQ ID NO: 7156 - protein, 2094 aa, synthetic construct
MPAAKRVKLDGGDKKYSIGLDIGTNSVGWAVITDEYKVPSKKFKVLGNTDRHSIKKNLIGALLFDSGETAEATRLKRTARRRYTRRKNRICYLQEIFSNEMAKVDDSFFHRLEESFLVEEDKKHERHPIFGNIVDEVAYHEKYPTIYHLRKKLVDSTDKADLRLIYLALAHMIKFRGHFLIEGDLNPDNSDVDKLFIQLVQTYNQLFEENPINASGVDAKAILSARLSKSRRLENLIAQLPGEKKNGLFGNLIALSLGLTPNFKSNFDLAEDAKLQLSKDTYDDDLDNLLAQIGDQYADLFLAAKNLSDAILLSDILRVNTEITKAPLSASMIKRYDEHHQDLTLLKALVRQQLPEKYKEIFFDQSKNGYAGYIDGGASQEEFYKFIKPILEKMDGTEELLVKLNREDLLRKQRTFDNGSIPHQIHLGELHAILRRQEDFYPFLKDNREKIEKILTFRIPYYVGPLARGNSRFAWMTRKSEETITPWNFEEVVDKGASAQSFIERMTNFDKNLPNEKVLPKHSLLYEYFTVYNELTKVKYVTEGMRKPAFLSGEQKKAIVDLLFKTNRKVTVKQLKEDYFKKIECFDSVEISGVEDRFNASLGTYHDLLKIIKDKDFLDNEENEDILEDIVLTLTLFEDREMIEERLKTYAHLFDDKVMKQLKRRRYTGWGRLSRKLINGIRDKQSGKTILDFLKSDGFANRNFMQLIHDDSLTFKEDIQKAQVSGQGDSLHEHIANLAGSPAIKKGILQTVKVVDELVKVMGRHKPENIVIEMARENQTTQKGQKNSRERMKRIEEGIKELGSQILKEHPVENTQLQNEKLYLYYLQNGRDMYVDQELDINRLSDYDVDHIVPQSFLKDDSIDNKVLTRSDKARGKSDNVPSEEVVKKMKNYWRQLLNAKLITQRKFDNLTKAERGGLSELDKAGFIKRQLVETRQITKHVAQILDSRMNTKYDENDKLIREVKVITLKSKLVSDFRKDFQFYKVREINNYHHAHDAYLNAVVGTALIKKYPKLESEFVYGDYKVYDVRKMIAKSEQEIGKATAKYFFYSNIMNFFKTEITLANGEIRKRPLIETNGETGEIVWDKGRDFATVRKVLSMPQVNIVKKTEVQTGGFSKESILPKRNSDKLIARKKDWDPKKYGGFDSPTVAYSVLVVAKVEKGKSKKLKSVKELLGITIMERSSFEKNPIDFLEAKGYKEVKKDLIIKLPKYSLFELENGRKRMLASAGELQKGNELALPSKYVNFLYLASHYEKLKGSPEDNEQKQLFVEQHKHYLDEIIEQISEFSKRVILADANLDKVLSAYNKHRDKPIREQAENIIHLFTLTNLGAPAAFKYFDTTIDRKRYTSTKEVLDATLIHQSITGLYETRIDLSQLGGDGGGSSPAPGGSGGTLNLEDEYRLYETSAEPEVSPGSTWLSDFPQAWAETGGMGLAVRQAPLIIPLKATSTPVSIKQYPMSQEAKLGIKPHIQRLLDQGILVPCQSPWNTPLLPVKKPGTNDYRPVQDLREVNKRVEDIHPTVPNPYNLLSGLPPSHRWYTVLDLKDAFFCLRLHPTSQPLFAFEWRDPGMGISGQLTWTRLPQGFKNSPTLFNEALHRDLADFRIQHPDLILLQYVDDILLAATSELDCQQGTRALLLTLGNLGYRASAKKAQLCQKQVKYLGYLLKEGQRWLTEARKETVMGQPTPKTPRQLREFLGKAGFCRLFIPGFAEMAAPLYPLTKPGTLFNWGPDQQKAYQEIKQALLTAPALGLPDLTKPFELFVDEKQGYAKGVLTQKLGPWRRPVAYLSKKLDPVAAGWPPCLRMVAAIAVLRKDAGKLTMGQPLVILAPHAVEALVKQPPDRWLSNARMTHYQAMLLDTDRVQFGPVVALNPATLLPLPEEGAPHDCLEILAETHGTRPDLTDQPIPDADHTWYTDGSSFLQEGQRKAGAAVTTETEVIWARALPAGTSAQRAELIALTQALKMAEGKRLNVYTDSRYAFATAHIHGEIYRRRGWLTSEGREIKNKSEILALLKALFLPKRLSIIHCLGHQKGDSAEARGNRLADQAAREAAIKTPPDTSTLLAGKRTADGSEFEKRTADGSEFESPKKKAKVE

SEQ ID NO: 7157 - protein, 2094 aa, synthetic construct
MPAAKRVKLDGGDKKYSIGLDIGTNSVGWAVITDEYKVPSKKFKVLGNTDRHSIKKNLIGALLFDSGETAEATRLKRTARRRYTRRKNRICYLQEIFSNEMAKVDDSFFHRLEESFLVEEDKKHERHPIFGNIVDEVAYHEKYPTIYHLRKKLVDSTDKADLRLIYLALAHMIKFRGHFLIEGDLNPDNSDVDKLFIQLVQTYNQLFEENPINASGVDAKAILSARLSKSRRLENLIAQLPGEKKNGLFGNLIALSLGLTPNFKSNFDLAEDAKLQLSKDTYDDDLDNLLAQIGDQYADLFLAAKNLSDAILLSDILRVNTEITKAPLSASMIKRYDEHHQDLTLLKALVRQQLPEKYKEIFFDQSKNGYAGYIDGGASQEEFYKFIKPILEKMDGTEELLVKLNREDLLRKQRTFDNGSIPHQIHLGELHAILRRQEDFYPFLKDNREKIEKILTFRIPYYVGPLARGNSRFAWMTRKSEETITPWNFEEVVDKGASAQSFIERMTNFDKNLPNEKVLPKHSLLYEYFTVYNELTKVKYVTEGMRKPAFLSGEQKKAIVDLLFKTNRKVTVKQLKEDYFKKIECFDSVEISGVEDRFNASLGTYHDLLKIIKDKDFLDNEENEDILEDIVLTLTLFEDREMIEERLKTYAHLFDDKVMKQLKRRRYTGWGRLSRKLINGIRDKQSGKTILDFLKSDGFANRNFMQLIHDDSLTFKEDIQKAQVSGQGDSLHEHIANLAGSPAIKKGILQTVKVVDELVKVMGRHKPENIVIEMARENQTTQKGQKNSRERMKRIEEGIKELGSQILKEHPVENTQLQNEKLYLYYLQNGRDMYVDQELDINRLSDYDVDHIVPQSFLKDDSIDNKVLTRSDKARGKSDNVPSEEVVKKMKNYWRQLLNAKLITQRKFDNLTKAERGGLSELDKAGFIKRQLVETRQITKHVAQILDSRMNTKYDENDKLIREVKVITLKSKLVSDFRKDFQFYKVREINNYHHAHDAYLNAVVGTALIKKYPKLESEFVYGDYKVYDVRKMIAKSEQEIGKATAKYFFYSNIMNFFKTEITLANGEIRKRPLIETNGETGEIVWDKGRDFATVRKVLSMPQVNIVKKTEVQTGGFSKESILPKRNSDKLIARKKDWDPKKYGGFDSPTVAYSVLVVAKVEKGKSKKLKSVKELLGITIMERSSFEKNPIDFLEAKGYKEVKKDLIIKLPKYSLFELENGRKRMLASAGELQKGNELALPSKYVNFLYLASHYEKLKGSPEDNEQKQLFVEQHKHYLDEIIEQISEFSKRVILADANLDKVLSAYNKHRDKPIREQAENIIHLFTLTNLGAPAAFKYFDTTIDRKRYTSTKEVLDATLIHQSITGLYETRIDLSQLGGDGGGSSPAPGGSGGTLNIEDEHRLHETSKEPDVSLGSTWLSDFPQAWAETGGMGLAVRQAPLIIPLKATSTPVSIKQYPMSQEARLGIKPHIQRLLDQGILVPCQSPWNTPLLPVKKPGTNDYRPVQDLREVNKRVEDIHPTVPNPYNLLSGLPPSHQWYTVLDLKDAFFCLRLHPTSQPLFAFEWRDPEMGISGQLTWTRLPQGFKNSPTLFNEALHRDLADFRIQHPDLILLQYVDDLLLAATSELDCQQGTRALLQTLGNLGYRASAKKAQICQKQVKYLGYLLKEGQRWLTEARKETVMGQPTPKTPRQLREFLGTAGFCRLWIPGFAEMAAPLYPLTKPGTLFNWGPDQQKAYQEIKQALLTAPALGLPDLTKPFELFVDEKQGYAKGVLTQKLGPWRRPVAYLSKKLDPVAAGWPPCLRMVAAIAVLTKDAGKLTMGQPLVILAPHAVEALVKQPPDRWLSNARMTHYQALLLDTDRVQFGPVVALNPATLLPLPEEGLQHNCLDILAEAHGTRPDLTDQPLPDADHTWYTDGSSLLQEGQRKAGAAVTTETEVIWAKALPAGTSAQRAELIALTQALKMAEGKKLNVYTDSRYAFATAHIHGEIYRRRGWLTSEGKEIKNKDEILALLKALFLPKRLSIIHCPGHQKGHSAEARGNRMADQAARKAAITETPDTSTLLAGKRTADGSEFEKRTADGSEFESPKKKAKVE

SEQ ID NO: 7158 - protein, 2094 aa, synthetic construct
MPAAKRVKLDGGDKKYSIGLDIGTNSVGWAVITDEYKVPSKKFKVLGNTDRHSIKKNLIGALLFDSGETAEATRLKRTARRRYTRRKNRICYLQEIFSNEMAKVDDSFFHRLEESFLVEEDKKHERHPIFGNIVDEVAYHEKYPTIYHLRKKLVDSTDKADLRLIYLALAHMIKFRGHFLIEGDLNPDNSDVDKLFIQLVQTYNQLFEENPINASGVDAKAILSARLSKSRRLENLIAQLPGEKKNGLFGNLIALSLGLTPNFKSNFDLAEDAKLQLSKDTYDDDLDNLLAQIGDQYADLFLAAKNLSDAILLSDILRVNTEITKAPLSASMIKRYDEHHQDLTLLKALVRQQLPEKYKEIFFDQSKNGYAGYIDGGASQEEFYKFIKPILEKMDGTEELLVKLNREDLLRKQRTFDNGSIPHQIHLGELHAILRRQEDFYPFLKDNREKIEKILTFRIPYYVGPLARGNSRFAWMTRKSEETITPWNFEEVVDKGASAQSFIERMTNFDKNLPNEKVLPKHSLLYEYFTVYNELTKVKYVTEGMRKPAFLSGEQKKAIVDLLFKTNRKVTVKQLKEDYFKKIECFDSVEISGVEDRFNASLGTYHDLLKIIKDKDFLDNEENEDILEDIVLTLTLFEDREMIEERLKTYAHLFDDKVMKQLKRRRYTGWGRLSRKLINGIRDKQSGKTILDFLKSDGFANRNFMQLIHDDSLTFKEDIQKAQVSGQGDSLHEHIANLAGSPAIKKGILQTVKVVDELVKVMGRHKPENIVIEMARENQTTQKGQKNSRERMKRIEEGIKELGSQILKEHPVENTQLQNEKLYLYYLQNGRDMYVDQELDINRLSDYDVDHIVPQSFLKDDSIDNKVLTRSDKARGKSDNVPSEEVVKKMKNYWRQLLNAKLITQRKFDNLTKAERGGLSELDKAGFIKRQLVETRQITKHVAQILDSRMNTKYDENDKLIREVKVITLKSKLVSDFRKDFQFYKVREINNYHHAHDAYLNAVVGTALIKKYPKLESEFVYGDYKVYDVRKMIAKSEQEIGKATAKYFFYSNIMNFFKTEITLANGEIRKRPLIETNGETGEIVWDKGRDFATVRKVLSMPQVNIVKKTEVQTGGFSKESILPKRNSDKLIARKKDWDPKKYGGFDSPTVAYSVLVVAKVEKGKSKKLKSVKELLGITIMERSSFEKNPIDFLEAKGYKEVKKDLIIKLPKYSLFELENGRKRMLASAGELQKGNELALPSKYVNFLYLASHYEKLKGSPEDNEQKQLFVEQHKHYLDEIIEQISEFSKRVILADANLDKVLSAYNKHRDKPIREQAENIIHLFTLTNLGAPAAFKYFDTTIDRKRYTSTKEVLDATLIHQSITGLYETRIDLSQLGGDGGGSSPAPGGSGGTLNIEDEHRLHETSKEPDVSLGSTWLSDFPQAWAETGGMGLAVRQAPLIIPLKATSTPVSIKQYPMSQEARLGIKPHIQRLLDQGILVPCQSPWNTPLLPVKKPGTNDYRPVQDLREVNKRVEDIHPTVPNPYNLLSGLPPSHQWYTVLDLKDAFFCLRLHPTSQPLFAFEWRDPEMGISGQLTWTRLPQGFKNSPTLFNEALHRDLADFRIQHPDLILLQYVDDLLLAATSELDCQQGTRALLQTLGNLGYRASAKKAQICQKQVKYLGYLLKEGQRWLTEARKETVMGQPTPKTPRQLREFLGKAGFCRLFIPGFAEMAAPLYPLTKPGTLFNWGPDQQKAYQEIKQALLTAPALGLPDLTKPFELFVDEKQGYAKGVLTQKLGPWRRPVAYLSKKLDPVAAGWPPCLRMVAAIAVLTKDAGKLTMGQPLVILAPHAVEALVKQPPDRWLSNARMTHYQALLLDTDRVQFGPVVALNPATLLPLPEEGLQHNCLDILAEAHGTRPDLTDQPLPDADHTWYTDGSSLLQEGQRKAGAAVTTETEVIWAKALPAGTSAQRAELIALTQALKMAEGKKLNVYTDSRYAFATAHIHGEIYRRRGWLTSEGKEIKNKDEILALLKALFLPKRLSIIHCPGHQKGHSAEARGNRMADQAARKAAITETPDTSTLLAGKRTADGSEFEKRTADGSEFESPKKKAKVE

SEQ ID NO: 7159 - protein, 2094 aa, synthetic construct; identical to SEQ ID NO: 7157

SEQ ID NO: 7160 - protein, 2094 aa, synthetic construct; identical to SEQ ID NO: 7158

SEQ ID NO: 7161 - protein, 2085 aa, synthetic construct
MPAAKRVKLDGGDKKYSIGLDIGTNSVGWAVITDEYKVPSKKFKVLGNTDRHSIKKNLIGALLFDSGETAEATRLKRTARRRYTRRKNRICYLQEIFSNEMAKVDDSFFHRLEESFLVEEDKKHERHPIFGNIVDEVAYHEKYPTIYHLRKKLVDSTDKADLRLIYLALAHMIKFRGHFLIEGDLNPDNSDVDKLFIQLVQTYNQLFEENPINASGVDAKAILSARLSKSRRLENLIAQLPGEKKNGLFGNLIALSLGLTPNFKSNFDLAEDAKLQLSKDTYDDDLDNLLAQIGDQYADLFLAAKNLSDAILLSDILRVNTEITKAPLSASMIKRYDEHHQDLTLLKALVRQQLPEKYKEIFFDQSKNGYAGYIDGGASQEEFYKFIKPILEKMDGTEELLVKLNREDLLRKQRTFDNGSIPHQIHLGELHAILRRQEDFYPFLKDNREKIEKILTFRIPYYVGPLARGNSRFAWMTRKSEETITPWNFEEVVDKGASAQSFIERMTNFDKNLPNEKVLPKHSLLYEYFTVYNELTKVKYVTEGMRKPAFLSGEQKKAIVDLLFKTNRKVTVKQLKEDYFKKIECFDSVEISGVEDRFNASLGTYHDLLKIIKDKDFLDNEENEDILEDIVLTLTLFEDREMIEERLKTYAHLFDDKVMKQLKRRRYTGWGRLSRKLINGIRDKQSGKTILDFLKSDGFANRNFMQLIHDDSLTFKEDIQKAQVSGQGDSLHEHIANLAGSPAIKKGILQTVKVVDELVKVMGRHKPENIVIEMARENQTTQKGQKNSRERMKRIEEGIKELGSQILKEHPVENTQLQNEKLYLYYLQNGRDMYVDQELDINRLSDYDVDHIVPQSFLKDDSIDNKVLTRSDKARGKSDNVPSEEVVKKMKNYWRQLLNAKLITQRKFDNLTKAERGGLSELDKAGFIKRQLVETRQITKHVAQILDSRMNTKYDENDKLIREVKVITLKSKLVSDFRKDFQFYKVREINNYHHAHDAYLNAVVGTALIKKYPKLESEFVYGDYKVYDVRKMIAKSEQEIGKATAKYFFYSNIMNFFKTEITLANGEIRKRPLIETNGETGEIVWDKGRDFATVRKVLSMPQVNIVKKTEVQTGGFSKESILPKRNSDKLIARKKDWDPKKYGGFDSPTVAYSVLVVAKVEKGKSKKLKSVKELLGITIMERSSFEKNPIDFLEAKGYKEVKKDLIIKLPKYSLFELENGRKRMLASAGELQKGNELALPSKYVNFLYLASHYEKLKGSPEDNEQKQLFVEQHKHYLDEIIEQISEFSKRVILADANLDKVLSAYNKHRDKPIREQAENIIHLFTLTNLGAPAAFKYFDTTIDRKRYTSTKEVLDATLIHQSITGLYETRIDLSQLGGDGGGSSPAPGGSGGIPWLMKKPLQLTTLVPLQEYEERLLKQTMLTGSYKEKLQSLFLKYDALWQHWENQVGHRRIKPHHIATGTVNPRPQKQYPINPKAKASIQTVINDLLKQGVLIQQNSIMNTPVYPVPKPDGKWRMVLDYREVNKTIPLIAAQNQHSAGILSSIFRGKYKTTLDLSNGFWAHSITPESYWLTAFTWLGQQYCWTRLPQGFLNSPALFNADVVDLLKEVPNVQVYVDDIYISHDDPREHLEQLEKVFSLLLNAGYVVSLKKSEIAQHEVEFLGFNITKEGRGLTETFKQKLLNITPPRDLKQLQSILGKLNFARNFIPNFSELVKPLYNIIATAPGKYITWTTDNSQQLQNIISMLNSAENLEERNPEVRLIMKVNTSPSAGYIRFYNEFAKRPIMYLNYVYTKAEVKFTNTEKLLTTIHKGLIKALDLGMGQEILVYSPIVSMTKIQKTPLPERKALPIRWITWMSYLEDPRIQFHYDKTLPELQQVPTVTDDIIAKIKHPSEFSMVFYTDGSAIKHPNVNKSHNAGMGIAQVQFKPEFTVINTWSIPLGDHTAQLAEVAAVEFACKKALKIDGPVLIVTDSFYVAESVNKELPYWQSNGFFNNKKKPLKHVSKWKSIADCIQLKPDIIIIHEKGHQPTASTFHTEGNNLADKLATQGSYVVNAGKRTADGSEFEKRTADGSEFESPKKKAKVE

SEQ ID NO: 7162 - protein, 2092 aa, synthetic construct
MPAAKRVKLDGGDKKYSIGLDIGTNSVGWAVITDEYKVPSKKFKVLGNTDRHSIKKNLIGALLFDSGETAEATRLKRTARRRYTRRKNRICYLQEIFSNEMAKVDDSFFHRLEESFLVEEDKKHERHPIFGNIVDEVAYHEKYPTIYHLRKKLVDSTDKADLRLIYLALAHMIKFRGHFLIEGDLNPDNSDVDKLFIQLVQTYNQLFEENPINASGVDAKAILSARLSKSRRLENLIAQLPGEKKNGLFGNLIALSLGLTPNFKSNFDLAEDAKLQLSKDTYDDDLDNLLAQIGDQYADLFLAAKNLSDAILLSDILRVNTEITKAPLSASMIKRYDEHHQDLTLLKALVRQQLPEKYKEIFFDQSKNGYAGYIDGGASQEEFYKFIKPILEKMDGTEELLVKLNREDLLRKQRTFDNGSIPHQIHLGELHAILRRQEDFYPFLKDNREKIEKILTFRIPYYVGPLARGNSRFAWMTRKSEETITPWNFEEVVDKGASAQSFIERMTNFDKNLPNEKVLPKHSLLYEYFTVYNELTKVKYVTEGMRKPAFLSGEQKKAIVDLLFKTNRKVTVKQLKEDYFKKIECFDSVEISGVEDRFNASLGTYHDLLKIIKDKDFLDNEENEDILEDIVLTLTLFEDREMIEERLKTYAHLFDDKVMKQLKRRRYTGWGRLSRKLINGIRDKQSGKTILDFLKSDGFANRNFMQLIHDDSLTFKEDIQKAQVSGQGDSLHEHIANLAGSPAIKKGILQTVKVVDELVKVMGRHKPENIVIEMARENQTTQKGQKNSRERMKRIEEGIKELGSQILKEHPVENTQLQNEKLYLYYLQNGRDMYVDQELDINRLSDYDVDHIVPQSFLKDDSIDNKVLTRSDKARGKSDNVPSEEVVKKMKNYWRQLLNAKLITQRKFDNLTKAERGGLSELDKAGFIKRQLVETRQITKHVAQILDSRMNTKYDENDKLIREVKVITLKSKLVSDFRKDFQFYKVREINNYHHAHDAYLNAVVGTALIKKYPKLESEFVYGDYKVYDVRKMIAKSEQEIGKATAKYFFYSNIMNFFKTEITLANGEIRKRPLIETNGETGEIVWDKGRDFATVRKVLSMPQVNIVKKTEVQTGGFSKESILPKRNSDKLIARKKDWDPKKYGGFDSPTVAYSVLVVAKVEKGKSKKLKSVKELLGITIMERSSFEKNPIDFLEAKGYKEVKKDLIIKLPKYSLFELENGRKRMLASAGELQKGNELALPSKYVNFLYLASHYEKLKGSPEDNEQKQLFVEQHKHYLDEIIEQISEFSKRVILADANLDKVLSAYNKHRDKPIREQAENIIHLFTLTNLGAPAAFKYFDTTIDRKRYTSTKEVLDATLIHQSITGLYETRIDLSQLGGDGGGSSPAPGGSGGVLNLEEEYRLHEKPVPSSIDPSWLQLFPTVWAERAGMGLANQVPPVVVELRSGASPVAVRQYPMSKEAREGIRPHIQRFLDLGVLVPCQSPWNTPLLPVKKPGTNDYRPVQDLREINKRVQDIHPTVPNPYNLLSSLPPSHTWYSVLDLKDAFFCLKLHPNSQPLFAFEWRDPEKGNTGQLTWTRLPQGFKNSPTLFNEALHRDLAPFRALNPQVVLLQYVDDLLVAAPTYRDCKEGTQKLLQELSKLGYRVSAKKAQLCQKEVTYLGYLLKEGKRWLTPARKATVMKIPPPTTPRQVREFLGKAGFCRLFIPGFASLAAPLYPLTKPSIPFIWTEEHQKAFDRIKEALLSAPALALPDLTKPFTLYVDERAGVARGVLTQTLGPWRRPVAYLSKKLDPVASGWPTCLKAVAAVALLLKDADKLTLGQNVTVIASHSLESIVRQPPDRWMTNARMTHYQSLLLNERVSFAPPAVLNPATLLPVESEATPVHRCSEILAEETGTRRDLKDQPLPGVPAWYTDGSSFIAEGKRRAGAAIVDGKRTVWASSLPEGTSAQKAELVALTQALRLAEGKDINIYTDSRYAFATAHIHGAIYKQRGWLTSAGKDIKNKEEILALLEAIHLPKRVAIIHCPGHQKGNDPVATGNRRADEAAKQAALSTRVLAETTKPAGKRTADGSEFEKRTADGSEFESPKKKAKVE

SEQ ID NO: 7163 - protein, 2096 aa, synthetic construct
MPAAKRVKLDGGDKKYSIGLDIGTNSVGWAVITDEYKVPSKKFKVLGNTDRHSIKKNLIGALLFDSGETAEATRLKRTARRRYTRRKNRICYLQEIFSNEMAKVDDSFFHRLEESFLVEEDKKHERHPIFGNIVDEVAYHEKYPTIYHLRKKLVDSTDKADLRLIYLALAHMIKFRGHFLIEGDLNPDNSDVDKLFIQLVQTYNQLFEENPINASGVDAKAILSARLSKSRRLENLIAQLPGEKKNGLFGNLIALSLGLTPNFKSNFDLAEDAKLQLSKDTYDDDLDNLLAQIGDQYADLFLAAKNLSDAILLSDILRVNTEITKAPLSASMIKRYDEHHQDLTLLKALVRQQLPEKYKEIFFDQSKNGYAGYIDGGASQEEFYKFIKPILEKMDGTEELLVKLNREDLLRKQRTFDNGSIPHQIHLGELHAILRRQEDFYPFLKDNREKIEKILTFRIPYYVGPLARGNSRFAWMTRKSEETITPWNFEEVVDKGASAQSFIERMTNFDKNLPNEKVLPKHSLLYEYFTVYNELTKVKYVTEGMRKPAFLSGEQKKAIVDLLFKTNRKVTVKQLKEDYFKKIECFDSVEISGVEDRFNASLGTYHDLLKIIKDKDFLDNEENEDILEDIVLTLTLFEDREMIEERLKTYAHLFDDKVMKQLKRRRYTGWGRLSRKLINGIRDKQSGKTILDFLKSDGFANRNFMQLIHDDSLTFKEDIQKAQVSGQGDSLHEHIANLAGSPAIKKGILQTVKVVDELVKVMGRHKPENIVIEMARENQTTQKGQKNSRERMKRIEEGIKELGSQILKEHPVENTQLQNEKLYLYYLQNGRDMYVDQELDINRLSDYDVDHIVPQSFLKDDSIDNKVLTRSDKARGKSDNVPSEEVVKKMKNYWRQLLNAKLITQRKFDNLTKAERGGLSELDKAGFIKRQLVETRQITKHVAQILDSRMNTKYDENDKLIREVKVITLKSKLVSDFRKDFQFYKVREINNYHHAHDAYLNAVVGTALIKKYPKLESEFVYGDYKVYDVRKMIAKSEQEIGKATAKYFFYSNIMNFFKTEITLANGEIRKRPLIETNGETGEIVWDKGRDFATVRKVLSMPQVNIVKKTEVQTGGFSKESILPKRNSDKLIARKKDWDPKKYGGFDSPTVAYSVLVVAKVEKGKSKKLKSVKELLGITIMERSSFEKNPIDFLEAKGYKEVKKDLIIKLPKYSLFELENGRKRMLASAGELQKGNELALPSKYVNFLYLASHYEKLKGSPEDNEQKQLFVEQHKHYLDEIIEQISEFSKRVILADANLDKVLSAYNKHRDKPIREQAENIIHLFTLTNLGAPAAFKYFDTTIDRKRYTSTKEVLDATLIHQSITGLYETRIDLSQLGGDGGPAPGGSGSSGGTAPLEEEYRLFLEAPIQNVTLLEQWKREIPKVWAEINPPGLASTQAPIHVQLLSTALPVRVRQYPITLEAKRSLRETIRKFRAAGILRPVHSPWNTPLLPVRKSGTSEYRMVQDLREVNKRVETIHPTVPNPYTLLSLLPPDRIWYSVLDLKDAFFCIPLAPESQLIFAFEWADAEEGESGQLTWTRLPQGFKNSPTLFNEALNRDLQGFRLDHPSVSLLQYVDDLLIAADTQAACLSATRDLLMTLAELGYRVSGKKAQLCQEEVTYLGFKIHKGSRSLSNSRTQAILQIPVPKTKRQVREFLGTIGYCRLWIPGFAELAQPLYAATRPGNDPLVWGEKEEEAFQSLKLALTQPPALALPSLDKPFQLFVEETSGAAKGVLTQALGPWKRPVAYLSKRLDPVAAGWPRCLRAIAAAALLTREASKLTFGQDIEITSSHNLESLLRSPPDKWLTNARITQYQVLLLDPPRVRFKQTAALNPATLLPETDDTLPIHHCLDTLDSLTSTRPDLTDQPLAQAEATLFTDGSSYIRDGKRYAGAAVVTLDSVIWAEPLPIGTSAQKAELIALTKALEWSKDKSVNIYTDSRYAFATLHVHGMIYRERGWLTAGGKAIKNAPEILALLTAVWLPKRVAVMHCKGHQKDDAPTSTGNRRADEVAREVAIRPLSTQATISAGKRTADGSEFEKRTADGSEFESPKKKAKVE

SEQ ID NO: 7164 - protein, 2093 aa, synthetic construct
MPAAKRVKLDGGDKKYSIGLDIGTNSVGWAVITDEYKVPSKKFKVLGNTDRHSIKKNLIGALLFDSGETAEATRLKRTARRRYTRRKNRICYLQEIFSNEMAKVDDSFFHRLEESFLVEEDKKHERHPIFGNIVDEVAYHEKYPTIYHLRKKLVDSTDKADLRLIYLALAHMIKFRGHFLIEGDLNPDNSDVDKLFIQLVQTYNQLFEENPINASGVDAKAILSARLSKSRRLENLIAQLPGEKKNGLFGNLIALSLGLTPNFKSNFDLAEDAKLQLSKDTYDDDLDNLLAQIGDQYADLFLAAKNLSDAILLSDILRVNTEITKAPLSASMIKRYDEHHQDLTLLKALVRQQLPEKYKEIFFDQSKNGYAGYIDGGASQEEFYKFIKPILEKMDGTEELLVKLNREDLLRKQRTFDNGSIPHQIHLGELHAILRRQEDFYPFLKDNREKIEKILTFRIPYYVGPLARGNSRFAWMTRKSEETITPWNFEEVVDKGASAQSFIERMTNFDKNLPNEKVLPKHSLLYEYFTVYNELTKVKYVTEGMRKPAFLSGEQKKAIVDLLFKTNRKVTVKQLKEDYFKKIECFDSVEISGVEDRFNASLGTYHDLLKIIKDKDFLDNEENEDILEDIVLTLTLFEDREMIEERLKTYAHLFDDKVMKQLKRRRYTGWGRLSRKLINGIRDKQSGKTILDFLKSDGFANRNFMQLIHDDSLTFKEDIQKAQVSGQGDSLHEHIANLAGSPAIKKGILQTVKVVDELVKVMGRHKPENIVIEMARENQTTQKGQKNSRERMKRIEEGIKELGSQILKEHPVENTQLQNEKLYLYYLQNGRDMYVDQELDINRLSDYDVDHIVPQSFLKDDSIDNKVLTRSDKARGKSDNVPSEEVVKKMKNYWRQLLNAKLITQRKFDNLTKAERGGLSELDKAGFIKRQLVETRQITKHVAQILDSRMNTKYDENDKLIREVKVITLKSKLVSDFRKDFQFYKVREINNYHHAHDAYLNAVVGTALIKKYPKLESEFVYGDYKVYDVRKMIAKSEQEIGKATAKYFFYSNIMNFFKTEITLANGEIRKRPLIETNGETGEIVWDKGRDFATVRKVLSMPQVNIVKKTEVQTGGFSKESILPKRNSDKLIARKKDWDPKKYGGFDSPTVAYSVLVVAKVEKGKSKKLKSVKELLGITIMERSSFEKNPIDFLEAKGYKEVKKDLIIKLPKYSLFELENGRKRMLASAGELQKGNELALPSKYVNFLYLASHYEKLKGSPEDNEQKQLFVEQHKHYLDEIIEQISEFSKRVILADANLDKVLSAYNKHRDKPIREQAENIIHLFTLTNLGAPAAFKYFDTTIDRKRYTSTKEVLDATLIHQSITGLYETRIDLSQLGGDGGPAPGGSGSSGGTLQLEEEYRLFEPESTQKQEMDIWLKNFPQAWAETGGMGTAHCQAPVLIQLKATATPISIRQYPMPHEAYQGIKPHIRRMLDQGILKPCQSPWNTPLLPVKKPGTEDYRPVQDLREVNKRVEDIHPTVPNPYNLLSTLPPSHPWYTVLDLKDAFFCLRLHSESQLLFAFEWRDPEIGLSGQLTWTRLPQGFKNSPTLFNEALHSDLADFRVRYPALVLLQYVDDLLLAAATRTECLEGTKALLETLGNKGYRASAKKAQICLQEVTYLGYSLKDGQRWLTKARKEAILSIPVPKNSRQVREFLGKAGYCRLFIPGFAELAAPLYPLTRPGTLFQWGTEQQLAFEDIKKALLSSPALGLPDITKPFELFIDENSGFAKGVLVQKLGPWKRPVAYLSKKLDTVASGWPPCLRMVAAIAILVKDAGKLTLGQPLTILTSHPVEALVRQPPNKWLSNARMTHYQAMLLDAERVHFGPTVSLNPATLLPLPSGGNHHDCLQILAETHGTRPDLTDQPLPDADLTWYTDGSSFIRNGEREAGAAVTTESEVIWAAPLPPGTSAQRAELIALTQALKMAEGKKLTVYTDSRYAFATTHVHGEIYRRRGWLTSEGKEIKNKNEILALLEALFLPKRLSIIHCPGHQKGDSPQAKGNRLADDTAKKAATETHSSLTVLPAGKRTADGSEFEKRTADGSEFESPKKKAKVE

SEQ ID NO: 7165 - protein, 2174 aa, synthetic construct
MPAAKRVKLDGGDKKYSIGLDIGTNSVGWAVITDEYKVPSKKFKVLGNTDRHSIKKNLIGALLFDSGETAEATRLKRTARRRYTRRKNRICYLQEIFSNEMAKVDDSFFHRLEESFLVEEDKKHERHPIFGNIVDEVAYHEKYPTIYHLRKKLVDSTDKADLRLIYLALAHMIKFRGHFLIEGDLNPDNSDVDKLFIQLVQTYNQLFEENPINASGVDAKAILSARLSKSRRLENLIAQLPGEKKNGLFGNLIALSLGLTPNFKSNFDLAEDAKLQLSKDTYDDDLDNLLAQIGDQYADLFLAAKNLSDAILLSDILRVNTEITKAPLSASMIKRYDEHHQDLTLLKALVRQQLPEKYKEIFFDQSKNGYAGYIDGGASQEEFYKFIKPILEKMDGTEELLVKLNREDLLRKQRTFDNGSIPHQIHLGELHAILRRQEDFYPFLKDNREKIEKILTFRIPYYVGPLARGNSRFAWMTRKSEETITPWNFEEVVDKGASAQSFIERMTNFDKNLPNEKVLPKHSLLYEYFTVYNELTKVKYVTEGMRKPAFLSGEQKKAIVDLLFKTNRKVTVKQLKEDYFKKIECFDSVEISGVEDRFNASLGTYHDLLKIIKDKDFLDNEENEDILEDIVLTLTLFEDREMIEERLKTYAHLFDDKVMKQLKRRRYTGWGRLSRKLINGIRDKQSGKTILDFLKSDGFANRNFMQLIHDDSLTFKEDIQKAQVSGQGDSLHEHIANLAGSPAIKKGILQTVKVVDELVKVMGRHKPENIVIEMARENQTTQKGQKNSRERMKRIEEGIKELGSQILKEHPVENTQLQNEKLYLYYLQNGRDMYVDQELDINRLSDYDVDHIVPQSFLKDDSIDNKVLTRSDKARGKSDNVPSEEVVKKMKNYWRQLLNAKLITQRKFDNLTKAERGGLSELDKAGFIKRQLVETRQITKHVAQILDSRMNTKYDENDKLIREVKVITLKSKLVSDFRKDFQFYKVREINNYHHAHDAYLNAVVGTALIKKYPKLESEFVYGDYKVYDVRKMIAKSEQEIGKATAKYFFYSNIMNFFKTEITLANGEIRKRPLIETNGETGEIVWDKGRDFATVRKVLSMPQVNIVKKTEVQTGGFSKESILPKRNSDKLIARKKDWDPKKYGGFDSPTVAYSVLVVAKVEKGKSKKLKSVKELLGITIMERSSFEKNPIDFLEAKGYKEVKKDLIIKLPKYSLFELENGRKRMLASAGELQKGNELALPSKYVNFLYLASHYEKLKGSPEDNEQKQLFVEQHKHYLDEIIEQISEFSKRVILADANLDKVLSAYNKHRDKPIREQAENIIHLFTLTNLGAPAAFKYFDTTIDRKRYTSTKEVLDATLIHQSITGLYETRIDLSQLGGDGGPAPGGSGSSGGMNPLQLLQPLPAEIKGTKLLAHWNSGATITCIPESFLEDEQPIKKTLIKTIHGEKQQNVYYVTFKVKGRKVEAEVIASPYEYILLSPTDVPWLTQQPLQLTILVPLQEYQEKILSKTALPEDQKQQLKTLFVKYDNLWQHWENQVGHRKIRPHNIATGDYPPRPQKQYPINPKAKPSIQIVIDDLLKQGVLTPQNSTMNTPVYPVPKPDGRWRMVLDYREVNKTIPLTAAQNQHSAGILATIVRQKYKTTLDLANGFWAHPITPESYWLTAFTWQGKQYCWTRLPQGFLNSPALFTADVVDLLKEIPNVQVYVDDIYLSHDDPKEHVQQLEKVFQILLQAGYVVSLKKSEIGQKTVEFLGFNITKEGRGLTDTFKTKLLNITPPKDLKQLQSILGLLNFARNFIPNFAELVQPLYNLIASAKGKYIEWSEENTKQLNMVIEALNTASNLEERLPEQRLVIKVNTSPSAGYVRYYNETGKKPIMYLNYVFSKAELKFSMLEKLLTTMHKALIKAMDLAMGQEILVYSPIVSMTKIQKTPLPERKALPIRWITWMTYLEDPRIQFHYDKTLPELKHIPDVYTSSQSPVKHPSQYEGVFYTDGSAIKSPDPTKSNNAGMGIVHATYKPEYQVLNQWSIPLGNHTAQMAEIAAVEFACKKALKIPGPVLVITDSFYVAESANKELPYWKSNGFVNNKKKPLKHISKWKSIAECLSMKPDITIQHEKGISLQIPVFILKGNALADKLATQGSYVVNAGKRTADGSEFEKRTADGSEFESPKKKAKVE

SEQ ID NO: 7166 - protein, 2085 aa, synthetic construct
MPAAKRVKLDGGDKKYSIGLDIGTNSVGWAVITDEYKVPSKKFKVLGNTDRHSIKKNLIGALLFDSGETAEATRLKRTARRRYTRRKNRICYLQEIFSNEMAKVDDSFFHRLEESFLVEEDKKHERHPIFGNIVDEVAYHEKYPTIYHLRKKLVDSTDKADLRLIYLALAHMIKFRGHFLIEGDLNPDNSDVDKLFIQLVQTYNQLFEENPINASGVDAKAILSARLSKSRRLENLIAQLPGEKKNGLFGNLIALSLGLTPNFKSNFDLAEDAKLQLSKDTYDDDLDNLLAQIGDQYADLFLAAKNLSDAILLSDILRVNTEITKAPLSASMIKRYDEHHQDLTLLKALVRQQLPEKYKEIFFDQSKNGYAGYIDGGASQEEFYKFIKPILEKMDGTEELLVKLNREDLLRKQRTFDNGSIPHQIHLGELHAILRRQEDFYPFLKDNREKIEKILTFRIPYYVGPLARGNSRFAWMTRKSEETITPWNFEEVVDKGASAQSFIERMTNFDKNLPNEKVLPKHSLLYEYFTVYNELTKVKYVTEGMRKPAFLSGEQKKAIVDLLFKTNRKVTVKQLKEDYFKKIECFDSVEISGVEDRFNASLGTYHDLLKIIKDKDFLDNEENEDILEDIVLTLTLFEDREMIEERLKTYAHLFDDKVMKQLKRRRYTGWGRLSRKLINGIRDKQSGKTILDFLKSDGFANRNFMQLIHDDSLTFKEDIQKAQVSGQGDSLHEHIANLAGSPAIKKGILQTVKVVDELVKVMGRHKPENIVIEMARENQTTQKGQKNSRERMKRIEEGIKELGSQILKEHPVENTQLQNEKLYLYYLQNGRDMYVDQELDINRLSDYDVDHIVPQSFLKDDSIDNKVLTRSDKARGKSDNVPSEEVVKKMKNYWRQLLNAKLITQRKFDNLTKAERGGLSELDKAGFIKRQLVETRQITKHVAQILDSRMNTKYDENDKLIREVKVITLKSKLVSDFRKDFQFYKVREINNYHHAHDAYLNAVVGTALIKKYPKLESEFVYGDYKVYDVRKMIAKSEQEIGKATAKYFFYSNIMNFFKTEITLANGEIRKRPLIETNGETGEIVWDKGRDFATVRKVLSMPQVNIVKKTEVQTGGFSKESILPKRNSDKLIARKKDWDPKKYGGFDSPTVAYSVLVVAKVEKGKSKKLKSVKELLGITIMERSSFEKNPIDFLEAKGYKEVKKDLIIKLPKYSLFELENGRKRMLASAGELQKGNELALPSKYVNFLYLASHYEKLKGSPEDNEQKQLFVEQHKHYLDEIIEQISEFSKRVILADANLDKVLSAYNKHRDKPIREQAENIIHLFTLTNLGAPAAFKYFDTTIDRKRYTSTKEVLDATLIHQSITGLYETRIDLSQLGGDGGPAPGGSGSSGGVPWLTQQPLQLTILVPLQEYQEKILSKTALPEDQKQQLKTLFVKYDNLWQHWENQVGHRKIRPHNIATGDYPPRPQKQYPINPKAKPSIQIVIDDLLKQGVLTPQNSTMNTPVYPVPKPDGRWRMVLDYREVNKTIPLTAAQNQHSAGILATIVRQKYKTTLDLANGFWAHPITPESYWLTAFTWQGKQYCWTRLPQGFLNSPALFNADVVDLLKEIPNVQVYVDDIYLSHDDPKEHVQQLEKVFQILLQAGYVVSLKKSEIGQKTVEFLGFNITKEGRGLTDTFKTKLLNITPPKDLKQLQSILGLLNFARNFIPNFAELVQPLYNLIAPAKGKYIEWSEENTKQLNMVIEALNTASNLEERLPEQRLVIKVNTSPSAGYVRYYNETGKKPIMYLNYVFSKAELKFSMLEKLLTTMHKALIKAMDLAMGQEILVYSPIVSMTKIQKTPLPERKALPIRWITWMTYLEDPRIQFHYDKTLPELKHIPDVYTSSQSPVKHPSQYEGVFYTDGSAIKSPDPTKSNNAGMGIVHATYKPEYQVLNQWSIPLGNHTAQMAEIAAVEFACKKALKIPGPVLVITDSFYVAESANKELPYWKSNGFVNNKKKPLKHISKWKSIAECLSMKPDITIQHEKGISLQIPVFILKGNALADKLATQGSYVVNAGKRTADGSEFEKRTADGSEFESPKKKAKVE

SEQ ID NO: 7167 - protein, 2092 aa, synthetic construct
MPAAKRVKLDGGDKKYSIGLDIGTNSVGWAVITDEYKVPSKKFKVLGNTDRHSIKKNLIGALLFDSGETAEATRLKRTARRRYTRRKNRICYLQEIFSNEMAKVDDSFFHRLEESFLVEEDKKHERHPIFGNIVDEVAYHEKYPTIYHLRKKLVDSTDKADLRLIYLALAHMIKFRGHFLIEGDLNPDNSDVDKLFIQLVQTYNQLFEENPINASGVDAKAILSARLSKSRRLENLIAQLPGEKKNGLFGNLIALSLGLTPNFKSNFDLAEDAKLQLSKDTYDDDLDNLLAQIGDQYADLFLAAKNLSDAILLSDILRVNTEITKAPLSASMIKRYDEHHQDLTLLKALVRQQLPEKYKEIFFDQSKNGYAGYIDGGASQEEFYKFIKPILEKMDGTEELLVKLNREDLLRKQRTFDNGSIPHQIHLGELHAILRRQEDFYPFLKDNREKIEKILTFRIPYYVGPLARGNSRFAWMTRKSEETITPWNFEEVVDKGASAQSFIERMTNFDKNLPNEKVLPKHSLLYEYFTVYNELTKVKYVTEGMRKPAFLSGEQKKAIVDLLFKTNRKVTVKQLKEDYFKKIECFDSVEISGVEDRFNASLGTYHDLLKIIKDKDFLDNEENEDILEDIVLTLTLFEDREMIEERLKTYAHLFDDKVMKQLKRRRYTGWGRLSRKLINGIRDKQSGKTILDFLKSDGFANRNFMQLIHDDSLTFKEDIQKAQVSGQGDSLHEHIANLAGSPAIKKGILQTVKVVDELVKVMGRHKPENIVIEMARENQTTQKGQKNSRERMKRIEEGIKELGSQILKEHPVENTQLQNEKLYLYYLQNGRDMYVDQELDINRLSDYDVDHIVPQSFLKDDSIDNKVLTRSDKARGKSDNVPSEEVVKKMKNYWRQLLNAKLITQRKFDNLTKAERGGLSELDKAGFIKRQLVETRQITKHVAQILDSRMNTKYDENDKLIREVKVITLKSKLVSDFRKDFQFYKVREINNYHHAHDAYLNAVVGTALIKKYPKLESEFVYGDYKVYDVRKMIAKSEQEIGKATAKYFFYSNIMNFFKTEITLANGEIRKRPLIETNGETGEIVWDKGRDFATVRKVLSMPQVNIVKKTEVQTGGFSKESILPKRNSDKLIARKKDWDPKKYGGFDSPTVAYSVLVVAKVEKGKSKKLKSVKELLGITIMERSSFEKNPIDFLEAKGYKEVKKDLIIKLPKYSLFELENGRKRMLASAGELQKGNELALPSKYVNFLYLASHYEKLKGSPEDNEQKQLFVEQHKHYLDEIIEQISEFSKRVILADANLDKVLSAYNKHRDKPIREQAENIIHLFTLTNLGAPAAFKYFDTTIDRKRYTSTKEVLDATLIHQSITGLYETRIDLSQLGGDGGPAPGGSGSSGGVLNLEEEYRLHEKPVPSSIDPSWLQLFPTVWAERAGMGLANQVPPVVVELRSGASPVAVRQYPMSKEAREGIRPHIQKFLDLGVLVPCRSPWNTPLLPVKKPGTNDYRPVQDLREINKRVQDIHPTVPNPYNLLSSLPPSYTWYSVLDLKDAFFCLRLHPNSQPLFAFEWKDPEKGNTGQLTWTRLPQGFKNSPTLFNEALHRDLAPFRALNPQVVLLQYVDDLLVAAPTYEDCKKGTQKLLQELSKLGYRVSAKKAQLCQREVTYLGYLLKEGKRWLTPARKATVMKIPVPTTPRQVREFLGTAGFCRLWIPGFASLAAPLYPLTKPSIPFIWTEEHQQAFDHIKKALLSAPALALPDLTKPFTLYIDERAGVARGVLTQTLGPWRRPVAYLSKKLDPVASGWPTCLKAVAAVALLLKDADKLTLGQNVTVIASHSLESIVRQPPDRWMTNARMTHYQSLLLNERVSFAPPAVLNPATLLPVESEATPVHRCSEILAEETGTRRDLEDQPLPGVPTWYTDGSSFITEGKRRAGAPIVDGKRTVWASSLPEGTSAQKAELVALTQALRLAEGKNINIYTDSRYAFATAHIHGAIYKQRGWLTSAGKDIKNKEEILALLEAIHLPRRVAIIHCPGHQRGSNPVATGNRRADEAAKQAALSTRVLAGTTKPAGKRTADGSEFEKRTADGSEFESPKKKAKVE

SEQ ID NO: 7168 - protein, 2216 aa, synthetic construct
MPAAKRVKLDGGDKKYSIGLDIGTNSVGWAVITDEYKVPSKKFKVLGNTDRHSIKKNLIGALLFDSGETAEATRLKRTARRRYTRRKNRICYLQEIFSNEMAKVDDSFFHRLEESFLVEEDKKHERHPIFGNIVDEVAYHEKYPTIYHLRKKLVDSTDKADLRLIYLALAHMIKFRGHFLIEGDLNPDNSDVDKLFIQLVQTYNQLFEENPINASGVDAKAILSARLSKSRRLENLIAQLPGEKKNGLFGNLIALSLGLTPNFKSNFDLAEDAKLQLSKDTYDDDLDNLLAQIGDQYADLFLAAKNLSDAILLSDILRVNTEITKAPLSASMIKRYDEHHQDLTLLKALVRQQLPEKYKEIFFDQSKNGYAGYIDGGASQEEFYKFIKPILEKMDGTEELLVKLNREDLLRKQRTFDNGSIPHQIHLGELHAILRRQEDFYPFLKDNREKIEKILTFRIPYYVGPLARGNSRFAWMTRKSEETITPWNFEEVVDKGASAQSFIERMTNFDKNLPNEKVLPKHSLLYEYFTVYNELTKVKYVTEGMRKPAFLSGEQKKAIVDLLFKTNRKVTVKQLKEDYFKKIECFDSVEISGVEDRFNASLGTYHDLLKIIKDKDFLDNEENEDILEDIVLTLTLFEDREMIEERLKTYAHLFDDKVMKQLKRRRYTGWGRLSRKLINGIRDKQSGKTILDFLKSDGFANRNFMQLIHDDSLTFKEDIQKAQVSGQGDSLHEHIANLAGSPAIKKGILQTVKVVDELVKVMGRHKPENIVIEMARENQTTQKGQKNSRERMKRIEEGIKELGSQILKEHPVENTQLQNEKLYLYYLQNGRDMYVDQELDINRLSDYDVDHIVPQSFLKDDSIDNKVLTRSDKARGKSDNVPSEEVVKKMKNYWRQLLNAKLITQRKFDNLTKAERGGLSELDKAGFIKRQLVETRQITKHVAQILDSRMNTKYDENDKLIREVKVITLKSKLVSDFRKDFQFYKVREINNYHHAHDAYLNAVVGTALIKKYPKLESEFVYGDYKVYDVRKMIAKSEQEIGKATAKYFFYSNIMNFFKTEITLANGEIRKRPLIETNGETGEIVWDKGRDFATVRKVLSMPQVNIVKKTEVQTGGFSKESILPKRNSDKLIARKKDWDPKKYGGFDSPTVAYSVLVVAKVEKGKSKKLKSVKELLGITIMERSSFEKNPIDFLEAKGYKEVKKDLIIKLPKYSLFELENGRKRMLASAGELQKGNELALPSKYVNFLYLASHYEKLKGSPEDNEQKQLFVEQHKHYLDEIIEQISEFSKRVILADANLDKVLSAYNKHRDKPIREQAENIIHLFTLTNLGAPAAFKYFDTTIDRKRYTSTKEVLDATLIHQSITGLYETRIDLSQLGGDGGPAPGGSGSSGGTLGDQGSRGSDPLPEPRVTLTVEGIPTEFLVNTGAEHSVLTKPMGKMGSKRTVVAGATGSKVYPWTTKRLLKIGQKQVTHSFLVIPECPAPLLGRDLLTKLKAQIQFSTEGPQVTWEDRPAMCLVLNLEEEYRLHEKPVPPSIDPSWLQLFPMVWAEKAGMGLANQVPPVVVELKSDASPVAVRQYPMSKEAREGIRPHIQRFLDLGILVPCQSPWNTPLLPVKKPGTNDYRPVQDLREVNKRVQDIHPTVPNPYNLLSSLPPSHTWYSVLDLKDAFFCLKLHPNSQPLFAFEWRDPEKGNTGQLTWTRLPQGFKNSPTLFDEALHRDLASFRALNPQVVMLQYVDDLLVAAPTYRDCKEGTRRLLQELSKLGYRVSAKKAQLCREEVTYLGYLLKGGKRWLTPARKATVMKIPTPTTPRQVREFLGTAGFCRLWIPGFASLAAPLYPLTREKVPFTWTEAHQEAFGRIKEALLSAPALALPDLTKPFALYVDEKEGVARGVLTQTLGPWRRPVAYLSKKLDPVASGWPTCLKAIAAVALLLKDADKLTLGQNVLVIAPHNLESIVRQPPDRWMTNARMTHYQSLLLNERVSFAPPAILNPATLLPVESDDTPIHICSEILAEETGTRPDLRDQPLPGVPAWYTDGSSFIMDGRRQAGAAIVDNKRTVWASNLPEGTSAQKAELIALTQALRLAEGKSINIYTDSRYAFATAHVHGAIYKQRGLLTSAGKDIKNKEEILALLEAIHLPKRVAIIHCPGHQRGTDPVATGNRKADEAAKQAAQSTRILTETTKNAGKRTADGSEFEKRTADGSEFESPKKKAKVE

SEQ ID NO: 7169 - protein, 2094 aa, synthetic construct
MPAAKRVKLDGGDKKYSIGLDIGTNSVGWAVITDEYKVPSKKFKVLGNTDRHSIKKNLIGALLFDSGETAEATRLKRTARRRYTRRKNRICYLQEIFSNEMAKVDDSFFHRLEESFLVEEDKKHERHPIFGNIVDEVAYHEKYPTIYHLRKKLVDSTDKADLRLIYLALAHMIKFRGHFLIEGDLNPDNSDVDKLFIQLVQTYNQLFEENPINASGVDAKAILSARLSKSRRLENLIAQLPGEKKNGLFGNLIALSLGLTPNFKSNFDLAEDAKLQLSKDTYDDDLDNLLAQIGDQYADLFLAAKNLSDAILLSDILRVNTEITKAPLSASMIKRYDEHHQDLTLLKALVRQQLPEKYKEIFFDQSKNGYAGYIDGGASQEEFYKFIKPILEKMDGTEELLVKLNREDLLRKQRTFDNGSIPHQIHLGELHAILRRQEDFYPFLKDNREKIEKILTFRIPYYVGPLARGNSRFAWMTRKSEETITPWNFEEVVDKGASAQSFIERMTNFDKNLPNEKVLPKHSLLYEYFTVYNELTKVKYVTEGMRKPAFLSGEQKKAIVDLLFKTNRKVTVKQLKEDYFKKIECFDSVEISGVEDRFNASLGTYHDLLKIIKDKDFLDNEENEDILEDIVLTLTLFEDREMIEERLKTYAHLFDDKVMKQLKRRRYTGWGRLSRKLINGIRDKQSGKTILDFLKSDGFANRNFMQLIHDDSLTFKEDIQKAQVSGQGDSLHEHIANLAGSPAIKKGILQTVKVVDELVKVMGRHKPENIVIEMARENQTTQKGQKNSRERMKRIEEGIKELGSQILKEHPVENTQLQNEKLYLYYLQNGRDMYVDQELDINRLSDYDVDHIVPQSFLKDDSIDNKVLTRSDKARGKSDNVPSEEVVKKMKNYWRQLLNAKLITQRKFDNLTKAERGGLSELDKAGFIKRQLVETRQITKHVAQILDSRMNTKYDENDKLIREVKVITLKSKLVSDFRKDFQFYKVREINNYHHAHDAYLNAVVGTALIKKYPKLESEFVYGDYKVYDVRKMIAKSEQEIGKATAKYFFYSNIMNFFKTEITLANGEIRKRPLIETNGETGEIVWDKGRDFATVRKVLSMPQVNIVKKTEVQTGGFSKESILPKRNSDKLIARKKDWDPKKYGGFDSPTVAYSVLVVAKVEKGKSKKLKSVKELLGITIMERSSFEKNPIDFLEAKGYKEVKKDLIIKLPKYSLFELENGRKRMLASAGELQKGNELALPSKYVNFLYLASHYEKLKGSPEDNEQKQLFVEQHKHYLDEIIEQISEFSKRVILADANLDKVLSAYNKHRDKPIREQAENIIHLFTLTNLGAPAAFKYFDTTIDRKRYTSTKEVLDATLIHQSITGLYETRIDLSQLGGDGGPAPGGSGSSGGLGIEDEYRLHETSTEPDVSLGSTWLSDFPQAWAETGGMGLAVRQAPLIIPLKATSTPVSIQQYPMSHEARLGIKPHIQRLLDQGILVPCQSPWNTPLLPVKKPGTNDYRPVQDLREVNKRVEDIHPTVPNPYNLLSGLPPSHQWYTVLDLKDAFFCLRLHPTSQPLFAFEWRDPGMGISGQLTWTRLPQGFKNSPTLFNEALHRDLADFRIQHPDLILLQYVDDILLAATSELDCQQGTRALLQTLGDLGYRASAKKAQICQKQVKYLGYLLREGQRWLTEARKETVMGQPVPKTPRQLREFLGKAGFCRLFIPGFAEMAAPLYPLTKPGTLFSWGPDQQKAYQEIKQALLTAPALGLPDLTKPFELFVDEKQGYAKGVLTQKLGPWRRPVAYLSKKLDPVAAGWPPCLRMVAAIAVLTKDAGKLTMGQPLVILAPHAVEALVKQPPDRWLSNARMTHYQAMLLDTDRVQFGPVVALNPATLLPLPEEGAPHDCLEILAETHGTRPDLTDQPIPDADHTWYTDGSSFLQEGQRKAGAAVTTETEVIWAGALPAGTSAQRAELIALTQALKMAEGKRLNVYTDSRYAFATAHIHGEIYRRRGWLTSEGREIKNKSEILALLKALFLPKRLSIIHCLGHQKGDSAEARGNRLADQAAREAAIKTPPDTSTLLIAGKRTADGSEFEKRTADGSEFESPKKKAKVE

SEQ ID NO: 7170 - protein, 2094 aa, synthetic construct
MPAAKRVKLDGGDKKYSIGLDIGTNSVGWAVITDEYKVPSKKFKVLGNTDRHSIKKNLIGALLFDSGETAEATRLKRTARRRYTRRKNRICYLQEIFSNEMAKVDDSFFHRLEESFLVEEDKKHERHPIFGNIVDEVAYHEKYPTIYHLRKKLVDSTDKADLRLIYLALAHMIKFRGHFLIEGDLNPDNSDVDKLFIQLVQTYNQLFEENPINASGVDAKAILSARLSKSRRLENLIAQLPGEKKNGLFGNLIALSLGLTPNFKSNFDLAEDAKLQLSKDTYDDDLDNLLAQIGDQYADLFLAAKNLSDAILLSDILRVNTEITKAPLSASMIKRYDEHHQDLTLLKALVRQQLPEKYKEIFFDQSKNGYAGYIDGGASQEEFYKFIKPILEKMDGTEELLVKLNREDLLRKQRTFDNGSIPHQIHLGELHAILRRQEDFYPFLKDNREKIEKILTFRIPYYVGPLARGNSRFAWMTRKSEETITPWNFEEVVDKGASAQSFIERMTNFDKNLPNEKVLPKHSLLYEYFTVYNELTKVKYVTEGMRKPAFLSGEQKKAIVDLLFKTNRKVTVKQLKEDYFKKIECFDSVEISGVEDRFNASLGTYHDLLKIIKDKDFLDNEENEDILEDIVLTLTLFEDREMIEERLKTYAHLFDDKVMKQLKRRRYTGWGRLSRKLINGIRDKQSGKTILDFLKSDGFANRNFMQLIHDDSLTFKEDIQKAQVSGQGDSLHEHIANLAGSPAIKKGILQTVKVVDELVKVMGRHKPENIVIEMARENQTTQKGQKNSRERMKRIEEGIKELGSQILKEHPVENTQLQNEKLYLYYLQNGRDMYVDQELDINRLSDYDVDHIVPQSFLKDDSIDNKVLTRSDKARGKSDNVPSEEVVKKMKNYWRQLLNAKLITQRKFDNLTKAERGGLSELDKAGFIKRQLVETRQITKHVAQILDSRMNTKYDENDKLIREVKVITLKSKLVSDFRKDFQFYKVREINNYHHAHDAYLNAVVGTALIKKYPKLESEFVYGDYKVYDVRKMIAKSEQEIGKATAKYFFYSNIMNFFKTEITLANGEIRKRPLIETNGETGEIVWDKGRDFATVRKVLSMPQVNIVKKTEVQTGGFSKESILPKRNSDKLIARKKDWDPKKYGGFDSPTVAYSVLVVAKVEKGKSKKLKSVKELLGITIMERSSFEKNPIDFLEAKGYKEVKKDLIIKLPKYSLFELENGRKRMLASAGELQKGNELALPSKYVNFLYLASHYEKLKGSPEDNEQKQLFVEQHKHYLDEIIEQISEFSKRVILADANLDKVLSAYNKHRDKPIREQAENIIHLFTLTNLGAPAAFKYFDTTIDRKRYTSTKEVLDATLIHQSITGLYETRIDLSQLGGDGGPAPGGSGSSGGTLGIEDEYRLHETSTEPDVSLGSTWLSDFPQAWAETGGMGLAVRQAPLIIPLKATSTPVSIQQYPMSHEARLGIKPHIQRLLDQGILVPCQSPWNTPLLPVKKPGTNDYRPVQDLREVNKRVEDIHPTVPNPYNLLSGLPPSHQWYTVLDLKDAFFCLRLHPTSQPLFAFEWRDPGMGISGQLTWTRLPQGFKNSPTLFNEALHRDLADFRIQHPDLILLQYVDDILLAATSELDCQQGTRALLQTLGDLGYRASAKKAQICQKQVKYLGYLLREGQRWLTEARKETVMGQPVPKTPRQLREFLGTAGFCRLWIPGFAEMAAPLYPLTKPGTLFSWGPDQQKAYQEIKQALLTAPALGLPDLTKPFELFVDEKQGYAKGVLTQKLGPWRRPVAYLSKKLDPVAAGWPPCLRMVAAIAVLTKDAGKLTMGQPLVILAPHAVEALVKQPPDRWLSNARMTHYQAMLLDTDRVQFGPVVALNPATLLPLPEEGAPHDCLEILAETHGTRPDLTDQPIPDADHTWYTDGSSFLQEGQRKAGAAVTTETEVIWAGALPAGTSAQRAELIALTQALKMAEGKRLNVYTDSRYAFATAHIHGEIYRRRGWLTSEGREIKNKSEILALLKALFLPKRLSIIHCLGHQKGDSAEARGNRLADQAAREAAIKTPPDTSTLLAGKRTADGSEFEKRTADGSEFESPKKKAKVE

SEQ ID NO: 7171 - protein, 2094 aa, synthetic construct
MPAAKRVKLDGGDKKYSIGLDIGTNSVGWAVITDEYKVPSKKFKVLGNTDRHSIKKNLIGALLFDSGETAEATRLKRTARRRYTRRKNRICYLQEIFSNEMAKVDDSFFHRLEESFLVEEDKKHERHPIFGNIVDEVAYHEKYPTIYHLRKKLVDSTDKADLRLIYLALAHMIKFRGHFLIEGDLNPDNSDVDKLFIQLVQTYNQLFEENPINASGVDAKAILSARLSKSRRLENLIAQLPGEKKNGLFGNLIALSLGLTPNFKSNFDLAEDAKLQLSKDTYDDDLDNLLAQIGDQYADLFLAAKNLSDAILLSDILRVNTEITKAPLSASMIKRYDEHHQDLTLLKALVRQQLPEKYKEIFFDQSKNGYAGYIDGGASQEEFYKFIKPILEKMDGTEELLVKLNREDLLRKQRTFDNGSIPHQIHLGELHAILRRQEDFYPFLKDNREKIEKILTFRIPYYVGPLARGNSRFAWMTRKSEETITPWNFEEVVDKGASAQSFIERMTNFDKNLPNEKVLPKHSLLYEYFTVYNELTKVKYVTEGMRKPAFLSGEQKKAIVDLLFKTNRKVTVKQLKEDYFKKIECFDSVEISGVEDRFNASLGTYHDLLKIIKDKDFLDNEENEDILEDIVLTLTLFEDREMIEERLKTYAHLFDDKVMKQLKRRRYTGWGRLSRKLINGIRDKQSGKTILDFLKSDGFANRNFMQLIHDDSLTFKEDIQKAQVSGQGDSLHEHIANLAGSPAIKKGILQTVKVVDELVKVMGRHKPENIVIEMARENQTTQKGQKNSRERMKRIEEGIKELGSQILKEHPVENTQLQNEKLYLYYLQNGRDMYVDQELDINRLSDYDVDHIVPQSFLKDDSIDNKVLTRSDKARGKSDNVPSEEVVKKMKNYWRQLLNAKLITQRKFDNLTKAERGGLSELDKAGFIKRQLVETRQITKHVAQILDSRMNTKYDENDKLIREVKVITLKSKLVSDFRKDFQFYKVREINNYHHAHDAYLNAVVGTALIKKYPKLESEFVYGDYKVYDVRKMIAKSEQEIGKATAKYFFYSNIMNFFKTEITLANGEIRKRPLIETNGETGEIVWDKGRDFATVRKVLSMPQVNIVKKTEVQTGGFSKESILPKRNSDKLIARKKDWDPKKYGGFDSPTVAYSVLVVAKVEKGKSKKLKSVKELLGITIMERSSFEKNPIDFLEAKGYKEVKKDLIIKLPKYSLFELENGRKRMLASAGELQKGNELALPSKYVNFLYLASHYEKLKGSPEDNEQKQLFVEQHKHYLDEIIEQISEFSKRVILADANLDKVLSAYNKHRDKPIREQAENIIHLFTLTNLGAPAAFKYFDTTIDRKRYTSTKEVLDATLIHQSITGLYETRIDLSQLGGDGGPAPGGSGSSGGTLNIEDEYRLHETSKEPDVSLGSTWLSDFPQAWAETGGMGLAVRQAPLIIPLKATSTPVSIKQYPMSQEARLGIKPHIQRLLDQGILVPCQSPWNTPLLPVKKPGTNDYRPVQDLREVNKRVEDIHPTVPNPYNLLSGLPPSHQWYTVLDLKDAFFCLRLHPTSQPLFAFEWRDPEMGISGQLTWTRLPQGFKNSPTLFNEALHRDLAGFRIQHPDLILLQYVDDLLLAATSELDCQQGTRALLQTLGDLGYRASAKKAQICQKQVKYLGYLLKEGQRWLTEARKETVMGQPIPKTPRQLREFLGTAGFCRLWIPGFAEMAAPLYPLTKPGTLFNWGPDQQKAFQEIKQALLTAPALGLPDLTKPFELFVDEKQGYAKGVLTQKLGPWRRPVAYLSKKLDPVAAGWPPCLRMVAAIAVLTKDAGKLTMGQPLVILAPHAVEALVKQPPDRWLSNARMTHYQALLLDTDRVQFGPVVALNPATLLPLPEEGLQHDCLDILAEAHGTRSDLMDQPLPDADHTWYTDGSSFLQEGQRKAGAAVTTETEVIWARALPAGTSAQRAELIALTQALKMAEGKKLNVYTDSRYAFATAHIHGEIYRRRGWLTSEGKEIKNKDEILALLKALFLPKRLSIIHCPGHQKGNSAEARGNRMADQAAREVATRETPETSTLLAGKRTADGSEFEKRTADGSEFESPKKKAKVE

SEQ ID NO: 7172 - protein, 2114 aa, synthetic construct
MPAAKRVKLDGGDKKYSIGLDIGTNSVGWAVITDEYKVPSKKFKVLGNTDRHSIKKNLIGALLFDSGETAEATRLKRTARRRYTRRKNRICYLQEIFSNEMAKVDDSFFHRLEESFLVEEDKKHERHPIFGNIVDEVAYHEKYPTIYHLRKKLVDSTDKADLRLIYLALAHMIKFRGHFLIEGDLNPDNSDVDKLFIQLVQTYNQLFEENPINASGVDAKAILSARLSKSRRLENLIAQLPGEKKNGLFGNLIALSLGLTPNFKSNFDLAEDAKLQLSKDTYDDDLDNLLAQIGDQYADLFLAAKNLSDAILLSDILRVNTEITKAPLSASMIKRYDEHHQDLTLLKALVRQQLPEKYKEIFFDQSKNGYAGYIDGGASQEEFYKFIKPILEKMDGTEELLVKLNREDLLRKQRTFDNGSIPHQIHLGELHAILRRQEDFYPFLKDNREKIEKILTFRIPYYVGPLARGNSRFAWMTRKSEETITPWNFEEVVDKGASAQSFIERMTNFDKNLPNEKVLPKHSLLYEYFTVYNELTKVKYVTEGMRKPAFLSGEQKKAIVDLLFKTNRKVTVKQLKEDYFKKIECFDSVEISGVEDRFNASLGTYHDLLKIIKDKDFLDNEENEDILEDIVLTLTLFEDREMIEERLKTYAHLFDDKVMKQLKRRRYTGWGRLSRKLINGIRDKQSGKTILDFLKSDGFANRNFMQLIHDDSLTFKEDIQKAQVSGQGDSLHEHIANLAGSPAIKKGILQTVKVVDELVKVMGRHKPENIVIEMARENQTTQKGQKNSRERMKRIEEGIKELGSQILKEHPVENTQLQNEKLYLYYLQNGRDMYVDQELDINRLSDYDVDHIVPQSFLKDDSIDNKVLTRSDKARGKSDNVPSEEVVKKMKNYWRQLLNAKLITQRKFDNLTKAERGGLSELDKAGFIKRQLVETRQITKHVAQILDSRMNTKYDENDKLIREVKVITLKSKLVSDFRKDFQFYKVREINNYHHAHDAYLNAVVGTALIKKYPKLESEFVYGDYKVYDVRKMIAKSEQEIGKATAKYFFYSNIMNFFKTEITLANGEIRKRPLIETNGETGEIVWDKGRDFATVRKVLSMPQVNIVKKTEVQTGGFSKESILPKRNSDKLIARKKDWDPKKYGGFDSPTVAYSVLVVAKVEKGKSKKLKSVKELLGITIMERSSFEKNPIDFLEAKGYKEVKKDLIIKLPKYSLFELENGRKRMLASAGELQKGNELALPSKYVNFLYLASHYEKLKGSPEDNEQKQLFVEQHKHYLDEIIEQISEFSKRVILADANLDKVLSAYNKHRDKPIREQAENIIHLFTLTNLGAPAAFKYFDTTIDRKRYTSTKEVLDATLIHQSITGLYETRIDLSQLGGDGGPAPGGSGSSGGTLNIEDEYRLHETSKEPDVSLGSTWLSDFPQAWAETGGMGLAVRQAPLIIPLKATSTPVSIKQYPMSQEARLGIKPHIQRLLDQGILVPCQSPWNTPLLPVKKPGTNDYRPVQDLREVNKRVEDIHPTVPNPYNLLSGLPPSHQWYTVLDLKDAFFCLRLHPTSQPLFAFEWRDPEMGISGQLTWTRLPQGFKNSPTLFNEALHRDLADFRIQHPDLILLQYVDDLLLAATSELDCQQGTRALLQTLGNLGYRASAKKAQICQKQVKYLGYLLKEGQRWLTEARKETVMGQPTPKTPRQLREFLGKAGFCRLFIPGFAEMAAPLYPLTKPGTLFNWGPDQQKAYQEIKQALLTAPALGLPDLTKPFELFVDEKQGYAKGVLTQKLGPWRRPVAYLSKKLDPVAAGWPPCLRMVAAIAVLTKDAGKLTMGQPLVILAPHAVEALVKQPPDRWLSNARMTHYQALLLDTDRVQFGPVVALNPATLLPLPEEGLQHNCLDILAEAHGTRPDLTDQPLPDADHTWYTDGSSLLQEGQRKAGAAVTTETEVIWAKALPAGTSAQRAELIALTQALKMAEGKKLNVYTDSRYAFATAHIHGEIYRRRGWLTSEGKEIKNKDEILALLKALFLPKRLSIIHCPGHQKGHSAEARGNRMADQAARKAAITETPDTSTLLIENSSPSGGSKRTADGSEFEAGKRTADGSEFEKRTADGSEFESPKKKAKVE

SEQ ID NO: 7173 - protein, 2094 aa, synthetic construct
MPAAKRVKLDGGDKKYSIGLDIGTNSVGWAVITDEYKVPSKKFKVLGNTDRHSIKKNLIGALLFDSGETAEATRLKRTARRRYTRRKNRICYLQEIFSNEMAKVDDSFFHRLEESFLVEEDKKHERHPIFGNIVDEVAYHEKYPTIYHLRKKLVDSTDKADLRLIYLALAHMIKFRGHFLIEGDLNPDNSDVDKLFIQLVQTYNQLFEENPINASGVDAKAILSARLSKSRRLENLIAQLPGEKKNGLFGNLIALSLGLTPNFKSNFDLAEDAKLQLSKDTYDDDLDNLLAQIGDQYADLFLAAKNLSDAILLSDILRVNTEITKAPLSASMIKRYDEHHQDLTLLKALVRQQLPEKYKEIFFDQSKNGYAGYIDGGASQEEFYKFIKPILEKMDGTEELLVKLNREDLLRKQRTFDNGSIPHQIHLGELHAILRRQEDFYPFLKDNREKIEKILTFRIPYYVGPLARGNSRFAWMTRKSEETITPWNFEEVVDKGASAQSFIERMTNFDKNLPNEKVLPKHSLLYEYFTVYNELTKVKYVTEGMRKPAFLSGEQKKAIVDLLFKTNRKVTVKQLKEDYFKKIECFDSVEISGVEDRFNASLGTYHDLLKIIKDKDFLDNEENEDILEDIVLTLTLFEDREMIEERLKTYAHLFDDKVMKQLKRRRYTGWGRLSRKLINGIRDKQSGKTILDFLKSDGFANRNFMQLIHDDSLTFKEDIQKAQVSGQGDSLHEHIANLAGSPAIKKGILQTVKVVDELVKVMGRHKPENIVIEMARENQTTQKGQKNSRERMKRIEEGIKELGSQILKEHPVENTQLQNEKLYLYYLQNGRDMYVDQELDINRLSDYDVDHIVPQSFLKDDSIDNKVLTRSDKARGKSDNVPSEEVVKKMKNYWRQLLNAKLITQRKFDNLTKAERGGLSELDKAGFIKRQLVETRQITKHVAQILDSRMNTKYDENDKLIREVKVITLKSKLVSDFRKDFQFYKVREINNYHHAHDAYLNAVVGTALIKKYPKLESEFVYGDYKVYDVRKMIAKSEQEIGKATAKYFFYSNIMNFFKTEITLANGEIRKRPLIETNGETGEIVWDKGRDFATVRKVLSMPQVNIVKKTEVQTGGFSKESILPKRNSDKLIARKKDWDPKKYGGFDSPTVAYSVLVVAKVEKGKSKKLKSVKELLGITIMERSSFEKNPIDFLEAKGYKEVKKDLIIKLPKYSLFELENGRKRMLASAGELQKGNELALPSKYVNFLYLASHYEKLKGSPEDNEQKQLFVEQHKHYLDEIIEQISEFSKRVILADANLDKVLSAYNKHRDKPIREQAENIIHLFTLTNLGAPAAFKYFDTTIDRKRYTSTKEVLDATLIHQSITGLYETRIDLSQLGGDGGPAPGGSGSSGGTLNIEDEHRLHETSKEPDVSLGSTWLSDFPQAWAETGGMGLAVRQAPLIIPLKATSTPVSIKQYPMSQEARLGIKPHIQRLLDQGILVPCQSPWNTPLLPVKKPGTNDYRPVQDLREVNKRVEDIHPTVPNPYNLLSGLPPSHQWYTVLDLKDAFFCLRLHPTSQPLFAFEWRDPEMGISGQLTWTRLPQGFKNSPTLFNEALHRDLADFRIQHPDLILLQYVDDLLLAATSELDCQQGTRALLQTLGNLGYRASAKKAQICQKQVKYLGYLLKEGQRWLTEARKETVMGQPTPKTPRQLREFLGTAGFCRLWIPGFAEMAAPLYPLTKPGTLFNWGPDQQKAYQEIKQALLTAPALGLPDLTKPFELFVDEKQGYAKGVLTQKLGPWRRPVAYLSKKLDPVAAGWPPCLRMVAAIAVLTKDAGKLTMGQPLVILAPHAVEALVKQPPDRWLSNARMTHYQALLLDTDRVQFGPVVALNPATLLPLPEEGLQHNCLDILAEAHGTRPDLTDQPLPDADHTWYTDGSSLLQEGQRKAGAAVTTETEVIWAKALPAGTSAQRAELIALTQALKMAEGKKLNVYTDSRYAFATAHIHGEIYRRRGWLTSEGKEIKNKDEILALLKALFLPKRLSIIHCPGHQKGHSAEARGNRMADQAARKAAITETPDTSTLLAGKRTADGSEFEKRTADGSEFESPKKKAKVE

SEQ ID NO: 7174 - protein, 2114 aa, synthetic construct; identical to SEQ ID NO: 7172

SEQ ID NO: 7175 - protein, 2094 aa, synthetic construct
MPAAKRVKLDGGDKKYSIGLDIGTNSVGWAVITDEYKVPSKKFKVLGNTDRHSIKKNLIGALLFDSGETAEATRLKRTARRRYTRRKNRICYLQEIFSNEMAKVDDSFFHRLEESFLVEEDKKHERHPIFGNIVDEVAYHEKYPTIYHLRKKLVDSTDKADLRLIYLALAHMIKFRGHFLIEGDLNPDNSDVDKLFIQLVQTYNQLFEENPINASGVDAKAILSARLSKSRRLENLIAQLPGEKKNGLFGNLIALSLGLTPNFKSNFDLAEDAKLQLSKDTYDDDLDNLLAQIGDQYADLFLAAKNLSDAILLSDILRVNTEITKAPLSASMIKRYDEHHQDLTLLKALVRQQLPEKYKEIFFDQSKNGYAGYIDGGASQEEFYKFIKPILEKMDGTEELLVKLNREDLLRKQRTFDNGSIPHQIHLGELHAILRRQEDFYPFLKDNREKIEKILTFRIPYYVGPLARGNSRFAWMTRKSEETITPWNFEEVVDKGASAQSFIERMTNFDKNLPNEKVLPKHSLLYEYFTVYNELTKVKYVTEGMRKPAFLSGEQKKAIVDLLFKTNRKVTVKQLKEDYFKKIECFDSVEISGVEDRFNASLGTYHDLLKIIKDKDFLDNEENEDILEDIVLTLTLFEDREMIEERLKTYAHLFDDKVMKQLKRRRYTGWGRLSRKLINGIRDKQSGKTILDFLKSDGFANRNFMQLIHDDSLTFKEDIQKAQVSGQGDSLHEHIANLAGSPAIKKGILQTVKVVDELVKVMGRHKPENIVIEMARENQTTQKGQKNSRERMKRIEEGIKELGSQILKEHPVENTQLQNEKLYLYYLQNGRDMYVDQELDINRLSDYDVDHIVPQSFLKDDSIDNKVLTRSDKARGKSDNVPSEEVVKKMKNYWRQLLNAKLITQRKFDNLTKAERGGLSELDKAGFIKRQLVETRQITKHVAQILDSRMNTKYDENDKLIREVKVITLKSKLVSDFRKDFQFYKVREINNYHHAHDAYLNAVVGTALIKKYPKLESEFVYGDYKVYDVRKMIAKSEQEIGKATAKYFFYSNIMNFFKTEITLANGEIRKRPLIETNGETGEIVWDKGRDFATVRKVLSMPQVNIVKKTEVQTGGFSKESILPKRNSDKLIARKKDWDPKKYGGFDSPTVAYSVLVVAKVEKGKSKKLKSVKELLGITIMERSSFEKNPIDFLEAKGYKEVKKDLIIKLPKYSLFELENGRKRMLASAGELQKGNELALPSKYVNFLYLASHYEKLKGSPEDNEQKQLFVEQHKHYLDEIIEQISEFSKRVILADANLDKVLSAYNKHRDKPIREQAENIIHLFTLTNLGAPAAFKYFDTTIDRKRYTSTKEVLDATLIHQSITGLYETRIDLSQLGGDGGPAPGGSGSSGGTLNIEDEHRLHETSKEPDVSLGSTWLSDFPQAWAETGGMGLAVRQAPLIIPLKATSTPVSIKQYPMSQEARLGIKPHIQRLLDQGILVPCQSPWNTPLLPVKKPGTNDYRPVQDLREVNKRVEDIHPTVPNPYNLLSGLPPSHQWYTVLDLKDAFFCLRLHPTSQPLFAFEWRDPEMGISGQLTWTRLPQGFKNSPTLFDEALHRDLADFRIQHPDLILLQYVDDLLLAATSELDCQQGTRALLQTLGNLGYRASAKKAQICQKQVKYLGYLLKEGQRWLTEARKETVMGQPTPKTPRQLREFLGTAGFCRLWIPGFAEMAAPLYPLTKTGTLFNWGPDQQKAYQEIKQALLTAPALGLPDLTKPFELFVDEKQGYAKGVLTQKLGPWRRPVAYLSKKLDPVAAGWPPCLRMVAAIAVLTKDAGKLTMGQPLVILAPHAVEALVKQPPDRWLSNARMTHYQALLLDTDRVQFGPVVALNPATLLPLPEEGLQHNCLDILAEAHGTRPDLTDQPLPDADHTWYTDGSSLLQEGQRKAGAAVTTETEVIWAKALPAGTSAQRAELIALTQALKMAEGKKLNVYTDSRYAFATAHIHGEIYRRRGLLTSEGKEIKNKDEILALLKALFLPKRLSIIHCPGHQKGHSAEARGNRMADQAARKAAITETPDTSTLLAGKRTADGSEFEKRTADGSEFESPKKKAKVE

SEQ ID NO: 7176 - protein, 2094 aa, synthetic construct; identical to SEQ ID NO: 7173

SEQ ID NO: 7177 - protein, 2085 aa, synthetic construct
MPAAKRVKLDGGDKKYSIGLDIGTNSVGWAVITDEYKVPSKKFKVLGNTDRHSIKKNLIGALLFDSGETAEATRLKRTARRRYTRRKNRICYLQEIFSNEMAKVDDSFFHRLEESFLVEEDKKHERHPIFGNIVDEVAYHEKYPTIYHLRKKLVDSTDKADLRLIYLALAHMIKFRGHFLIEGDLNPDNSDVDKLFIQLVQTYNQLFEENPINASGVDAKAILSARLSKSRRLENLIAQLPGEKKNGLFGNLIALSLGLTPNFKSNFDLAEDAKLQLSKDTYDDDLDNLLAQIGDQYADLFLAAKNLSDAILLSDILRVNTEITKAPLSASMIKRYDEHHQDLTLLKALVRQQLPEKYKEIFFDQSKNGYAGYIDGGASQEEFYKFIKPILEKMDGTEELLVKLNREDLLRKQRTFDNGSIPHQIHLGELHAILRRQEDFYPFLKDNREKIEKILTFRIPYYVGPLARGNSRFAWMTRKSEETITPWNFEEVVDKGASAQSFIERMTNFDKNLPNEKVLPKHSLLYEYFTVYNELTKVKYVTEGMRKPAFLSGEQKKAIVDLLFKTNRKVTVKQLKEDYFKKIECFDSVEISGVEDRFNASLGTYHDLLKIIKDKDFLDNEENEDILEDIVLTLTLFEDREMIEERLKTYAHLFDDKVMKQLKRRRYTGWGRLSRKLINGIRDKQSGKTILDFLKSDGFANRNFMQLIHDDSLTFKEDIQKAQVSGQGDSLHEHIANLAGSPAIKKGILQTVKVVDELVKVMGRHKPENIVIEMARENQTTQKGQKNSRERMKRIEEGIKELGSQILKEHPVENTQLQNEKLYLYYLQNGRDMYVDQELDINRLSDYDVDHIVPQSFLKDDSIDNKVLTRSDKARGKSDNVPSEEVVKKMKNYWRQLLNAKLITQRKFDNLTKAERGGLSELDKAGFIKRQLVETRQITKHVAQILDSRMNTKYDENDKLIREVKVITLKSKLVSDFRKDFQFYKVREINNYHHAHDAYLNAVVGTALIKKYPKLESEFVYGDYKVYDVRKMIAKSEQEIGKATAKYFFYSNIMNFFKTEITLANGEIRKRPLIETNGETGEIVWDKGRDFATVRKVLSMPQVNIVKKTEVQTGGFSKESILPKRNSDKLIARKKDWDPKKYGGFDSPTVAYSVLVVAKVEKGKSKKLKSVKELLGITIMERSSFEKNPIDFLEAKGYKEVKKDLIIKLPKYSLFELENGRKRMLASAGELQKGNELALPSKYVNFLYLASHYEKLKGSPEDNEQKQLFVEQHKHYLDEIIEQISEFSKRVILADANLDKVLSAYNKHRDKPIREQAENIIHLFTLTNLGAPAAFKYFDTTIDRKRYTSTKEVLDATLIHQSITGLYETRIDLSQLGGDGGPAPGGSGSSGGIPWLMKKPLQLTTLVPLQEYEERLLKQTMLTGSYKEKLQSLFLKYDALWQHWENQVGHRRIKPHHIATGTVNPRPQKQYPINPKAKASIQTVINDLLKQGVLIQQNSIMNTPVYPVPKPDGKWRMVLDYREVNKTIPLIAAQNQHSAGILSSIFRGKYKTTLDLSNGFWAHSITPESYWLTAFTWLGQQYCWTRLPQGFLNSPALFNADVVDLLKEVPNVQVYVDDIYISHDDPREHLEQLEKVFSLLLNAGYVVSLKKSEIAQHEVEFLGFNITKEGRGLTETFKQKLLNITPPRDLKQLQSILGKLNFARNFIPNFSELVKPLYNIIATAPGKYITWTTDNSQQLQNIISMLNSAENLEERNPEVRLIMKVNTSPSAGYIRFYNEFAKRPIMYLNYVYTKAEVKFTNTEKLLTTIHKGLIKALDLGMGQEILVYSPIVSMTKIQKTPLPERKALPIRWITWMSYLEDPRIQFHYDKTLPELQQVPTVTDDIIAKIKHPSEFSMVFYTDGSAIKHPNVNKSHNAGMGIAQVQFKPEFTVINTWSIPLGDHTAQLAEVAAVEFACKKALKIDGPVLIVTDSFYVAESVNKELPYWQSNGFFNNKKKPLKHVSKWKSIADCIQLKPDIIIIHEKGHQPTASTFHTEGNNLADKLATQGSYVVNAGKRTADGSEFEKRTADGSEFESPKKKAKVE

SEQ ID NO: 7178 - protein, 2092 aa, synthetic construct
MPAAKRVKLDGGDKKYSIGLDIGTNSVGWAVITDEYKVPSKKFKVLGNTDRHSIKKNLIGALLFDSGETAEATRLKRTARRRYTRRKNRICYLQEIFSNEMAKVDDSFFHRLEESFLVEEDKKHERHPIFGNIVDEVAYHEKYPTIYHLRKKLVDSTDKADLRLIYLALAHMIKFRGHFLIEGDLNPDNSDVDKLFIQLVQTYNQLFEENPINASGVDAKAILSARLSKSRRLENLIAQLPGEKKNGLFGNLIALSLGLTPNFKSNFDLAEDAKLQLSKDTYDDDLDNLLAQIGDQYADLFLAAKNLSDAILLSDILRVNTEITKAPLSASMIKRYDEHHQDLTLLKALVRQQLPEKYKEIFFDQSKNGYAGYIDGGASQEEFYKFIKPILEKMDGTEELLVKLNREDLLRKQRTFDNGSIPHQIHLGELHAILRRQEDFYPFLKDNREKIEKILTFRIPYYVGPLARGNSRFAWMTRKSEETITPWNFEEVVDKGASAQSFIERMTNFDKNLPNEKVLPKHSLLYEYFTVYNELTKVKYVTEGMRKPAFLSGEQKKAIVDLLFKTNRKVTVKQLKEDYFKKIECFDSVEISGVEDRFNASLGTYHDLLKIIKDKDFLDNEENEDILEDIVLTLTLFEDREMIEERLKTYAHLFDDKVMKQLKRRRYTGWGRLSRKLINGIRDKQSGKTILDFLKSDGFANRNFMQLIHDDSLTFKEDIQKAQVSGQGDSLHEHIANLAGSPAIKKGILQTVKVVDELVKVMGRHKPENIVIEMARENQTTQKGQKNSRERMKRIEEGIKELGSQILKEHPVENTQLQNEKLYLYYLQNGRDMYVDQELDINRLSDYDVDHIVPQSFLKDDSIDNKVLTRSDKARGKSDNVPSEEVVKKMKNYWRQLLNAKLITQRKFDNLTKAERGGLSELDKAGFIKRQLVETRQITKHVAQILDSRMNTKYDENDKLIREVKVITLKSKLVSDFRKDFQFYKVREINNYHHAHDAYLNAVVGTALIKKYPKLESEFVYGDYKVYDVRKMIAKSEQEIGKATAKYFFYSNIMNFFKTEITLANGEIRKRPLIETNGETGEIVWDKGRDFATVRKVLSMPQVNIVKKTEVQTGGFSKESILPKRNSDKLIARKKDWDPKKYGGFDSPTVAYSVLVVAKVEKGKSKKLKSVKELLGITIMERSSFEKNPIDFLEAKGYKEVKKDLIIKLPKYSLFELENGRKRMLASAGELQKGNELALPSKYVNFLYLASHYEKLKGSPEDNEQKQLFVEQHKHYLDEIIEQISEFSKRVILADANLDKVLSAYNKHRDKPIREQAENIIHLFTLTNLGAPAAFKYFDTTIDRKRYTSTKEVLDATLIHQSITGLYETRIDLSQLGGDGGPAPGGSGSSGGVLNLEEEYRLHEKPVPSSIDPSWLQLFPTVWAERAGMGLANQVPPVVVELRSGASPVAVRQYPMSKEAREGIRPHIQRFLDLGVLVPCQSPWNTPLLPVKKPGTNDYRPVQDLREINKRVQDIHPTVPNPYNLLSSLPPSHTWYSVLDLKDAFFCLKLHPNSQPLFAFEWRDPEKGNTGQLTWTRLPQGFKNSPTLFNEALHRDLAPFRALNPQVVLLQYVDDLLVAAPTYRDCKEGTQKLLQELSKLGYRVSAKKAQLCQKEVTYLGYLLKEGKRWLTPARKATVMKIPPPTTPRQVREFLGTAGFCRLWIPGFASLAAPLYPLTKPSIPFIWTEEHQKAFDRIKEALLSAPALALPDLTKPFTLYVDERAGVARGVLTQTLGPWRRPVAYLSKKLDPVASGWPTCLKAVAAVALLLKDADKLTLGQNVTVIASHSLESIVRQPPDRWMTNARMTHYQSLLLNERVSFAPPAVLNPATLLPVESEATPVHRCSEILAEETGTRRDLKDQPLPGVPAWYTDGSSFIAEGKRRAGAAIVDGKRTVWASSLPEGTSAQKAELVALTQALRLAEGKDINIYTDSRYAFATAHIHGAIYKQRGWLTSAGKDIKNKEEILALLEAIHLPKRVAIIHCPGHQKGNDPVATGNRRADEAAKQAALSTRVLAETTKPAGKRTADGSEFEKRTADGSEFESPKKKAKVE

SEQ ID NO: 7179 - protein, 2094 aa, synthetic construct
MPAAKRVKLDGGDKKYSIGLDIGTNSVGWAVITDEYKVPSKKFKVLGNTDRHSIKKNLIGALLFDSGETAEATRLKRTARRRYTRRKNRICYLQEIFSNEMAKVDDSFFHRLEESFLVEEDKKHERHPIFGNIVDEVAYHEKYPTIYHLRKKLVDSTDKADLRLIYLALAHMIKFRGHFLIEGDLNPDNSDVDKLFIQLVQTYNQLFEENPINASGVDAKAILSARLSKSRRLENLIAQLPGEKKNGLFGNLIALSLGLTPNFKSNFDLAEDAKLQLSKDTYDDDLDNLLAQIGDQYADLFLAAKNLSDAILLSDILRVNTEITKAPLSASMIKRYDEHHQDLTLLKALVRQQLPEKYKEIFFDQSKNGYAGYIDGGASQEEFYKFIKPILEKMDGTEELLVKLNREDLLRKQRTFDNGSIPHQIHLGELHAILRRQEDFYPFLKDNREKIEKILTFRIPYYVGPLARGNSRFAWMTRKSEETITPWNFEEVVDKGASAQSFIERMTNFDKNLPNEKVLPKHSLLYEYFTVYNELTKVKYVTEGMRKPAFLSGEQKKAIVDLLFKTNRKVTVKQLKEDYFKKIECFDSVEISGVEDRFNASLGTYHDLLKIIKDKDFLDNEENEDILEDIVLTLTLFEDREMIEERLKTYAHLFDDKVMKQLKRRRYTGWGRLSRKLINGIRDKQSGKTILDFLKSDGFANRNFMQLIHDDSLTFKEDIQKAQVSGQGDSLHEHIANLAGSPAIKKGILQTVKVVDELVKVMGRHKPENIVIEMARENQTTQKGQKNSRERMKRIEEGIKELGSQILKEHPVENTQLQNEKLYLYYLQNGRDMYVDQELDINRLSDYDVDHIVPQSFLKDDSIDNKVLTRSDKARGKSDNVPSEEVVKKMKNYWRQLLNAKLITQRKFDNLTKAERGGLSELDKAGFIKRQLVETRQITKHVAQILDSRMNTKYDENDKLIREVKVITLKSKLVSDFRKDFQFYKVREINNYHHAHDAYLNAVVGTALIKKYPKLESEFVYGDYKVYDVRKMIAKSEQEIGKATAKYFFYSNIMNFFKTEITLANGEIRKRPLIETNGETGEIVWDKGRDFATVRKVLSMPQVNIVKKTEVQTGGFSKESILPKRNSDKLIARKKDWDPKKYGGFDSPTVAYSVLVVAKVEKGKSKKLKSVKELLGITIMERSSFEKNPIDFLEAKGYKEVKKDLIIKLPKYSLFELENGRKRMLASAGELQKGNELALPSKYVNFLYLASHYEKLKGSPEDNEQKQLFVEQHKHYLDEIIEQISEFSKRVILADANLDKVLSAYNKHRDKPIREQAENIIHLFTLTNLGAPAAFKYFDTTIDRKRYTSTKEVLDATLIHQSITGLYETRIDLSQLGGDGGPAPGGSGSSGGTLNIEDEYRLHETSKEPDVPLGSTWLSDFPQAWAETGGMGLAVRQAPLIIPLKATSTPVSIKQYPMSQEARLGIKPHIQRLLDQGILVPCQSPWNTPLLPVKKPGTNDYRPVQDLREVNKRVEDIHPTVPNPYNLLSGLPPSHQWYTVLDLKDAFFCLRLHPTSQPLFAFEWRDPEMGISGQLTWTRLPQGFKNSPTLFNEALHRDLADFRIQHPDLILLQYVDDLLLAATSEQDCQRGTRALLQTLGNLGYRASAKKAQICQKQVKYLGYLLKEGQRWLTEARKETVMGQPTPKTPRQLREFLGTAGFCRLWIPGFAEMAAPLYPLTKPGTLFNWGPDQQKAYQEIKQALLTAPALGLPDLTKPFELFVDEKQGYAKGVLTQKLGPWRRPVAYLSKKLDPVAAGWPPCLRMVAAIAVLTKDAGKLTMGQPLVILAPHAVEALVKQPPDRWLSNARMTHYQAMLLDTDRVQFGPVVALNPATLLPLPEKEAPHDCLEILAETHGTRPDLTDQPIPDADYTWYTDGSSFLQEGQRRAGAAVTTETEVIWARALPAGTSAQRAELIALTQALKMAEGKKLNVYTDSRYAFATAHVHGEIYRRRGWLTSEGREIKNKNEILALLKALFLPKRLSIIHCPGHQKGNSAEARGNRMADQAAREAAMKAVLETSTLLAGKRTADGSEFEKRTADGSEFESPKKKAKVE

SEQ ID NO: 7180 - protein, 2094 aa, synthetic construct
MPAAKRVKLDGGDKKYSIGLDIGTNSVGWAVITDEYKVPSKKFKVLGNTDRHSIKKNLIGALLFDSGETAEATRLKRTARRRYTRRKNRICYLQEIFSNEMAKVDDSFFHRLEESFLVEEDKKHERHPIFGNIVDEVAYHEKYPTIYHLRKKLVDSTDKADLRLIYLALAHMIKFRGHFLIEGDLNPDNSDVDKLFIQLVQTYNQLFEENPINASGVDAKAILSARLSKSRRLENLIAQLPGEKKNGLFGNLIALSLGLTPNFKSNFDLAEDAKLQLSKDTYDDDLDNLLAQIGDQYADLFLAAKNLSDAILLSDILRVNTEITKAPLSASMIKRYDEHHQDLTLLKALVRQQLPEKYKEIFFDQSKNGYAGYIDGGASQEEFYKFIKPILEKMDGTEELLVKLNREDLLRKQRTFDNGSIPHQIHLGELHAILRRQEDFYPFLKDNREKIEKILTFRIPYYVGPLARGNSRFAWMTRKSEETITPWNFEEVVDKGASAQSFIERMTNFDKNLPNEKVLPKHSLLYEYFTVYNELTKVKYVTEGMRKPAFLSGEQKKAIVDLLFKTNRKVTVKQLKEDYFKKIECFDSVEISGVEDRFNASLGTYHDLLKIIKDKDFLDNEENEDILEDIVLTLTLFEDREMIEERLKTYAHLFDDKVMKQLKRRRYTGWGRLSRKLINGIRDKQSGKTILDFLKSDGFANRNFMQLIHDDSLTFKEDIQKAQVSGQGDSLHEHIANLAGSPAIKKGILQTVKVVDELVKVMGRHKPENIVIEMARENQTTQKGQKNSRERMKRIEEGIKELGSQILKEHPVENTQLQNEKLYLYYLQNGRDMYVDQELDINRLSDYDVDHIVPQSFLKDDSIDNKVLTRSDKARGKSDNVPSEEVVKKMKNYWRQLLNAKLITQRKFDNLTKAERGGLSELDKAGFIKRQLVETRQITKHVAQILDSRMNTKYDENDKLIREVKVITLKSKLVSDFRKDFQFYKVREINNYHHAHDAYLNAVVGTALIKKYPKLESEFVYGDYKVYDVRKMIAKSEQEIGKATAKYFFYSNIMNFFKTEITLANGEIRKRPLIETNGETGEIVWDKGRDFATVRKVLSMPQVNIVKKTEVQTGGFSKESILPKRNSDKLIARKKDWDPKKYGGFDSPTVAYSVLVVAKVEKGKSKKLKSVKELLGITIMERSSFEKNPIDFLEAKGYKEVKKDLIIKLPKYSLFELENGRKRMLASAGELQKGNELALPSKYVNFLYLASHYEKLKGSPEDNEQKQLFVEQHKHYLDEIIEQISEFSKRVILADANLDKVLSAYNKHRDKPIREQAENIIHLFTLTNLGAPAAFKYFDTTIDRKRYTSTKEVLDATLIHQSITGLYETRIDLSQLGGDGGPAPGGSGSSGGTLNIEDEYRLHETSKEPDVPLGSTWLSDFPQAWAETGGMGLAVRQAPLIIPLKATSTPVSIKQYPMSQEARLGIKPHIQRLLDQGILVPCQSPWNTPLLPVKKPGTNDYRPVQDLREVNKRVEDIHPTVPNPYNLLSGLPPSHQWYTVLDLKDAFFCLRLHPTSQPLFAFEWRDPEMGISGQLTWTRLPQGFKNSPTLFNEALHRDLADFRIQHPDLILLQYVDDLLLAATSEQDCQRGTRALLQTLGNLGYRASAKKAQICQKQVKYLGYLLKEGQRWLTEARKETVMGQPTPKTPRQLREFLGKAGFCRLFIPGFAEMAAPLYPLTKPGTLFNWGPDQQKAYQEIKQALLTAPALGLPDLTKPFELFVDEKQGYAKGVLTQKLGPWRRPVAYLSKKLDPVAAGWPPCLRMVAAIAVLTKDAGKLTMGQPLVILAPHAVEALVKQPPDRWLSNARMTHYQAMLLDTDRVQFGPVVALNPATLLPLPEKEAPHDCLEILAETHGTRPDLTDQPIPDADYTWYTDGSSFLQEGQRRAGAAVTTETEVIWARALPAGTSAQRAELIALTQALKMAEGKKLNVYTDSRYAFATAHVHGEIYRRRGWLTSEGREIKNKNEILALLKALFLPKRLSIIHCPGHQKGNSAEARGNRMADQAAREAAMKAVLETSTLLAGKRTADGSEFEKRTADGSEFESPKKKAKVE

SEQ ID NO: 7181 - protein, 2096 aa, synthetic construct
MPAAKRVKLDGGDKKYSIGLDIGTNSVGWAVITDEYKVPSKKFKVLGNTDRHSIKKNLIGALLFDSGETAEATRLKRTARRRYTRRKNRICYLQEIFSNEMAKVDDSFFHRLEESFLVEEDKKHERHPIFGNIVDEVAYHEKYPTIYHLRKKLVDSTDKADLRLIYLALAHMIKFRGHFLIEGDLNPDNSDVDKLFIQLVQTYNQLFEENPINASGVDAKAILSARLSKSRRLENLIAQLPGEKKNGLFGNLIALSLGLTPNFKSNFDLAEDAKLQLSKDTYDDDLDNLLAQIGDQYADLFLAAKNLSDAILLSDILRVNTEITKAPLSASMIKRYDEHHQDLTLLKALVRQQLPEKYKEIFFDQSKNGYAGYIDGGASQEEFYKFIKPILEKMDGTEELLVKLNREDLLRKQRTFDNGSIPHQIHLGELHAILRRQEDFYPFLKDNREKIEKILTFRIPYYVGPLARGNSRFAWMTRKSEETITPWNFEEVVDKGASAQSFIERMTNFDKNLPNEKVLPKHSLLYEYFTVYNELTKVKYVTEGMRKPAFLSGEQKKAIVDLLFKTNRKVTVKQLKEDYFKKIECFDSVEISGVEDRFNASLGTYHDLLKIIKDKDFLDNEENEDILEDIVLTLTLFEDREMIEERLKTYAHLFDDKVMKQLKRRRYTGWGRLSRKLINGIRDKQSGKTILDFLKSDGFANRNFMQLIHDDSLTFKEDIQKAQVSGQGDSLHEHIANLAGSPAIKKGILQTVKVVDELVKVMGRHKPENIVIEMARENQTTQKGQKNSRERMKRIEEGIKELGSQILKEHPVENTQLQNEKLYLYYLQNGRDMYVDQELDINRLSDYDVDHIVPQSFLKDDSIDNKVLTRSDKARGKSDNVPSEEVVKKMKNYWRQLLNAKLITQRKFDNLTKAERGGLSELDKAGFIKRQLVETRQITKHVAQILDSRMNTKYDENDKLIREVKVITLKSKLVSDFRKDFQFYKVREINNYHHAHDAYLNAVVGTALIKKYPKLESEFVYGDYKVYDVRKMIAKSEQEIGKATAKYFFYSNIMNFFKTEITLANGEIRKRPLIETNGETGEIVWDKGRDFATVRKVLSMPQVNIVKKTEVQTGGFSKESILPKRNSDKLIARKKDWDPKKYGGFDSPTVAYSVLVVAKVEKGKSKKLKSVKELLGITIMERSSFEKNPIDFLEAKGYKEVKKDLIIKLPKYSLFELENGRKRMLASAGELQKGNELALPSKYVNFLYLASHYEKLKGSPEDNEQKQLFVEQHKHYLDEIIEQISEFSKRVILADANLDKVLSAYNKHRDKPIREQAENIIHLFTLTNLGAPAAFKYFDTTIDRKRYTSTKEVLDATLIHQSITGLYETRIDLSQLGGDGGPAPGSSGGSGGTAPLEEEYRLFLEAPIQNVTLLEQWKREIPKVWAEINPPGLASTQAPIHVQLLSTALPVRVRQYPITLEAKRSLRETIRKFRAAGILRPVHSPWNTPLLPVRKSGTSEYRMVQDLREVNKRVETIHPTVPNPYTLLSLLPPDRIWYSVLDLKDAFFCIPLAPESQLIFAFEWADAEEGESGQLTWTRLPQGFKNSPTLFNEALNRDLQGFRLDHPSVSLLQYVDDLLIAADTQAACLSATRDLLMTLAELGYRVSGKKAQLCQEEVTYLGFKIHKGSRSLSNSRTQAILQIPVPKTKRQVREFLGTIGYCRLWIPGFAELAQPLYAATRPGNDPLVWGEKEEEAFQSLKLALTQPPALALPSLDKPFQLFVEETSGAAKGVLTQALGPWKRPVAYLSKRLDPVAAGWPRCLRAIAAAALLTREASKLTFGQDIEITSSHNLESLLRSPPDKWLTNARITQYQVLLLDPPRVRFKQTAALNPATLLPETDDTLPIHHCLDTLDSLTSTRPDLTDQPLAQAEATLFTDGSSYIRDGKRYAGAAVVTLDSVIWAEPLPIGTSAQKAELIALTKALEWSKDKSVNIYTDSRYAFATLHVHGMIYRERGWLTAGGKAIKNAPEILALLTAVWLPKRVAVMHCKGHQKDDAPTSTGNRRADEVAREVAIRPLSTQATISAGKRTADGSEFEKRTADGSEFESPKKKAKVE

SEQ ID NO: 7182 - protein, 2093 aa, synthetic construct
MPAAKRVKLDGGDKKYSIGLDIGTNSVGWAVITDEYKVPSKKFKVLGNTDRHSIKKNLIGALLFDSGETAEATRLKRTARRRYTRRKNRICYLQEIFSNEMAKVDDSFFHRLEESFLVEEDKKHERHPIFGNIVDEVAYHEKYPTIYHLRKKLVDSTDKADLRLIYLALAHMIKFRGHFLIEGDLNPDNSDVDKLFIQLVQTYNQLFEENPINASGVDAKAILSARLSKSRRLENLIAQLPGEKKNGLFGNLIALSLGLTPNFKSNFDLAEDAKLQLSKDTYDDDLDNLLAQIGDQYADLFLAAKNLSDAILLSDILRVNTEITKAPLSASMIKRYDEHHQDLTLLKALVRQQLPEKYKEIFFDQSKNGYAGYIDGGASQEEFYKFIKPILEKMDGTEELLVKLNREDLLRKQRTFDNGSIPHQIHLGELHAILRRQEDFYPFLKDNREKIEKILTFRIPYYVGPLARGNSRFAWMTRKSEETITPWNFEEVVDKGASAQSFIERMTNFDKNLPNEKVLPKHSLLYEYFTVYNELTKVKYVTEGMRKPAFLSGEQKKAIVDLLFKTNRKVTVKQLKEDYFKKIECFDSVEISGVEDRFNASLGTYHDLLKIIKDKDFLDNEENEDILEDIVLTLTLFEDREMIEERLKTYAHLFDDKVMKQLKRRRYTGWGRLSRKLINGIRDKQSGKTILDFLKSDGFANRNFMQLIHDDSLTFKEDIQKAQVSGQGDSLHEHIANLAGSPAIKKGILQTVKVVDELVKVMGRHKPENIVIEMARENQTTQKGQKNSRERMKRIEEGIKELGSQILKEHPVENTQLQNEKLYLYYLQNGRDMYVDQELDINRLSDYDVDHIVPQSFLKDDSIDNKVLTRSDKARGKSDNVPSEEVVKKMKNYWRQLLNAKLITQRKFDNLTKAERGGLSELDKAGFIKRQLVETRQITKHVAQILDSRMNTKYDENDKLIREVKVITLKSKLVSDFRKDFQFYKVREINNYHHAHDAYLNAVVGTALIKKYPKLESEFVYGDYKVYDVRKMIAKSEQEIGKATAKYFFYSNIMNFFKTEITLANGEIRKRPLIETNGETGEIVWDKGRDFATVRKVLSMPQVNIVKKTEVQTGGFSKESILPKRNSDKLIARKKDWDPKKYGGFDSPTVAYSVLVVAKVEKGKSKKLKSVKELLGITIMERSSFEKNPIDFLEAKGYKEVKKDLIIKLPKYSLFELENGRKRMLASAGELQKGNELALPSKYVNFLYLASHYEKLKGSPEDNEQKQLFVEQHKHYLDEIIEQISEFSKRVILADANLDKVLSAYNKHRDKPIREQAENIIHLFTLTNLGAPAAFKYFDTTIDRKRYTSTKEVLDATLIHQSITGLYETRIDLSQLGGDGGPAPGSSGGSGGTLQLEEEYRLFEPESTQKQEMDIWLKNFPQAWAETGGMGTAHCQAPVLIQLKATATPISIRQYPMPHEAYQGIKPHIRRMLDQGILKPCQSPWNTPLLPVKKPGTEDYRPVQDLREVNKRVEDIHPTVPNPYNLLSTLPPSHPWYTVLDLKDAFFCLRLHSESQLLFAFEWRDPEIGLSGQLTWTRLPQGFKNSPTLFNEALHSDLADFRVRYPALVLLQYVDDLLLAAATRTECLEGTKALLETLGNKGYRASAKKAQICLQEVTYLGYSLKDGQRWLTKARKEAILSIPVPKNSRQVREFLGTAGYCRLWIPGFAELAAPLYPLTRPGTLFQWGTEQQLAFEDIKKALLSSPALGLPDITKPFELFIDENSGFAKGVLVQKLGPWKRPVAYLSKKLDTVASGWPPCLRMVAAIAILVKDAGKLTLGQPLTILTSHPVEALVRQPPNKWLSNARMTHYQAMLLDAERVHFGPTVSLNPATLLPLPSGGNHHDCLQILAETHGTRPDLTDQPLPDADLTWYTDGSSFIRNGEREAGAAVTTESEVIWAAPLPPGTSAQRAELIALTQALKMAEGKKLTVYTDSRYAFATTHVHGEIYRRRGWLTSEGKEIKNKNEILALLEALFLPKRLSIIHCPGHQKGDSPQAKGNRLADDTAKKAATETHSSLTVLPAGKRTADGSEFEKRTADGSEFESPKKKAKVE

SEQ ID NO: 7183 - protein, 2216 aa, synthetic construct
MPAAKRVKLDGGDKKYSIGLDIGTNSVGWAVITDEYKVPSKKFKVLGNTDRHSIKKNLIGALLFDSGETAEATRLKRTARRRYTRRKNRICYLQEIFSNEMAKVDDSFFHRLEESFLVEEDKKHERHPIFGNIVDEVAYHEKYPTIYHLRKKLVDSTDKADLRLIYLALAHMIKFRGHFLIEGDLNPDNSDVDKLFIQLVQTYNQLFEENPINASGVDAKAILSARLSKSRRLENLIAQLPGEKKNGLFGNLIALSLGLTPNFKSNFDLAEDAKLQLSKDTYDDDLDNLLAQIGDQYADLFLAAKNLSDAILLSDILRVNTEITKAPLSASMIKRYDEHHQDLTLLKALVRQQLPEKYKEIFFDQSKNGYAGYIDGGASQEEFYKFIKPILEKMDGTEELLVKLNREDLLRKQRTFDNGSIPHQIHLGELHAILRRQEDFYPFLKDNREKIEKILTFRIPYYVGPLARGNSRFAWMTRKSEETITPWNFEEVVDKGASAQSFIERMTNFDKNLPNEKVLPKHSLLYEYFTVYNELTKVKYVTEGMRKPAFLSGEQKKAIVDLLFKTNRKVTVKQLKEDYFKKIECFDSVEISGVEDRFNASLGTYHDLLKIIKDKDFLDNEENEDILEDIVLTLTLFEDREMIEERLKTYAHLFDDKVMKQLKRRRYTGWGRLSRKLINGIRDKQSGKTILDFLKSDGFANRNFMQLIHDDSLTFKEDIQKAQVSGQGDSLHEHIANLAGSPAIKKGILQTVKVVDELVKVMGRHKPENIVIEMARENQTTQKGQKNSRERMKRIEEGIKELGSQILKEHPVENTQLQNEKLYLYYLQNGRDMYVDQELDINRLSDYDVDHIVPQSFLKDDSIDNKVLTRSDKARGKSDNVPSEEVVKKMKNYWRQLLNAKLITQRKFDNLTKAERGGLSELDKAGFIKRQLVETRQITKHVAQILDSRMNTKYDENDKLIREVKVITLKSKLVSDFRKDFQFYKVREINNYHHAHDAYLNAVVGTALIKKYPKLESEFVYGDYKVYDVRKMIAKSEQEIGKATAKYFFYSNIMNFFKTEITLANGEIRKRPLIETNGETGEIVWDKGRDFATVRKVLSMPQVNIVKKTEVQTGGFSKESILPKRNSDKLIARKKDWDPKKYGGFDSPTVAYSVLVVAKVEKGKSKKLKSVKELLGITIMERSSFEKNPIDFLEAKGYKEVKKDLIIKLPKYSLFELENGRKRMLASAGELQKGNELALPSKYVNFLYLASHYEKLKGSPEDNEQKQLFVEQHKHYLDEIIEQISEFSKRVILADANLDKVLSAYNKHRDKPIREQAENIIHLFTLTNLGAPAAFKYFDTTIDRKRYTSTKEVLDATLIHQSITGLYETRIDLSQLGGDGGPAPGSSGGSGGTLGDQGSRGSDPLPEPRVTLTVEGIPTEFLVNTGAEHSVLTKPMGKMGSKRTVVAGATGSKVYPWTTKRLLKIGQKQVTHSFLVIPECPAPLLGRDLLTKLKAQIQFSTEGPQVTWEDRPAMCLVLNLEEEYRLHEKPVPPSIDPSWLQLFPMVWAEKAGMGLANQVPPVVVELKSDASPVAVRQYPMSKEAREGIRPHIQRFLDLGILVPCQSPWNTPLLPVKKPGTNDYRPVQDLREVNKRVQDIHPTVPNPYNLLSSLPPSHTWYSVLDLKDAFFCLKLHPNSQPLFAFEWRDPEKGNTGQLTWTRLPQGFKNSPTLFDEALHRDLASFRALNPQVVMLQYVDDLLVAAPTYRDCKEGTRRLLQELSKLGYRVSAKKAQLCREEVTYLGYLLKGGKRWLTPARKATVMKIPTPTTPRQVREFLGTAGFCRLWIPGFASLAAPLYPLTREKVPFTWTEAHQEAFGRIKEALLSAPALALPDLTKPFALYVDEKEGVARGVLTQTLGPWRRPVAYLSKKLDPVASGWPTCLKAIAAVALLLKDADKLTLGQNVLVIAPHNLESIVRQPPDRWMTNARMTHYQSLLLNERVSFAPPAILNPATLLPVESDDTPIHICSEILAEETGTRPDLRDQPLPGVPAWYTDGSSFIMDGRRQAGAAIVDNKRTVWASNLPEGTSAQKAELIALTQALRLAEGKSINIYTDSRYAFATAHVHGAIYKQRGLLTSAGKDIKNKEEILALLEAIHLPKRVAIIHCPGHQRGTDPVATGNRKADEAAKQAAQSTRILTETTKNAGKRTADGSEFEKRTADGSEFESPKKKAKVE

SEQ ID NO: 7184 - protein, 2216 aa, synthetic construct
MPAAKRVKLDGGDKKYSIGLDIGTNSVGWAVITDEYKVPSKKFKVLGNTDRHSIKKNLIGALLFDSGETAEATRLKRTARRRYTRRKNRICYLQEIFSNEMAKVDDSFFHRLEESFLVEEDKKHERHPIFGNIVDEVAYHEKYPTIYHLRKKLVDSTDKADLRLIYLALAHMIKFRGHFLIEGDLNPDNSDVDKLFIQLVQTYNQLFEENPINASGVDAKAILSARLSKSRRLENLIAQLPGEKKNGLFGNLIALSLGLTPNFKSNFDLAEDAKLQLSKDTYDDDLDNLLAQIGDQYADLFLAAKNLSDAILLSDILRVNTEITKAPLSASMIKRYDEHHQDLTLLKALVRQQLPEKYKEIFFDQSKNGYAGYIDGGASQEEFYKFIKPILEKMDGTEELLVKLNREDLLRKQRTFDNGSIPHQIHLGELHAILRRQEDFYPFLKDNREKIEKILTFRIPYYVGPLARGNSRFAWMTRKSEETITPWNFEEVVDKGASAQSFIERMTNFDKNLPNEKVLPKHSLLYEYFTVYNELTKVKYVTEGMRKPAFLSGEQKKAIVDLLFKTNRKVTVKQLKEDYFKKIECFDSVEISGVEDRFNASLGTYHDLLKIIKDKDFLDNEENEDILEDIVLTLTLFEDREMIEERLKTYAHLFDDKVMKQLKRRRYTGWGRLSRKLINGIRDKQSGKTILDFLKSDGFANRNFMQLIHDDSLTFKEDIQKAQVSGQGDSLHEHIANLAGSPAIKKGILQTVKVVDELVKVMGRHKPENIVIEMARENQTTQKGQKNSRERMKRIEEGIKELGSQILKEHPVENTQLQNEKLYLYYLQNGRDMYVDQELDINRLSDYDVDHIVPQSFLKDDSIDNKVLTRSDKARGKSDNVPSEEVVKKMKNYWRQLLNAKLITQRKFDNLTKAERGGLSELDKAGFIKRQLVETRQITKHVAQILDSRMNTKYDENDKLIREVKVITLKSKLVSDFRKDFQFYKVREINNYHHAHDAYLNAVVGTALIKKYPKLESEFVYGDYKVYDVRKMIAKSEQEIGKATAKYFFYSNIMNFFKTEITLANGEIRKRPLIETNGETGEIVWDKGRDFATVRKVLSMPQVNIVKKTEVQTGGFSKESILPKRNSDKLIARKKDWDPKKYGGFDSPTVAYSVLVVAKVEKGKSKKLKSVKELLGITIMERSSFEKNPIDFLEAKGYKEVKKDLIIKLPKYSLFELENGRKRMLASAGELQKGNELALPSKYVNFLYLASHYEKLKGSPEDNEQKQLFVEQHKHYLDEIIEQISEFSKRVILADANLDKVLSAYNKHRDKPIREQAENIIHLFTLTNLGAPAAFKYFDTTIDRKRYTSTKEVLDATLIHQSITGLYETRIDLSQLGGDGGPAPGSSGGSGGTLGDQGSRGSDPLPEPRVTLTVEGIPTEFLVNTGAEHSVLTKPMGKMGSKRTVVAGATGSKVYPWTTKRLLKIGQKQVTHSFLVIPECPAPLLGRDLLTKLKAQIQFSTEGPQVTWEDRPAMCLVLNLEEEYRLHEKPVPPSIDPSWLQLFPMVWAEKAGMGLANQVPPVVVELKSDASPVAVRQYPMSKEAREGIRPHIQRFLDLGILVPCQSPWNTPLLPVKKPGTNDYRPVQDLREVNKRVQDIHPTVPNPYNLLSSLPPSHTWYSVLDLKDAFFCLKLHPNSQPLFAFEWRDPEKGNTGQLTWTRLPQGFKNSPTLFNEALHRDLASFRALNPQVVMLQYVDDLLVAAPTYRDCKEGTRRLLQELSKLGYRVSAKKAQLCREEVTYLGYLLKGGKRWLTPARKATVMKIPTPTTPRQVREFLGKAGFCRLFIPGFASLAAPLYPLTRPKVPFTWTEAHQEAFGRIKEALLSAPALALPDLTKPFALYVDEKEGVARGVLTQTLGPWRRPVAYLSKKLDPVASGWPTCLKAIAAVALLLKDADKLTLGQNVLVIAPHNLESIVRQPPDRWMTNARMTHYQSLLLNERVSFAPPAILNPATLLPVESDDTPIHICSEILAEETGTRPDLRDQPLPGVPAWYTDGSSFIMDGRRQAGAAIVDNKRTVWASNLPEGTSAQKAELIALTQALRLAEGKSINIYTDSRYAFATAHVHGAIYKQRGWLTSAGKDIKNKEEILALLEAIHLPKRVAIIHCPGHQRGTDPVATGNRKADEAAKQAAQSTRILTETTKNAGKRTADGSEFEKRTADGSEFESPKKKAKVE

SEQ ID NO: 7185 - protein, 2094 aa, synthetic construct
MPAAKRVKLDGGDKKYSIGLDIGTNSVGWAVITDEYKVPSKKFKVLGNTDRHSIKKNLIGALLFDSGETAEATRLKRTARRRYTRRKNRICYLQEIFSNEMAKVDDSFFHRLEESFLVEEDKKHERHPIFGNIVDEVAYHEKYPTIYHLRKKLVDSTDKADLRLIYLALAHMIKFRGHFLIEGDLNPDNSDVDKLFIQLVQTYNQLFEENPINASGVDAKAILSARLSKSRRLENLIAQLPGEKKNGLFGNLIALSLGLTPNFKSNFDLAEDAKLQLSKDTYDDDLDNLLAQIGDQYADLFLAAKNLSDAILLSDILRVNTEITKAPLSASMIKRYDEHHQDLTLLKALVRQQLPEKYKEIFFDQSKNGYAGYIDGGASQEEFYKFIKPILEKMDGTEELLVKLNREDLLRKQRTFDNGSIPHQIHLGELHAILRRQEDFYPFLKDNREKIEKILTFRIPYYVGPLARGNSRFAWMTRKSEETITPWNFEEVVDKGASAQSFIERMTNFDKNLPNEKVLPKHSLLYEYFTVYNELTKVKYVTEGMRKPAFLSGEQKKAIVDLLFKTNRKVTVKQLKEDYFKKIECFDSVEISGVEDRFNASLGTYHDLLKIIKDKDFLDNEENEDILEDIVLTLTLFEDREMIEERLKTYAHLFDDKVMKQLKRRRYTGWGRLSRKLINGIRDKQSGKTILDFLKSDGFANRNFMQLIHDDSLTFKEDIQKAQVSGQGDSLHEHIANLAGSPAIKKGILQTVKVVDELVKVMGRHKPENIVIEMARENQTTQKGQKNSRERMKRIEEGIKELGSQILKEHPVENTQLQNEKLYLYYLQNGRDMYVDQELDINRLSDYDVDHIVPQSFLKDDSIDNKVLTRSDKARGKSDNVPSEEVVKKMKNYWRQLLNAKLITQRKFDNLTKAERGGLSELDKAGFIKRQLVETRQITKHVAQILDSRMNTKYDENDKLIREVKVITLKSKLVSDFRKDFQFYKVREINNYHHAHDAYLNAVVGTALIKKYPKLESEFVYGDYKVYDVRKMIAKSEQEIGKATAKYFFYSNIMNFFKTEITLANGEIRKRPLIETNGETGEIVWDKGRDFATVRKVLSMPQVNIVKKTEVQTGGFSKESILPKRNSDKLIARKKDWDPKKYGGFDSPTVAYSVLVVAKVEKGKSKKLKSVKELLGITIMERSSFEKNPIDFLEAKGYKEVKKDLIIKLPKYSLFELENGRKRMLASAGELQKGNELALPSKYVNFLYLASHYEKLKGSPEDNEQKQLFVEQHKHYLDEIIEQISEFSKRVILADANLDKVLSAYNKHRDKPIREQAENIIHLFTLTNLGAPAAFKYFDTTIDRKRYTSTKEVLDATLIHQSITGLYETRIDLSQLGGDGGPAPGSSGGSGGLGIEDEYRLHETSTEPDVSLGSTWLSDFPQAWAETGGMGLAVRQAPLIIPLKATSTPVSIQQYPMSHEARLGIKPHIQRLLDQGILVPCQSPWNTPLLPVKKPGTNDYRPVQDLREVNKRVEDIHPTVPNPYNLLSGLPPSHQWYTVLDLKDAFFCLRLHPTSQPLFAFEWRDPGMGISGQLTWTRLPQGFKNSPTLFNEALHRDLADFRIQHPDLILLQYVDDILLAATSELDCQQGTRALLQTLGDLGYRASAKKAQICQKQVKYLGYLLREGQRWLTEARKETVMGQPVPKTPRQLREFLGKAGFCRLFIPGFAEMAAPLYPLTKPGTLFSWGPDQQKAYQEIKQALLTAPALGLPDLTKPFELFVDEKQGYAKGVLTQKLGPWRRPVAYLSKKLDPVAAGWPPCLRMVAAIAVLTKDAGKLTMGQPLVILAPHAVEALVKQPPDRWLSNARMTHYQAMLLDTDRVQFGPVVALNPATLLPLPEEGAPHDCLEILAETHGTRPDLTDQPIPDADHTWYTDGSSFLQEGQRKAGAAVTTETEVIWAGALPAGTSAQRAELIALTQALKMAEGKRLNVYTDSRYAFATAHIHGEIYRRRGWLTSEGREIKNKSEILALLKALFLPKRLSIIHCLGHQKGDSAEARGNRLADQAAREAAIKTPPDTSTLLIAGKRTADGSEFEKRTADGSEFESPKKKAKVE

SEQ ID NO: 7186 - protein, 2094 aa, synthetic construct; identical to SEQ ID NO: 7185

SEQ ID NO: 7187 - protein, 2088 aa, synthetic construct
MPAAKRVKLDGGDKKYSIGLDIGTNSVGWAVITDEYKVPSKKFKVLGNTDRHSIKKNLIGALLFDSGETAEATRLKRTARRRYTRRKNRICYLQEIFSNEMAKVDDSFFHRLEESFLVEEDKKHERHPIFGNIVDEVAYHEKYPTIYHLRKKLVDSTDKADLRLIYLALAHMIKFRGHFLIEGDLNPDNSDVDKLFIQLVQTYNQLFEENPINASGVDAKAILSARLSKSRRLENLIAQLPGEKKNGLFGNLIALSLGLTPNFKSNFDLAEDAKLQLSKDTYDDDLDNLLAQIGDQYADLFLAAKNLSDAILLSDILRVNTEITKAPLSASMIKRYDEHHQDLTLLKALVRQQLPEKYKEIFFDQSKNGYAGYIDGGASQEEFYKFIKPILEKMDGTEELLVKLNREDLLRKQRTFDNGSIPHQIHLGELHAILRRQEDFYPFLKDNREKIEKILTFRIPYYVGPLARGNSRFAWMTRKSEETITPWNFEEVVDKGASAQSFIERMTNFDKNLPNEKVLPKHSLLYEYFTVYNELTKVKYVTEGMRKPAFLSGEQKKAIVDLLFKTNRKVTVKQLKEDYFKKIECFDSVEISGVEDRFNASLGTYHDLLKIIKDKDFLDNEENEDILEDIVLTLTLFEDREMIEERLKTYAHLFDDKVMKQLKRRRYTGWGRLSRKLINGIRDKQSGKTILDFLKSDGFANRNFMQLIHDDSLTFKEDIQKAQVSGQGDSLHEHIANLAGSPAIKKGILQTVKVVDELVKVMGRHKPENIVIEMARENQTTQKGQKNSRERMKRIEEGIKELGSQILKEHPVENTQLQNEKLYLYYLQNGRDMYVDQELDINRLSDYDVDHIVPQSFLKDDSIDNKVLTRSDKARGKSDNVPSEEVVKKMKNYWRQLLNAKLITQRKFDNLTKAERGGLSELDKAGFIKRQLVETRQITKHVAQILDSRMNTKYDENDKLIREVKVITLKSKLVSDFRKDFQFYKVREINNYHHAHDAYLNAVVGTALIKKYPKLESEFVYGDYKVYDVRKMIAKSEQEIGKATAKYFFYSNIMNFFKTEITLANGEIRKRPLIETNGETGEIVWDKGRDFATVRKVLSMPQVNIVKKTEVQTGGFSKESILPKRNSDKLIARKKDWDPKKYGGFDSPTVAYSVLVVAKVEKGKSKKLKSVKELLGITIMERSSFEKNPIDFLEAKGYKEVKKDLIIKLPKYSLFELENGRKRMLASAGELQKGNELALPSKYVNFLYLASHYEKLKGSPEDNEQKQLFVEQHKHYLDEIIEQISEFSKRVILADANLDKVLSAYNKHRDKPIREQAENIIHLFTLTNLGAPAAFKYFDTTIDRKRYTSTKEVLDATLIHQSITGLYETRIDLSQLGGDGGPAPGSSGGSGGTLQLDDEYRLYSPLVKPDQNIQFWLEQFPQAWAETAGMGLAKQVPPQVIQLKASATPVSVRQYPLSKEAQEGIRPHVQRLIQQGILVPVQSPWNTPLLPVRKPGTNDYRPVQDLREVNKRVQDIHPTVPNPYNLLCALPPQRSWYTVLDLKDAFFCLRLHPTSQPLFAFEWRDPGTGRTGQLTWTRLPQGFKNSPTIFDEALHRDLANFRIQHPQVTLLQYVDDLLLAGATKQDCLEGTKALLLELSDLGYRASAKKAQICRREVTYLGYSLRDGQRWLTEARKKTVVQIPAPTTAKQVREFLGTAGFCRLWIPGFATLAAPLYPLTKEKGEFSWAPEHQKAFDAIKKALLSAPALALPDVTKPFTLYVDERKGVARGVLTQTLGPWRRPVAYLSKKLDPVASGWPVCLKAIAAVAILVKDADKLTLGQNITVIAPHALENIVRQPPDRWMTNARMTHYQSLLLTERVTFAPPAALNPATLLPEETDEPVTHDCHQLLIEETGVRKDLTDIPLTGEVLTWFTDGSSYVVEGKRMAGAAVVDGTRTIWASSLPEGTSAQKAELMALTQALRLAEGKSINIYTDSRYAFATAHVHGAIYKQRGLLTSAGREIKNKEEILSLLEALHLPKRLAIIHCPGHQKAKDPISRGNQMADRVAKQAAQGVNLLAGKRTADGSEFEKRTADGSEFESPKKKAKVE

SEQ ID NO: 7188 - protein, 2085 aa, synthetic construct
MPAAKRVKLDGGDKKYSIGLDIGTNSVGWAVITDEYKVPSKKFKVLGNTDRHSIKKNLIGALLFDSGETAEATRLKRTARRRYTRRKNRICYLQEIFSNEMAKVDDSFFHRLEESFLVEEDKKHERHPIFGNIVDEVAYHEKYPTIYHLRKKLVDSTDKADLRLIYLALAHMIKFRGHFLIEGDLNPDNSDVDKLFIQLVQTYNQLFEENPINASGVDAKAILSARLSKSRRLENLIAQLPGEKKNGLFGNLIALSLGLTPNFKSNFDLAEDAKLQLSKDTYDDDLDNLLAQIGDQYADLFLAAKNLSDAILLSDILRVNTEITKAPLSASMIKRYDEHHQDLTLLKALVRQQLPEKYKEIFFDQSKNGYAGYIDGGASQEEFYKFIKPILEKMDGTEELLVKLNREDLLRKQRTFDNGSIPHQIHLGELHAILRRQEDFYPFLKDNREKIEKILTFRIPYYVGPLARGNSRFAWMTRKSEETITPWNFEEVVDKGASAQSFIERMTNFDKNLPNEKVLPKHSLLYEYFTVYNELTKVKYVTEGMRKPAFLSGEQKKAIVDLLFKTNRKVTVKQLKEDYFKKIECFDSVEISGVEDRFNASLGTYHDLLKIIKDKDFLDNEENEDILEDIVLTLTLFEDREMIEERLKTYAHLFDDKVMKQLKRRRYTGWGRLSRKLINGIRDKQSGKTILDFLKSDGFANRNFMQLIHDDSLTFKEDIQKAQVSGQGDSLHEHIANLAGSPAIKKGILQTVKVVDELVKVMGRHKPENIVIEMARENQTTQKGQKNSRERMKRIEEGIKELGSQILKEHPVENTQLQNEKLYLYYLQNGRDMYVDQELDINRLSDYDVDHIVPQSFLKDDSIDNKVLTRSDKARGKSDNVPSEEVVKKMKNYWRQLLNAKLITQRKFDNLTKAERGGLSELDKAGFIKRQLVETRQITKHVAQILDSRMNTKYDENDKLIREVKVITLKSKLVSDFRKDFQFYKVREINNYHHAHDAYLNAVVGTALIKKYPKLESEFVYGDYKVYDVRKMIAKSEQEIGKATAKYFFYSNIMNFFKTEITLANGEIRKRPLIETNGETGEIVWDKGRDFATVRKVLSMPQVNIVKKTEVQTGGFSKESILPKRNSDKLIARKKDWDPKKYGGFDSPTVAYSVLVVAKVEKGKSKKLKSVKELLGITIMERSSFEKNPIDFLEAKGYKEVKKDLIIKLPKYSLFELENGRKRMLASAGELQKGNELALPSKYVNFLYLASHYEKLKGSPEDNEQKQLFVEQHKHYLDEIIEQISEFSKRVILADANLDKVLSAYNKHRDKPIREQAENIIHLFTLTNLGAPAAFKYFDTTIDRKRYTSTKEVLDATLIHQSITGLYETRIDLSQLGGDGGPAPGSSGGSGGIPWLMKKPLQLTTLVPLQEYEERLLKQTMLTGSYKEKLQSLFLKYDALWQHWENQVGHRRIKPHHIATGTVNPRPQKQYPINPKAKASIQTVINDLLKQGVLIQQNSIMNTPVYPVPKPDGKWRMVLDYREVNKTIPLIAAQNQHSAGILSSIFRGKYKTTLDLSNGFWAHSITPESYWLTAFTWLGQQYCWTRLPQGFLNSPALFNADVVDLLKEVPNVQVYVDDIYISHDDPREHLEQLEKVFSLLLNAGYVVSLKKSEIAQHEVEFLGFNITKEGRGLTETFKQKLLNITPPRDLKQLQSILGKLNFARNFIPNFSELVKPLYNIIATAPGKYITWTTDNSQQLQNIISMLNSAENLEERNPEVRLIMKVNTSPSAGYIRFYNEFAKRPIMYLNYVYTKAEVKFTNTEKLLTTIHKGLIKALDLGMGQEILVYSPIVSMTKIQKTPLPERKALPIRWITWMSYLEDPRIQFHYDKTLPELQQVPTVTDDIIAKIKHPSEFSMVFYTDGSAIKHPNVNKSHNAGMGIAQVQFKPEFTVINTWSIPLGDHTAQLAEVAAVEFACKKALKIDGPVLIVTDSFYVAESVNKELPYWQSNGFFNNKKKPLKHVSKWKSIADCIQLKPDIIIIHEKGHQPTASTFHTEGNNLADKLATQGSYVVNAGKRTADGSEFEKRTADGSEFESPKKKAKVE

SEQ ID NO: 7189 - protein, 2174 aa, synthetic construct
MPAAKRVKLDGGDKKYSIGLDIGTNSVGWAVITDEYKVPSKKFKVLGNTDRHSIKKNLIGALLFDSGETAEATRLKRTARRRYTRRKNRICYLQEIFSNEMAKVDDSFFHRLEESFLVEEDKKHERHPIFGNIVDEVAYHEKYPTIYHLRKKLVDSTDKADLRLIYLALAHMIKFRGHFLIEGDLNPDNSDVDKLFIQLVQTYNQLFEENPINASGVDAKAILSARLSKSRRLENLIAQLPGEKKNGLFGNLIALSLGLTPNFKSNFDLAEDAKLQLSKDTYDDDLDNLLAQIGDQYADLFLAAKNLSDAILLSDILRVNTEITKAPLSASMIKRYDEHHQDLTLLKALVRQQLPEKYKEIFFDQSKNGYAGYIDGGASQEEFYKFIKPILEKMDGTEELLVKLNREDLLRKQRTFDNGSIPHQIHLGELHAILRRQEDFYPFLKDNREKIEKILTFRIPYYVGPLARGNSRFAWMTRKSEETITPWNFEEVVDKGASAQSFIERMTNFDKNLPNEKVLPKHSLLYEYFTVYNELTKVKYVTEGMRKPAFLSGEQKKAIVDLLFKTNRKVTVKQLKEDYFKKIECFDSVEISGVEDRFNASLGTYHDLLKIIKDKDFLDNEENEDILEDIVLTLTLFEDREMIEERLKTYAHLFDDKVMKQLKRRRYTGWGRLSRKLINGIRDKQSGKTILDFLKSDGFANRNFMQLIHDDSLTFKEDIQKAQVSGQGDSLHEHIANLAGSPAIKKGILQTVKVVDELVKVMGRHKPENIVIEMARENQTTQKGQKNSRERMKRIEEGIKELGSQILKEHPVENTQLQNEKLYLYYLQNGRDMYVDQELDINRLSDYDVDHIVPQSFLKDDSIDNKVLTRSDKARGKSDNVPSEEVVKKMKNYWRQLLNAKLITQRKFDNLTKAERGGLSELDKAGFIKRQLVETRQITKHVAQILDSRMNTKYDENDKLIREVKVITLKSKLVSDFRKDFQFYKVREINNYHHAHDAYLNAVVGTALIKKYPKLESEFVYGDYKVYDVRKMIAKSEQEIGKATAKYFFYSNIMNFFKTEITLANGEIRKRPLIETNGETGEIVWDKGRDFATVRKVLSMPQVNIVKKTEVQTGGFSKESILPKRNSDKLIARKKDWDPKKYGGFDSPTVAYSVLVVAKVEKGKSKKLKSVKELLGITIMERSSFEKNPIDFLEAKGYKEVKKDLIIKLPKYSLFELENGRKRMLASAGELQKGNELALPSKYVNFLYLASHYEKLKGSPEDNEQKQLFVEQHKHYLDEIIEQISEFSKRVILADANLDKVLSAYNKHRDKPIREQAENIIHLFTLTNLGAPAAFKYFDTTIDRKRYTSTKEVLDATLIHQSITGLYETRIDLSQLGGDGGPAPGSSGGSGGMDPLQLLQPLEAEIKGTKLKAHWNSGATITCVPQAFLEEEVPIKNIWIKTIHGEKEQPVYYLTFKIQGRKVEAEVISSPYDYILVSPSDIPWLMKKPLQLTTLVPLQEYEERLLKQTMLTGSYKEKLQSLFLKYDALWQHWENQVGHRRIKPHHIATGTVNPRPQKQYPINPKAKASIQTVINDLLKQGVLIQQNSIMNTPVYPVPKPDGKWRMVLDYREVNKTIPLIAAQNQHSAGILSSIFRGKYKTTLDLSNGFWAHSITPESYWLTAFTWLGQQYCWTRLPQGFLNSPALFNADVVDLLKEVPNVQVYVDDIYISHDDPREHLEQLEKVFSLLLNAGYVVSLKKSEIAQHEVEFLGFNITKEGRGLTETFKQKLLNITPPRDLKQLQSILGLLNFARNFIPNFSELVKPLYNIIATAPGKYITWTTDNSQQLQNIISMLNSAENLEERNPEVRLIMKVNTSPSAGYIRFYNEFAKRPIMYLNYVYTKAEVKFTNTEKLLTTIHKGLIKALDLGMGQEILVYSPIVSMTKIQKTPLPERKALPIRWITWMSYLEDPRIQFHYDKTLPELQQVPTVTDDIIAKIKHPSEFSMVFYTDGSAIKHPNVNKSHNAGMGIAQVQFKPEFTVINTWSIPLGDHTAQLAEVAAVEFACKKALKIDGPVLIVTDSFYVAESVNKELPYWQSNGFFNNKKKPLKHVSKWKSIADCIQLKPDIIIIHEKGHQPTASTFHTEGNNLADKLATQGSYVVNAGKRTADGSEFEKRTADGSEFESPKKKAKVE

SEQ ID NO: 7190 - protein, 2174 aa, synthetic construct
MPAAKRVKLDGGDKKYSIGLDIGTNSVGWAVITDEYKVPSKKFKVLGNTDRHSIKKNLIGALLFDSGETAEATRLKRTARRRYTRRKNRICYLQEIFSNEMAKVDDSFFHRLEESFLVEEDKKHERHPIFGNIVDEVAYHEKYPTIYHLRKKLVDSTDKADLRLIYLALAHMIKFRGHFLIEGDLNPDNSDVDKLFIQLVQTYNQLFEENPINASGVDAKAILSARLSKSRRLENLIAQLPGEKKNGLFGNLIALSLGLTPNFKSNFDLAEDAKLQLSKDTYDDDLDNLLAQIGDQYADLFLAAKNLSDAILLSDILRVNTEITKAPLSASMIKRYDEHHQDLTLLKALVRQQLPEKYKEIFFDQSKNGYAGYIDGGASQEEFYKFIKPILEKMDGTEELLVKLNREDLLRKQRTFDNGSIPHQIHLGELHAILRRQEDFYPFLKDNREKIEKILTFRIPYYVGPLARGNSRFAWMTRKSEETITPWNFEEVVDKGASAQSFIERMTNFDKNLPNEKVLPKHSLLYEYFTVYNELTKVKYVTEGMRKPAFLSGEQKKAIVDLLFKTNRKVTVKQLKEDYFKKIECFDSVEISGVEDRFNASLGTYHDLLKIIKDKDFLDNEENEDILEDIVLTLTLFEDREMIEERLKTYAHLFDDKVMKQLKRRRYTGWGRLSRKLINGIRDKQSGKTILDFLKSDGFANRNFMQLIHDDSLTFKEDIQKAQVSGQGDSLHEHIANLAGSPAIKKGILQTVKVVDELVKVMGRHKPENIVIEMARENQTTQKGQKNSRERMKRIEEGIKELGSQILKEHPVENTQLQNEKLYLYYLQNGRDMYVDQELDINRLSDYDVDHIVPQSFLKDDSIDNKVLTRSDKARGKSDNVPSEEVVKKMKNYWRQLLNAKLITQRKFDNLTKAERGGLSELDKAGFIKRQLVETRQITKHVAQILDSRMNTKYDENDKLIREVKVITLKSKLVSDFRKDFQFYKVREINNYHHAHDAYLNAVVGTALIKKYPKLESEFVYGDYKVYDVRKMIAKSEQEIGKATAKYFFYSNIMNFFKTEITLANGEIRKRPLIETNGETGEIVWDKGRDFATVRKVLSMPQVNIVKKTEVQTGGFSKESILPKRNSDKLIARKKDWDPKKYGGFDSPTVAYSVLVVAKVEKGKSKKLKSVKELLGITIMERSSFEKNPIDFLEAKGYKEVKKDLIIKLPKYSLFELENGRKRMLASAGELQKGNELALPSKYVNFLYLASHYEKLKGSPEDNEQKQLFVEQHKHYLDEIIEQISEFSKRVILADANLDKVLSAYNKHRDKPIREQAENIIHLFTLTNLGAPAAFKYFDTTIDRKRYTSTKEVLDATLIHQSITGLYETRIDLSQLGGDGGPAPGSSGGSGGMNPLQLLQPLPAEVKGTKLLAHWNSGATITCIPESFLEDEQPIKQTLIKTIHGEKQQNVYYLTFKVKGRKVEAEVIASPYEYILLSPTDVPWLTQQPLQLTILVPLQEYQDRILNKTALPEEQKQQLKALFTKYDNLWQHWENQVGHRKIRPHNIATGDYPPRPQKQYPINPKAKPSIQIVIDDLLKQGVLTPQNSTMNTPVYPVPKPDGRWRMVLDYREVNKTIPLTAAQNQHSAGILATIVRQKYKTTLDLANGFWAHPITPDSYWLTAFTWQGKQYCWTRLPQGFLNSPALFTADAVDLLKEVPNVQVYVDDIYLSHDNPHEHIQQLEKVFQILLQAGYVVSLKKSEIGQRTVEFLGFNITKEGRGLTDTFKTKLLNVTPPKDLKQLQSILGLLNFARNFIPNFAELVQTLYNLIASSKGKYIEWTEDNTKQLNKVIEALNTASNLEERLPDQRLVIKVNTSPSAGYVRYYNESGKKPIMYLNYVFSKAELKFSMLEKLLTTMHKALIKAMDLAMGQEILVYSPIVSMTKIQKTPLPERKALPIRWITWMTYLEDPRIQFHYDKTLPELKHIPDVYTSSIPPLKHPSQYEGVFCTDGSAIKSPDPTKSNNAGMGIVHAIYNPEYKILNQWSIPLGHHTAQMAEIAAVEFACKKALKVPGPVLVITDSFYVAESANKELPYWKSNGFVNNKKEPLKHISKWKSIAECLSIKPDITIQHEKGHQPINTSIHTEGNALADKLATQGSYVVNAGKRTADGSEFEKRTADGSEFESPKKKAKVE

SEQ ID NO: 7191 - protein, 2092 aa, synthetic construct
MPAAKRVKLDGGDKKYSIGLDIGTNSVGWAVITDEYKVPSKKFKVLGNTDRHSIKKNLIGALLFDSGETAEATRLKRTARRRYTRRKNRICYLQEIFSNEMAKVDDSFFHRLEESFLVEEDKKHERHPIFGNIVDEVAYHEKYPTIYHLRKKLVDSTDKADLRLIYLALAHMIKFRGHFLIEGDLNPDNSDVDKLFIQLVQTYNQLFEENPINASGVDAKAILSARLSKSRRLENLIAQLPGEKKNGLFGNLIALSLGLTPNFKSNFDLAEDAKLQLSKDTYDDDLDNLLAQIGDQYADLFLAAKNLSDAILLSDILRVNTEITKAPLSASMIKRYDEHHQDLTLLKALVRQQLPEKYKEIFFDQSKNGYAGYIDGGASQEEFYKFIKPILEKMDGTEELLVKLNREDLLRKQRTFDNGSIPHQIHLGELHAILRRQEDFYPFLKDNREKIEKILTFRIPYYVGPLARGNSRFAWMTRKSEETITPWNFEEVVDKGASAQSFIERMTNFDKNLPNEKVLPKHSLLYEYFTVYNELTKVKYVTEGMRKPAFLSGEQKKAIVDLLFKTNRKVTVKQLKEDYFKKIECFDSVEISGVEDRFNASLGTYHDLLKIIKDKDFLDNEENEDILEDIVLTLTLFEDREMIEERLKTYAHLFDDKVMKQLKRRRYTGWGRLSRKLINGIRDKQSGKTILDFLKSDGFANRNFMQLIHDDSLTFKEDIQKAQVSGQGDSLHEHIANLAGSPAIKKGILQTVKVVDELVKVMGRHKPENIVIEMARENQTTQKGQKNSRERMKRIEEGIKELGSQILKEHPVENTQLQNEKLYLYYLQNGRDMYVDQELDINRLSDYDVDHIVPQSFLKDDSIDNKVLTRSDKARGKSDNVPSEEVVKKMKNYWRQLLNAKLITQRKFDNLTKAERGGLSELDKAGFIKRQLVETRQITKHVAQILDSRMNTKYDENDKLIREVKVITLKSKLVSDFRKDFQFYKVREINNYHHAHDAYLNAVVGTALIKKYPKLESEFVYGDYKVYDVRKMIAKSEQEIGKATAKYFFYSNIMNFFKTEITLANGEIRKRPLIETNGETGEIVWDKGRDFATVRKVLSMPQVNIVKKTEVQTGGFSKESILPKRNSDKLIARKKDWDPKKYGGFDSPTVAYSVLVVAKVEKGKSKKLKSVKELLGITIMERSSFEKNPIDFLEAKGYKEVKKDLIIKLPKYSLFELENGRKRMLASAGELQKGNELALPSKYVNFLYLASHYEKLKGSPEDNEQKQLFVEQHKHYLDEIIEQISEFSKRVILADANLDKVLSAYNKHRDKPIREQAENIIHLFTLTNLGAPAAFKYFDTTIDRKRYTSTKEVLDATLIHQSITGLYETRIDLSQLGGDGGPAPGSSGGSGGVLNLEEEYRLHEKPVPSSIDPSWLQLFPTVWAERAGMGLANQVPPVVVELRSGASPVAVRQYPMSKEAREGIRPHIQRFLDLGVLVPCQSPWNTPLLPVKKPGTNDYRPVQDLREINKRVQDIHPTVPNPYNLLSSLPPSHTWYSVLDLKDAFFCLKLHPNSQPLFAFEWRDPEKGNTGQLTWTRLPQGFKNSPTLFNEALHRDLAPFRALNPQVVLLQYVDDLLVAAPTYRDCKEGTQKLLQELSKLGYRVSAKKAQLCQKEVTYLGYLLKEGKRWLTPARKATVMKIPPPTTPRQVREFLGTAGFCRLWIPGFASLAAPLYPLTKPSIPFIWTEEHQKAFDRIKEALLSAPALALPDLTKPFTLYVDERAGVARGVLTQTLGPWRRPVAYLSKKLDPVASGWPTCLKAVAAVALLLKDADKLTLGQNVTVIASHSLESIVRQPPDRWMTNARMTHYQSLLLNERVSFAPPAVLNPATLLPVESEATPVHRCSEILAEETGTRRDLKDQPLPGVPAWYTDGSSFIAEGKRRAGAAIVDGKRTVWASSLPEGTSAQKAELVALTQALRLAEGKDINIYTDSRYAFATAHIHGAIYKQRGWLTSAGKDIKNKEEILALLEAIHLPKRVAIIHCPGHQKGNDPVATGNRRADEAAKQAALSTRVLAETTKPAGKRTADGSEFEKRTADGSEFESPKKKAKVE

SEQ ID NO: 7192 - protein, 2092 aa, synthetic construct
MPAAKRVKLDGGDKKYSIGLDIGTNSVGWAVITDEYKVPSKKFKVLGNTDRHSIKKNLIGALLFDSGETAEATRLKRTARRRYTRRKNRICYLQEIFSNEMAKVDDSFFHRLEESFLVEEDKKHERHPIFGNIVDEVAYHEKYPTIYHLRKKLVDSTDKADLRLIYLALAHMIKFRGHFLIEGDLNPDNSDVDKLFIQLVQTYNQLFEENPINASGVDAKAILSARLSKSRRLENLIAQLPGEKKNGLFGNLIALSLGLTPNFKSNFDLAEDAKLQLSKDTYDDDLDNLLAQIGDQYADLFLAAKNLSDAILLSDILRVNTEITKAPLSASMIKRYDEHHQDLTLLKALVRQQLPEKYKEIFFDQSKNGYAGYIDGGASQEEFYKFIKPILEKMDGTEELLVKLNREDLLRKQRTFDNGSIPHQIHLGELHAILRRQEDFYPFLKDNREKIEKILTFRIPYYVGPLARGNSRFAWMTRKSEETITPWNFEEVVDKGASAQSFIERMTNFDKNLPNEKVLPKHSLLYEYFTVYNELTKVKYVTEGMRKPAFLSGEQKKAIVDLLFKTNRKVTVKQLKEDYFKKIECFDSVEISGVEDRFNASLGTYHDLLKIIKDKDFLDNEENEDILEDIVLTLTLFEDREMIEERLKTYAHLFDDKVMKQLKRRRYTGWGRLSRKLINGIRDKQSGKTILDFLKSDGFANRNFMQLIHDDSLTFKEDIQKAQVSGQGDSLHEHIANLAGSPAIKKGILQTVKVVDELVKVMGRHKPENIVIEMARENQTTQKGQKNSRERMKRIEEGIKELGSQILKEHPVENTQLQNEKLYLYYLQNGRDMYVDQELDINRLSDYDVDHIVPQSFLKDDSIDNKVLTRSDKARGKSDNVPSEEVVKKMKNYWRQLLNAKLITQRKFDNLTKAERGGLSELDKAGFIKRQLVETRQITKHVAQILDSRMNTKYDENDKLIREVKVITLKSKLVSDFRKDFQFYKVREINNYHHAHDAYLNAVVGTALIKKYPKLESEFVYGDYKVYDVRKMIAKSEQEIGKATAKYFFYSNIMNFFKTEITLANGEIRKRPLIETNGETGEIVWDKGRDFATVRKVLSMPQVNIVKKTEVQTGGFSKESILPKRNSDKLIARKKDWDPKKYGGFDSPTVAYSVLVVAKVEKGKSKKLKSVKELLGITIMERSSFEKNPIDFLEAKGYKEVKKDLIIKLPKYSLFELENGRKRMLASAGELQKGNELALPSKYVNFLYLASHYEKLKGSPEDNEQKQLFVEQHKHYLDEIIEQISEFSKRVILADANLDKVLSAYNKHRDKPIREQAENIIHLFTLTNLGAPAAFKYFDTTIDRKRYTSTKEVLDATLIHQSITGLYETRIDLSQLGGDGGPAPGSSGGSGGVLNLEEEYRLHEKPVPSSIDPSWLQLFPTVWAERAGMGLANQVPPVVVELRSGASPVAVRQYPMSKEAREGIRPHIQRFLDLGVLVPCQSPWNTPLLPVKKPGTNDYRPVQDLREINKRVQDIHPTVPNPYNLLSSLPPSHTWYSVLDLKDAFFCLKLHPNSQPLFAFEWRDPEKGNTGQLTWTRLPQGFKNSPTLFNEALHRDLAPFRALNPQVVLLQYVDDLLVAAPTYRDCKEGTQKLLQELSKLGYRVSAKKAQLCQKEVTYLGYLLKEGKRWLTPARKATVMKIPPPTTPRQVREFLGKAGFCRLFIPGFASLAAPLYPLTKPSIPFIWTEEHQKAFDRIKEALLSAPALALPDLTKPFTLYVDERAGVARGVLTQTLGPWRRPVAYLSKKLDPVASGWPTCLKAVAAVALLLKDADKLTLGQNVTVIASHSLESIVRQPPDRWMTNARMTHYQSLLLNERVSFAPPAVLNPATLLPVESEATPVHRCSEILAEETGTRRDLKDQPLPGVPAWYTDGSSFIAEGKRRAGAAIVDGKRTVWASSLPEGTSAQKAELVALTQALRLAEGKDINIYTDSRYAFATAHIHGAIYKQRGWLTSAGKDIKNKEEILALLEAIHLPKRVAIIHCPGHQKGNDPVATGNRRADEAAKQAALSTRVLAETTKPAGKRTADGSEFEKRTADGSEFESPKKKAKVE

SEQ ID NO: 7193 - protein, 2095 aa, synthetic construct
MPAAKRVKLDGGDKKYSIGLDIGTNSVGWAVITDEYKVPSKKFKVLGNTDRHSIKKNLIGALLFDSGETAEATRLKRTARRRYTRRKNRICYLQEIFSNEMAKVDDSFFHRLEESFLVEEDKKHERHPIFGNIVDEVAYHEKYPTIYHLRKKLVDSTDKADLRLIYLALAHMIKFRGHFLIEGDLNPDNSDVDKLFIQLVQTYNQLFEENPINASGVDAKAILSARLSKSRRLENLIAQLPGEKKNGLFGNLIALSLGLTPNFKSNFDLAEDAKLQLSKDTYDDDLDNLLAQIGDQYADLFLAAKNLSDAILLSDILRVNTEITKAPLSASMIKRYDEHHQDLTLLKALVRQQLPEKYKEIFFDQSKNGYAGYIDGGASQEEFYKFIKPILEKMDGTEELLVKLNREDLLRKQRTFDNGSIPHQIHLGELHAILRRQEDFYPFLKDNREKIEKILTFRIPYYVGPLARGNSRFAWMTRKSEETITPWNFEEVVDKGASAQSFIERMTNFDKNLPNEKVLPKHSLLYEYFTVYNELTKVKYVTEGMRKPAFLSGEQKKAIVDLLFKTNRKVTVKQLKEDYFKKIECFDSVEISGVEDRFNASLGTYHDLLKIIKDKDFLDNEENEDILEDIVLTLTLFEDREMIEERLKTYAHLFDDKVMKQLKRRRYTGWGRLSRKLINGIRDKQSGKTILDFLKSDGFANRNFMQLIHDDSLTFKEDIQKAQVSGQGDSLHEHIANLAGSPAIKKGILQTVKVVDELVKVMGRHKPENIVIEMARENQTTQKGQKNSRERMKRIEEGIKELGSQILKEHPVENTQLQNEKLYLYYLQNGRDMYVDQELDINRLSDYDVDHIVPQSFLKDDSIDNKVLTRSDKARGKSDNVPSEEVVKKMKNYWRQLLNAKLITQRKFDNLTKAERGGLSELDKAGFIKRQLVETRQITKHVAQILDSRMNTKYDENDKLIREVKVITLKSKLVSDFRKDFQFYKVREINNYHHAHDAYLNAVVGTALIKKYPKLESEFVYGDYKVYDVRKMIAKSEQEIGKATAKYFFYSNIMNFFKTEITLANGEIRKRPLIETNGETGEIVWDKGRDFATVRKVLSMPQVNIVKKTEVQTGGFSKESILPKRNSDKLIARKKDWDPKKYGGFDSPTVAYSVLVVAKVEKGKSKKLKSVKELLGITIMERSSFEKNPIDFLEAKGYKEVKKDLIIKLPKYSLFELENGRKRMLASAGELQKGNELALPSKYVNFLYLASHYEKLKGSPEDNEQKQLFVEQHKHYLDEIIEQISEFSKRVILADANLDKVLSAYNKHRDKPIREQAENIIHLFTLTNLGAPAAFKYFDTTIDRKRYTSTKEVLDATLIHQSITGLYETRIDLSQLGGDGGGGSEAAAKPAPGGTLQLEEEYRLFEPESTQKQEMDIWLKNFPQAWAETGGMGTAHCQAPVLIQLKATATPISIRQYPMPHEAYQGIKPHIRRMLDQGILKPCQSPWNTPLLPVKKPGTEDYRPVQDLREVNKRVEDIHPTVPNPYNLLSTLPPSHPWYTVLDLKDAFFCLRLHSESQLLFAFEWRDPEIGLSGQLTWTRLPQGFKNSPTLFNEALHSDLADFRVRYPALVLLQYVDDLLLAAATRTECLEGTKALLETLGNKGYRASAKKAQICLQEVTYLGYSLKDGQRWLTKARKEAILSIPVPKNSRQVREFLGTAGYCRLWIPGFAELAAPLYPLTRPGTLFQWGTEQQLAFEDIKKALLSSPALGLPDITKPFELFIDENSGFAKGVLVQKLGPWKRPVAYLSKKLDTVASGWPPCLRMVAAIAILVKDAGKLTLGQPLTILTSHPVEALVRQPPNKWLSNARMTHYQAMLLDAERVHFGPTVSLNPATLLPLPSGGNHHDCLQILAETHGTRPDLTDQPLPDADLTWYTDGSSFIRNGEREAGAAVTTESEVIWAAPLPPGTSAQRAELIALTQALKMAEGKKLTVYTDSRYAFATTHVHGEIYRRRGWLTSEGKEIKNKNEILALLEALFLPKRLSIIHCPGHQKGDSPQAKGNRLADDTAKKAATETHSSLTVLPAGKRTADGSEFEKRTADGSEFESPKKKAKVE

SEQ ID NO: 7194 - protein, 2095 aa, synthetic construct
MPAAKRVKLDGGDKKYSIGLDIGTNSVGWAVITDEYKVPSKKFKVLGNTDRHSIKKNLIGALLFDSGETAEATRLKRTARRRYTRRKNRICYLQEIFSNEMAKVDDSFFHRLEESFLVEEDKKHERHPIFGNIVDEVAYHEKYPTIYHLRKKLVDSTDKADLRLIYLALAHMIKFRGHFLIEGDLNPDNSDVDKLFIQLVQTYNQLFEENPINASGVDAKAILSARLSKSRRLENLIAQLPGEKKNGLFGNLIALSLGLTPNFKSNFDLAEDAKLQLSKDTYDDDLDNLLAQIGDQYADLFLAAKNLSDAILLSDILRVNTEITKAPLSASMIKRYDEHHQDLTLLKALVRQQLPEKYKEIFFDQSKNGYAGYIDGGASQEEFYKFIKPILEKMDGTEELLVKLNREDLLRKQRTFDNGSIPHQIHLGELHAILRRQEDFYPFLKDNREKIEKILTFRIPYYVGPLARGNSRFAWMTRKSEETITPWNFEEVVDKGASAQSFIERMTNFDKNLPNEKVLPKHSLLYEYFTVYNELTKVKYVTEGMRKPAFLSGEQKKAIVDLLFKTNRKVTVKQLKEDYFKKIECFDSVEISGVEDRFNASLGTYHDLLKIIKDKDFLDNEENEDILEDIVLTLTLFEDREMIEERLKTYAHLFDDKVMKQLKRRRYTGWGRLSRKLINGIRDKQSGKTILDFLKSDGFANRNFMQLIHDDSLTFKEDIQKAQVSGQGDSLHEHIANLAGSPAIKKGILQTVKVVDELVKVMGRHKPENIVIEMARENQTTQKGQKNSRERMKRIEEGIKELGSQILKEHPVENTQLQNEKLYLYYLQNGRDMYVDQELDINRLSDYDVDHIVPQSFLKDDSIDNKVLTRSDKARGKSDNVPSEEVVKKMKNYWRQLLNAKLITQRKFDNLTKAERGGLSELDKAGFIKRQLVETRQITKHVAQILDSRMNTKYDENDKLIREVKVITLKSKLVSDFRKDFQFYKVREINNYHHAHDAYLNAVVGTALIKKYPKLESEFVYGDYKVYDVRKMIAKSEQEIGKATAKYFFYSNIMNFFKTEITLANGEIRKRPLIETNGETGEIVWDKGRDFATVRKVLSMPQVNIVKKTEVQTGGFSKESILPKRNSDKLIARKKDWDPKKYGGFDSPTVAYSVLVVAKVEKGKSKKLKSVKELLGITIMERSSFEKNPIDFLEAKGYKEVKKDLIIKLPKYSLFELENGRKRMLASAGELQKGNELALPSKYVNFLYLASHYEKLKGSPEDNEQKQLFVEQHKHYLDEIIEQISEFSKRVILADANLDKVLSAYNKHRDKPIREQAENIIHLFTLTNLGAPAAFKYFDTTIDRKRYTSTKEVLDATLIHQSITGLYETRIDLSQLGGDGGGGSEAAAKPAPGGTLQLEEEYRLFEPESTQKQEMDIWLKNFPQAWAETGGMGTAHCQAPVLIQLKATATPISIRQYPMPHEAYQGIKPHIRRMLDQGILKPCQSPWNTPLLPVKKPGTEDYRPVQDLREVNKRVEDIHPTVPNPYNLLSTLPPSHPWYTVLDLKDAFFCLRLHSESQLLFAFEWRDPEIGLSGQLTWTRLPQGFKNSPTLFNEALHSDLADFRVRYPALVLLQYVDDLLLAAATRTECLEGTKALLETLGNKGYRASAKKAQICLQEVTYLGYSLKDGQRWLTKARKEAILSIPVPKNSRQVREFLGKAGYCRLFIPGFAELAAPLYPLTRPGTLFQWGTEQQLAFEDIKKALLSSPALGLPDITKPFELFIDENSGFAKGVLVQKLGPWKRPVAYLSKKLDTVASGWPPCLRMVAAIAILVKDAGKLTLGQPLTILTSHPVEALVRQPPNKWLSNARMTHYQAMLLDAERVHFGPTVSLNPATLLPLPSGGNHHDCLQILAETHGTRPDLTDQPLPDADLTWYTDGSSFIRNGEREAGAAVTTESEVIWAAPLPPGTSAQRAELIALTQALKMAEGKKLTVYTDSRYAFATTHVHGEIYRRRGWLTSEGKEIKNKNEILALLEALFLPKRLSIIHCPGHQKGDSPQAKGNRLADDTAKKAATETHSSLTVLPAGKRTADGSEFEKRTADGSEFESPKKKAKVE

SEQ ID NO: 7195 - protein, 2176 aa, synthetic construct
MPAAKRVKLDGGDKKYSIGLDIGTNSVGWAVITDEYKVPSKKFKVLGNTDRHSIKKNLIGALLFDSGETAEATRLKRTARRRYTRRKNRICYLQEIFSNEMAKVDDSFFHRLEESFLVEEDKKHERHPIFGNIVDEVAYHEKYPTIYHLRKKLVDSTDKADLRLIYLALAHMIKFRGHFLIEGDLNPDNSDVDKLFIQLVQTYNQLFEENPINASGVDAKAILSARLSKSRRLENLIAQLPGEKKNGLFGNLIALSLGLTPNFKSNFDLAEDAKLQLSKDTYDDDLDNLLAQIGDQYADLFLAAKNLSDAILLSDILRVNTEITKAPLSASMIKRYDEHHQDLTLLKALVRQQLPEKYKEIFFDQSKNGYAGYIDGGASQEEFYKFIKPILEKMDGTEELLVKLNREDLLRKQRTFDNGSIPHQIHLGELHAILRRQEDFYPFLKDNREKIEKILTFRIPYYVGPLARGNSRFAWMTRKSEETITPWNFEEVVDKGASAQSFIERMTNFDKNLPNEKVLPKHSLLYEYFTVYNELTKVKYVTEGMRKPAFLSGEQKKAIVDLLFKTNRKVTVKQLKEDYFKKIECFDSVEISGVEDRFNASLGTYHDLLKIIKDKDFLDNEENEDILEDIVLTLTLFEDREMIEERLKTYAHLFDDKVMKQLKRRRYTGWGRLSRKLINGIRDKQSGKTILDFLKSDGFANRNFMQLIHDDSLTFKEDIQKAQVSGQGDSLHEHIANLAGSPAIKKGILQTVKVVDELVKVMGRHKPENIVIEMARENQTTQKGQKNSRERMKRIEEGIKELGSQILKEHPVENTQLQNEKLYLYYLQNGRDMYVDQELDINRLSDYDVDHIVPQSFLKDDSIDNKVLTRSDKARGKSDNVPSEEVVKKMKNYWRQLLNAKLITQRKFDNLTKAERGGLSELDKAGFIKRQLVETRQITKHVAQILDSRMNTKYDENDKLIREVKVITLKSKLVSDFRKDFQFYKVREINNYHHAHDAYLNAVVGTALIKKYPKLESEFVYGDYKVYDVRKMIAKSEQEIGKATAKYFFYSNIMNFFKTEITLANGEIRKRPLIETNGETGEIVWDKGRDFATVRKVLSMPQVNIVKKTEVQTGGFSKESILPKRNSDKLIARKKDWDPKKYGGFDSPTVAYSVLVVAKVEKGKSKKLKSVKELLGITIMERSSFEKNPIDFLEAKGYKEVKKDLIIKLPKYSLFELENGRKRMLASAGELQKGNELALPSKYVNFLYLASHYEKLKGSPEDNEQKQLFVEQHKHYLDEIIEQISEFSKRVILADANLDKVLSAYNKHRDKPIREQAENIIHLFTLTNLGAPAAFKYFDTTIDRKRYTSTKEVLDATLIHQSITGLYETRIDLSQLGGDGGGGSEAAAKPAPGGMNPLQLLQPLPAEIKGTKLLAHWNSGATITCIPESFLEDEQPIKKTLIKTIHGEKQQNVYYVTFKVKGRKVEAEVIASPYEYILLSPTDVPWLTQQPLQLTILVPLQEYQEKILSKTALPEDQKQQLKTLFVKYDNLWQHWENQVGHRKIRPHNIATGDYPPRPQKQYPINPKAKPSIQIVIDDLLKQGVLTPQNSTMNTPVYPVPKPDGRWRMVLDYREVNKTIPLTAAQNQHSAGILATIVRQKYKTTLDLANGFWAHPITPESYWLTAFTWQGKQYCWTRLPQGFLNSPALFNADVVDLLKEIPNVQVYVDDIYLSHDDPKEHVQQLEKVFQILLQAGYVVSLKKSEIGQKTVEFLGFNITKEGRGLTDTFKTKLLNITPPKDLKQLQSILGKLNFARNFIPNFAELVQPLYNLIAPAKGKYIEWSEENTKQLNMVIEALNTASNLEERLPEQRLVIKVNTSPSAGYVRYYNETGKKPIMYLNYVFSKAELKFSMLEKLLTTMHKALIKAMDLAMGQEILVYSPIVSMTKIQKTPLPERKALPIRWITWMTYLEDPRIQFHYDKTLPELKHIPDVYTSSQSPVKHPSQYEGVFYTDGSAIKSPDPTKSNNAGMGIVHATYKPEYQVLNQWSIPLGNHTAQMAEIAAVEFACKKALKIPGPVLVITDSFYVAESANKELPYWKSNGFVNNKKKPLKHISKWKSIAECLSMKPDITIQHEKGISLQIPVFILKGNALADKLATQGSYVVNAGKRTADGSEFEKRTADGSEFESPKKKAKVE

SEQ ID NO: 7196 - protein, 2218 aa, synthetic construct
MPAAKRVKLDGGDKKYSIGLDIGTNSVGWAVITDEYKVPSKKFKVLGNTDRHSIKKNLIGALLFDSGETAEATRLKRTARRRYTRRKNRICYLQEIFSNEMAKVDDSFFHRLEESFLVEEDKKHERHPIFGNIVDEVAYHEKYPTIYHLRKKLVDSTDKADLRLIYLALAHMIKFRGHFLIEGDLNPDNSDVDKLFIQLVQTYNQLFEENPINASGVDAKAILSARLSKSRRLENLIAQLPGEKKNGLFGNLIALSLGLTPNFKSNFDLAEDAKLQLSKDTYDDDLDNLLAQIGDQYADLFLAAKNLSDAILLSDILRVNTEITKAPLSASMIKRYDEHHQDLTLLKALVRQQLPEKYKEIFFDQSKNGYAGYIDGGASQEEFYKFIKPILEKMDGTEELLVKLNREDLLRKQRTFDNGSIPHQIHLGELHAILRRQEDFYPFLKDNREKIEKILTFRIPYYVGPLARGNSRFAWMTRKSEETITPWNFEEVVDKGASAQSFIERMTNFDKNLPNEKVLPKHSLLYEYFTVYNELTKVKYVTEGMRKPAFLSGEQKKAIVDLLFKTNRKVTVKQLKEDYFKKIECFDSVEISGVEDRFNASLGTYHDLLKIIKDKDFLDNEENEDILEDIVLTLTLFEDREMIEERLKTYAHLFDDKVMKQLKRRRYTGWGRLSRKLINGIRDKQSGKTILDFLKSDGFANRNFMQLIHDDSLTFKEDIQKAQVSGQGDSLHEHIANLAGSPAIKKGILQTVKVVDELVKVMGRHKPENIVIEMARENQTTQKGQKNSRERMKRIEEGIKELGSQILKEHPVENTQLQNEKLYLYYLQNGRDMYVDQELDINRLSDYDVDHIVPQSFLKDDSIDNKVLTRSDKARGKSDNVPSEEVVKKMKNYWRQLLNAKLITQRKFDNLTKAERGGLSELDKAGFIKRQLVETRQITKHVAQILDSRMNTKYDENDKLIREVKVITLKSKLVSDFRKDFQFYKVREINNYHHAHDAYLNAVVGTALIKKYPKLESEFVYGDYKVYDVRKMIAKSEQEIGKATAKYFFYSNIMNFFKTEITLANGEIRKRPLIETNGETGEIVWDKGRDFATVRKVLSMPQVNIVKKTEVQTGGFSKESILPKRNSDKLIARKKDWDPKKYGGFDSPTVAYSVLVVAKVEKGKSKKLKSVKELLGITIMERSSFEKNPIDFLEAKGYKEVKKDLIIKLPKYSLFELENGRKRMLASAGELQKGNELALPSKYVNFLYLASHYEKLKGSPEDNEQKQLFVEQHKHYLDEIIEQISEFSKRVILADANLDKVLSAYNKHRDKPIREQAENIIHLFTLTNLGAPAAFKYFDTTIDRKRYTSTKEVLDATLIHQSITGLYETRIDLSQLGGDGGGGSEAAAKPAPGGTLGDQGSRGSDPLPEPRVTLTVEGIPTEFLVNTGAEHSVLTKPMGKMGSKRTVVAGATGSKVYPWTTKRLLKIGQKQVTHSFLVIPECPAPLLGRDLLTKLKAQIQFSTEGPQVTWEDRPAMCLVLNLEEEYRLHEKPVPPSIDPSWLQLFPMVWAEKAGMGLANQVPPVVVELKSDASPVAVRQYPMSKEAREGIRPHIQRFLDLGILVPCQSPWNTPLLPVKKPGTNDYRPVQDLREVNKRVQDIHPTVPNPYNLLSSLPPSHTWYSVLDLKDAFFCLKLHPNSQPLFAFEWRDPEKGNTGQLTWTRLPQGFKNSPTLFNEALHRDLASFRALNPQVVMLQYVDDLLVAAPTYRDCKEGTRRLLQELSKLGYRVSAKKAQLCREEVTYLGYLLKGGKRWLTPARKATVMKIPTPTTPRQVREFLGTAGFCRLWIPGFASLAAPLYPLTRPKVPFTWTEAHQEAFGRIKEALLSAPALALPDLTKPFALYVDEKEGVARGVLTQTLGPWRRPVAYLSKKLDPVASGWPTCLKAIAAVALLLKDADKLTLGQNVLVIAPHNLESIVRQPPDRWMTNARMTHYQSLLLNERVSFAPPAILNPATLLPVESDDTPIHICSEILAEETGTRPDLRDQPLPGVPAWYTDGSSFIMDGRRQAGAAIVDNKRTVWASNLPEGTSAQKAELIALTQALRLAEGKSINIYTDSRYAFATAHVHGAIYKQRGWLTSAGKDIKNKEEILALLEAIHLPKRVAIIHCPGHQRGTDPVATGNRKADEAAKQAAQSTRILTETTKNAGKRTADGSEFEKRTADGSEFESPKKKAKVE

SEQ ID NO: 7197 - protein, 2218 aa, synthetic construct
MPAAKRVKLDGGDKKYSIGLDIGTNSVGWAVITDEYKVPSKKFKVLGNTDRHSIKKNLIGALLFDSGETAEATRLKRTARRRYTRRKNRICYLQEIFSNEMAKVDDSFFHRLEESFLVEEDKKHERHPIFGNIVDEVAYHEKYPTIYHLRKKLVDSTDKADLRLIYLALAHMIKFRGHFLIEGDLNPDNSDVDKLFIQLVQTYNQLFEENPINASGVDAKAILSARLSKSRRLENLIAQLPGEKKNGLFGNLIALSLGLTPNFKSNFDLAEDAKLQLSKDTYDDDLDNLLAQIGDQYADLFLAAKNLSDAILLSDILRVNTEITKAPLSASMIKRYDEHHQDLTLLKALVRQQLPEKYKEIFFDQSKNGYAGYIDGGASQEEFYKFIKPILEKMDGTEELLVKLNREDLLRKQRTFDNGSIPHQIHLGELHAILRRQEDFYPFLKDNREKIEKILTFRIPYYVGPLARGNSRFAWMTRKSEETITPWNFEEVVDKGASAQSFIERMTNFDKNLPNEKVLPKHSLLYEYFTVYNELTKVKYVTEGMRKPAFLSGEQKKAIVDLLFKTNRKVTVKQLKEDYFKKIECFDSVEISGVEDRFNASLGTYHDLLKIIKDKDFLDNEENEDILEDIVLTLTLFEDREMIEERLKTYAHLFDDKVMKQLKRRRYTGWGRLSRKLINGIRDKQSGKTILDFLKSDGFANRNFMQLIHDDSLTFKEDIQKAQVSGQGDSLHEHIANLAGSPAIKKGILQTVKVVDELVKVMGRHKPENIVIEMARENQTTQKGQKNSRERMKRIEEGIKELGSQILKEHPVENTQLQNEKLYLYYLQNGRDMYVDQELDINRLSDYDVDHIVPQSFLKDDSIDNKVLTRSDKARGKSDNVPSEEVVKKMKNYWRQLLNAKLITQRKFDNLTKAERGGLSELDKAGFIKRQLVETRQITKHVAQILDSRMNTKYDENDKLIREVKVITLKSKLVSDFRKDFQFYKVREINNYHHAHDAYLNAVVGTALIKKYPKLESEFVYGDYKVYDVRKMIAKSEQEIGKATAKYFFYSNIMNFFKTEITLANGEIRKRPLIETNGETGEIVWDKGRDFATVRKVLSMPQVNIVKKTEVQTGGFSKESILPKRNSDKLIARKKDWDPKKYGGFDSPTVAYSVLVVAKVEKGKSKKLKSVKELLGITIMERSSFEKNPIDFLEAKGYKEVKKDLIIKLPKYSLFELENGRKRMLASAGELQKGNELALPSKYVNFLYLASHYEKLKGSPEDNEQKQLFVEQHKHYLDEIIEQISEFSKRVILADANLDKVLSAYNKHRDKPIREQAENIIHLFTLTNLGAPAAFKYFDTTIDRKRYTSTKEVLDATLIHQSITGLYETRIDLSQLGGDGGGGSEAAAKPAPGGTLGDQGSRGSDPLPEPRVTLTVEGIPTEFLVNTGAEHSVLTKPMGKMGSKRTVVAGATGSKVYPWTTKRLLKIGQKQVTHSFLVIPECPAPLLGRDLLTKLKAQIQFSTEGPQVTWEDRPAMCLVLNLEEEYRLHEKPVPPSIDPSWLQLFPMVWAEKAGMGLANQVPPVVVELKSDASPVAVRQYPMSKEAREGIRPHIQRFLDLGILVPCQSPWNTPLLPVKKPGTNDYRPVQDLREVNKRVQDIHPTVPNPYNLLSSLPPSHTWYSVLDLKDAFFCLKLHPNSQPLFAFEWRDPEKGNTGQLTWTRLPQGFKNSPTLFNEALHRDLASFRALNPQVVMLQYVDDLLVAAPTYRDCKEGTRRLLQELSKLGYRVSAKKAQLCREEVTYLGYLLKGGKRWLTPARKATVMKIPTPTTPRQVREFLGKAGFCRLFIPGFASLAAPLYPLTRPKVPFTWTEAHQEAFGRIKEALLSAPALALPDLTKPFALYVDEKEGVARGVLTQTLGPWRRPVAYLSKKLDPVASGWPTCLKAIAAVALLLKDADKLTLGQNVLVIAPHNLESIVRQPPDRWMTNARMTHYQSLLLNERVSFAPPAILNPATLLPVESDDTPIHICSEILAEETGTRPDLRDQPLPGVPAWYTDGSSFIMDGRRQAGAAIVDNKRTVWASNLPEGTSAQKAELIALTQALRLAEGKSINIYTDSRYAFATAHVHGAIYKQRGWLTSAGKDIKNKEEILALLEAIHLPKRVAIIHCPGHQRGTDPVATGNRKADEAAKQAAQSTRILTETTKNAGKRTADGSEFEKRTADGSEFESPKKKAKVE

SEQ ID NO: 7198 - protein, 2096 aa, synthetic construct
MPAAKRVKLDGGDKKYSIGLDIGTNSVGWAVITDEYKVPSKKFKVLGNTDRHSIKKNLIGALLFDSGETAEATRLKRTARRRYTRRKNRICYLQEIFSNEMAKVDDSFFHRLEESFLVEEDKKHERHPIFGNIVDEVAYHEKYPTIYHLRKKLVDSTDKADLRLIYLALAHMIKFRGHFLIEGDLNPDNSDVDKLFIQLVQTYNQLFEENPINASGVDAKAILSARLSKSRRLENLIAQLPGEKKNGLFGNLIALSLGLTPNFKSNFDLAEDAKLQLSKDTYDDDLDNLLAQIGDQYADLFLAAKNLSDAILLSDILRVNTEITKAPLSASMIKRYDEHHQDLTLLKALVRQQLPEKYKEIFFDQSKNGYAGYIDGGASQEEFYKFIKPILEKMDGTEELLVKLNREDLLRKQRTFDNGSIPHQIHLGELHAILRRQEDFYPFLKDNREKIEKILTFRIPYYVGPLARGNSRFAWMTRKSEETITPWNFEEVVDKGASAQSFIERMTNFDKNLPNEKVLPKHSLLYEYFTVYNELTKVKYVTEGMRKPAFLSGEQKKAIVDLLFKTNRKVTVKQLKEDYFKKIECFDSVEISGVEDRFNASLGTYHDLLKIIKDKDFLDNEENEDILEDIVLTLTLFEDREMIEERLKTYAHLFDDKVMKQLKRRRYTGWGRLSRKLINGIRDKQSGKTILDFLKSDGFANRNFMQLIHDDSLTFKEDIQKAQVSGQGDSLHEHIANLAGSPAIKKGILQTVKVVDELVKVMGRHKPENIVIEMARENQTTQKGQKNSRERMKRIEEGIKELGSQILKEHPVENTQLQNEKLYLYYLQNGRDMYVDQELDINRLSDYDVDHIVPQSFLKDDSIDNKVLTRSDKARGKSDNVPSEEVVKKMKNYWRQLLNAKLITQRKFDNLTKAERGGLSELDKAGFIKRQLVETRQITKHVAQILDSRMNTKYDENDKLIREVKVITLKSKLVSDFRKDFQFYKVREINNYHHAHDAYLNAVVGTALIKKYPKLESEFVYGDYKVYDVRKMIAKSEQEIGKATAKYFFYSNIMNFFKTEITLANGEIRKRPLIETNGETGEIVWDKGRDFATVRKVLSMPQVNIVKKTEVQTGGFSKESILPKRNSDKLIARKKDWDPKKYGGFDSPTVAYSVLVVAKVEKGKSKKLKSVKELLGITIMERSSFEKNPIDFLEAKGYKEVKKDLIIKLPKYSLFELENGRKRMLASAGELQKGNELALPSKYVNFLYLASHYEKLKGSPEDNEQKQLFVEQHKHYLDEIIEQISEFSKRVILADANLDKVLSAYNKHRDKPIREQAENIIHLFTLTNLGAPAAFKYFDTTIDRKRYTSTKEVLDATLIHQSITGLYETRIDLSQLGGDGGGGSEAAAKPAPGGTLNLEDEYRLYETSAEPEVSPGSTWLSDFPQAWAETGGMGLAVRQAPLIIPLKATSTPVSIKQYPMSQEAKLGIKPHIQRLLDQGILVPCQSPWNTPLLPVKKPGTNDYRPVQDLREVNKRVEDIHPTVPNPYNLLSGLPPSHRWYTVLDLKDAFFCLRLHPTSQPLFAFEWRDPGMGISGQLTWTRLPQGFKNSPTLFNEALHRDLADFRIQHPDLILLQYVDDILLAATSELDCQQGTRALLLTLGNLGYRASAKKAQLCQKQVKYLGYLLKEGQRWLTEARKETVMGQPTPKTPRQLREFLGKAGFCRLFIPGFAEMAAPLYPLTKPGTLFNWGPDQQKAYQEIKQALLTAPALGLPDLTKPFELFVDEKQGYAKGVLTQKLGPWRRPVAYLSKKLDPVAAGWPPCLRMVAAIAVLRKDAGKLTMGQPLVILAPHAVEALVKQPPDRWLSNARMTHYQAMLLDTDRVQFGPVVALNPATLLPLPEEGAPHDCLEILAETHGTRPDLTDQPIPDADHTWYTDGSSFLQEGQRKAGAAVTTETEVIWARALPAGTSAQRAELIALTQALKMAEGKRLNVYTDSRYAFATAHIHGEIYRRRGWLTSEGREIKNKSEILALLKALFLPKRLSIIHCLGHQKGDSAEARGNRLADQAAREAAIKTPPDTSTLLAGKRTADGSEFEKRTADGSEFESPKKKAKVE

SEQ ID NO: 7199 - protein, 2096 aa, synthetic construct
MPAAKRVKLDGGDKKYSIGLDIGTNSVGWAVITDEYKVPSKKFKVLGNTDRHSIKKNLIGALLFDSGETAEATRLKRTARRRYTRRKNRICYLQEIFSNEMAKVDDSFFHRLEESFLVEEDKKHERHPIFGNIVDEVAYHEKYPTIYHLRKKLVDSTDKADLRLIYLALAHMIKFRGHFLIEGDLNPDNSDVDKLFIQLVQTYNQLFEENPINASGVDAKAILSARLSKSRRLENLIAQLPGEKKNGLFGNLIALSLGLTPNFKSNFDLAEDAKLQLSKDTYDDDLDNLLAQIGDQYADLFLAAKNLSDAILLSDILRVNTEITKAPLSASMIKRYDEHHQDLTLLKALVRQQLPEKYKEIFFDQSKNGYAGYIDGGASQEEFYKFIKPILEKMDGTEELLVKLNREDLLRKQRTFDNGSIPHQIHLGELHAILRRQEDFYPFLKDNREKIEKILTFRIPYYVGPLARGNSRFAWMTRKSEETITPWNFEEVVDKGASAQSFIERMTNFDKNLPNEKVLPKHSLLYEYFTVYNELTKVKYVTEGMRKPAFLSGEQKKAIVDLLFKTNRKVTVKQLKEDYFKKIECFDSVEISGVEDRFNASLGTYHDLLKIIKDKDFLDNEENEDILEDIVLTLTLFEDREMIEERLKTYAHLFDDKVMKQLKRRRYTGWGRLSRKLINGIRDKQSGKTILDFLKSDGFANRNFMQLIHDDSLTFKEDIQKAQVSGQGDSLHEHIANLAGSPAIKKGILQTVKVVDELVKVMGRHKPENIVIEMARENQTTQKGQKNSRERMKRIEEGIKELGSQILKEHPVENTQLQNEKLYLYYLQNGRDMYVDQELDINRLSDYDVDHIVPQSFLKDDSIDNKVLTRSDKARGKSDNVPSEEVVKKMKNYWRQLLNAKLITQRKFDNLTKAERGGLSELDKAGFIKRQLVETRQITKHVAQILDSRMNTKYDENDKLIREVKVITLKSKLVSDFRKDFQFYKVREINNYHHAHDAYLNAVVGTALIKKYPKLESEFVYGDYKVYDVRKMIAKSEQEIGKATAKYFFYSNIMNFFKTEITLANGEIRKRPLIETNGETGEIVWDKGRDFATVRKVLSMPQVNIVKKTEVQTGGFSKESILPKRNSDKLIARKKDWDPKKYGGFDSPTVAYSVLVVAKVEKGKSKKLKSVKELLGITIMERSSFEKNPIDFLEAKGYKEVKKDLIIKLPKYSLFELENGRKRMLASAGELQKGNELALPSKYVNFLYLASHYEKLKGSPEDNEQKQLFVEQHKHYLDEIIEQISEFSKRVILADANLDKVLSAYNKHRDKPIREQAENIIHLFTLTNLGAPAAFKYFDTTIDRKRYTSTKEVLDATLIHQSITGLYETRIDLSQLGGDGGGGSEAAAKPAPGGTLNIEDEYRLHETSKGPDVPLGSTWLSDFPQAWAETGGMGLAFRQAPLIISLKATSTPVSIKQYPMSQEARLGIKPHIQRLLDQGILVPCQSPWNTPLLPVKKPGTNDYRPVQDLREVNKRVEDIHPTVPNPYNLLSGLPPSHQWYTVLDLKDAFFCLRLHPTSQSLFAFEWKDPEMGISGQLTWTRLPQGFKNSPTLFNEALHRDLADFRIQHPDLILLQYVDDLLLAATSELDCQQGTRALLQTLGDLGYRASAKKAQICQKQVKYLGYLLKEGQRWLTEARKETVMGQPTPKTPRQLREFLGKAGLCRLFIPGFAEMAAPLYPLTKPGTLFKWGPDQQKAYQEIKQALLTAPALGLPDLTKPFELFVDEKQGYAKGVLTQKLGPWRRPVAYLSKKLDPVAAGWPPCLRMVAAIAVLTKDVGKLTMGQPLVILAPHAVEALVKQPPDRWLSNARMTHYQALLLDTDRVQFGPIVALNPATLLPLPEEGLQHDCLDILAEAHGTRPDLTDQPLPDADHTWYTDGSSFLQEGQRRAGAAVTTETEVIWAKALPAGTSAQRAELIALTQALKMAAGKKLNVYTDSRYAFATAHIHGEIYRRRGWLTSEGKEIKNKDEILALLKALFLPKRLSIIHCPGHQKGNHAEARGNRMADQAAREVATRETPETSTLLAGKRTADGSEFEKRTADGSEFESPKKKAKVE

SEQ ID NO: 7200 - protein, 2096 aa, synthetic construct
MPAAKRVKLDGGDKKYSIGLDIGTNSVGWAVITDEYKVPSKKFKVLGNTDRHSIKKNLIGALLFDSGETAEATRLKRTARRRYTRRKNRICYLQEIFSNEMAKVDDSFFHRLEESFLVEEDKKHERHPIFGNIVDEVAYHEKYPTIYHLRKKLVDSTDKADLRLIYLALAHMIKFRGHFLIEGDLNPDNSDVDKLFIQLVQTYNQLFEENPINASGVDAKAILSARLSKSRRLENLIAQLPGEKKNGLFGNLIALSLGLTPNFKSNFDLAEDAKLQLSKDTYDDDLDNLLAQIGDQYADLFLAAKNLSDAILLSDILRVNTEITKAPLSASMIKRYDEHHQDLTLLKALVRQQLPEKYKEIFFDQSKNGYAGYIDGGASQEEFYKFIKPILEKMDGTEELLVKLNREDLLRKQRTFDNGSIPHQIHLGELHAILRRQEDFYPFLKDNREKIEKILTFRIPYYVGPLARGNSRFAWMTRKSEETITPWNFEEVVDKGASAQSFIERMTNFDKNLPNEKVLPKHSLLYEYFTVYNELTKVKYVTEGMRKPAFLSGEQKKAIVDLLFKTNRKVTVKQLKEDYFKKIECFDSVEISGVEDRFNASLGTYHDLLKIIKDKDFLDNEENEDILEDIVLTLTLFEDREMIEERLKTYAHLFDDKVMKQLKRRRYTGWGRLSRKLINGIRDKQSGKTILDFLKSDGFANRNFMQLIHDDSLTFKEDIQKAQVSGQGDSLHEHIANLAGSPAIKKGILQTVKVVDELVKVMGRHKPENIVIEMARENQTTQKGQKNSRERMKRIEEGIKELGSQILKEHPVENTQLQNEKLYLYYLQNGRDMYVDQELDINRLSDYDVDHIVPQSFLKDDSIDNKVLTRSDKARGKSDNVPSEEVVKKMKNYWRQLLNAKLITQRKFDNLTKAERGGLSELDKAGFIKRQLVETRQITKHVAQILDSRMNTKYDENDKLIREVKVITLKSKLVSDFRKDFQFYKVREINNYHHAHDAYLNAVVGTALIKKYPKLESEFVYGDYKVYDVRKMIAKSEQEIGKATAKYFFYSNIMNFFKTEITLANGEIRKRPLIETNGETGEIVWDKGRDFATVRKVLSMPQVNIVKKTEVQTGGFSKESILPKRNSDKLIARKKDWDPKKYGGFDSPTVAYSVLVVAKVEKGKSKKLKSVKELLGITIMERSSFEKNPIDFLEAKGYKEVKKDLIIKLPKYSLFELENGRKRMLASAGELQKGNELALPSKYVNFLYLASHYEKLKGSPEDNEQKQLFVEQHKHYLDEIIEQISEFSKRVILADANLDKVLSAYNKHRDKPIREQAENIIHLFTLTNLGAPAAFKYFDTTIDRKRYTSTKEVLDATLIHQSITGLYETRIDLSQLGGDGGGGSEAAAKPAPGGTLNIEDEHRLHETSKEPDVSLGSTWLSDFPQAWAETGGMGLAVRQAPLIIPLKATSTPVSIKQYPMSQEARLGIKPHIQRLLDQGILVPCQSPWNTPLLPVKKPGTNDYRPVQDLREVNKRVEDIHPTVPNPYNLLSGLPPSHQWYTVLDLKDAFFCLRLHPTSQPLFAFEWRDPEMGISGQLTWTRLPQGFKNSPTLFDEALHRDLADFRIQHPDLILLQYVDDLLLAATSELDCQQGTRALLQTLGNLGYRASAKKAQICQKQVKYLGYLLKEGQRWLTEARKETVMGQPTPKTPRQLREFLGTAGFCRLWIPGFAEMAAPLYPLTKTGTLFNWGPDQQKAYQEIKQALLTAPALGLPDLTKPFELFVDEKQGYAKGVLTQKLGPWRRPVAYLSKKLDPVAAGWPPCLRMVAAIAVLTKDAGKLTMGQPLVILAPHAVEALVKQPPDRWLSNARMTHYQALLLDTDRVQFGPVVALNPATLLPLPEEGLQHNCLDILAEAHGTRPDLTDQPLPDADHTWYTDGSSLLQEGQRKAGAAVTTETEVIWAKALPAGTSAQRAELIALTQALKMAEGKKLNVYTDSRYAFATAHIHGEIYRRRGLLTSEGKEIKNKDEILALLKALFLPKRLSIIHCPGHQKGHSAEARGNRMADQAARKAAITETPDTSTLLAGKRTADGSEFEKRTADGSEFESPKKKAKVE

SEQ ID NO: 7201 - protein, 2090 aa, synthetic construct
MPAAKRVKLDGGDKKYSIGLDIGTNSVGWAVITDEYKVPSKKFKVLGNTDRHSIKKNLIGALLFDSGETAEATRLKRTARRRYTRRKNRICYLQEIFSNEMAKVDDSFFHRLEESFLVEEDKKHERHPIFGNIVDEVAYHEKYPTIYHLRKKLVDSTDKADLRLIYLALAHMIKFRGHFLIEGDLNPDNSDVDKLFIQLVQTYNQLFEENPINASGVDAKAILSARLSKSRRLENLIAQLPGEKKNGLFGNLIALSLGLTPNFKSNFDLAEDAKLQLSKDTYDDDLDNLLAQIGDQYADLFLAAKNLSDAILLSDILRVNTEITKAPLSASMIKRYDEHHQDLTLLKALVRQQLPEKYKEIFFDQSKNGYAGYIDGGASQEEFYKFIKPILEKMDGTEELLVKLNREDLLRKQRTFDNGSIPHQIHLGELHAILRRQEDFYPFLKDNREKIEKILTFRIPYYVGPLARGNSRFAWMTRKSEETITPWNFEEVVDKGASAQSFIERMTNFDKNLPNEKVLPKHSLLYEYFTVYNELTKVKYVTEGMRKPAFLSGEQKKAIVDLLFKTNRKVTVKQLKEDYFKKIECFDSVEISGVEDRFNASLGTYHDLLKIIKDKDFLDNEENEDILEDIVLTLTLFEDREMIEERLKTYAHLFDDKVMKQLKRRRYTGWGRLSRKLINGIRDKQSGKTILDFLKSDGFANRNFMQLIHDDSLTFKEDIQKAQVSGQGDSLHEHIANLAGSPAIKKGILQTVKVVDELVKVMGRHKPENIVIEMARENQTTQKGQKNSRERMKRIEEGIKELGSQILKEHPVENTQLQNEKLYLYYLQNGRDMYVDQELDINRLSDYDVDHIVPQSFLKDDSIDNKVLTRSDKARGKSDNVPSEEVVKKMKNYWRQLLNAKLITQRKFDNLTKAERGGLSELDKAGFIKRQLVETRQITKHVAQILDSRMNTKYDENDKLIREVKVITLKSKLVSDFRKDFQFYKVREINNYHHAHDAYLNAVVGTALIKKYPKLESEFVYGDYKVYDVRKMIAKSEQEIGKATAKYFFYSNIMNFFKTEITLANGEIRKRPLIETNGETGEIVWDKGRDFATVRKVLSMPQVNIVKKTEVQTGGFSKESILPKRNSDKLIARKKDWDPKKYGGFDSPTVAYSVLVVAKVEKGKSKKLKSVKELLGITIMERSSFEKNPIDFLEAKGYKEVKKDLIIKLPKYSLFELENGRKRMLASAGELQKGNELALPSKYVNFLYLASHYEKLKGSPEDNEQKQLFVEQHKHYLDEIIEQISEFSKRVILADANLDKVLSAYNKHRDKPIREQAENIIHLFTLTNLGAPAAFKYFDTTIDRKRYTSTKEVLDATLIHQSITGLYETRIDLSQLGGDGGGGSEAAAKPAPGGTLQLDDEYRLYSPLVKPDQNIQFWLEQFPQAWAETAGMGLAKQVPPQVIQLKASATPVSVRQYPLSKEAQEGIRPHVQRLIQQGILVPVQSPWNTPLLPVRKPGTNDYRPVQDLREVNKRVQDIHPTVPNPYNLLCALPPQRSWYTVLDLKDAFFCLRLHPTSQPLFAFEWRDPGTGRTGQLTWTRLPQGFKNSPTIFDEALHRDLANFRIQHPQVTLLQYVDDLLLAGATKQDCLEGTKALLLELSDLGYRASAKKAQICRREVTYLGYSLRDGQRWLTEARKKTVVQIPAPTTAKQVREFLGTAGFCRLWIPGFATLAAPLYPLTKEKGEFSWAPEHQKAFDAIKKALLSAPALALPDVTKPFTLYVDERKGVARGVLTQTLGPWRRPVAYLSKKLDPVASGWPVCLKAIAAVAILVKDADKLTLGQNITVIAPHALENIVRQPPDRWMTNARMTHYQSLLLTERVTFAPPAALNPATLLPEETDEPVTHDCHQLLIEETGVRKDLTDIPLTGEVLTWFTDGSSYVVEGKRMAGAAVVDGTRTIWASSLPEGTSAQKAELMALTQALRLAEGKSINIYTDSRYAFATAHVHGAIYKQRGLLTSAGREIKNKEEILSLLEALHLPKRLAIIHCPGHQKAKDPISRGNQMADRVAKQAAQGVNLLAGKRTADGSEFEKRTADGSEFESPKKKAKVE

SEQ ID NO: 7202 - protein, 2096 aa, synthetic construct
MPAAKRVKLDGGDKKYSIGLDIGTNSVGWAVITDEYKVPSKKFKVLGNTDRHSIKKNLIGALLFDSGETAEATRLKRTARRRYTRRKNRICYLQEIFSNEMAKVDDSFFHRLEESFLVEEDKKHERHPIFGNIVDEVAYHEKYPTIYHLRKKLVDSTDKADLRLIYLALAHMIKFRGHFLIEGDLNPDNSDVDKLFIQLVQTYNQLFEENPINASGVDAKAILSARLSKSRRLENLIAQLPGEKKNGLFGNLIALSLGLTPNFKSNFDLAEDAKLQLSKDTYDDDLDNLLAQIGDQYADLFLAAKNLSDAILLSDILRVNTEITKAPLSASMIKRYDEHHQDLTLLKALVRQQLPEKYKEIFFDQSKNGYAGYIDGGASQEEFYKFIKPILEKMDGTEELLVKLNREDLLRKQRTFDNGSIPHQIHLGELHAILRRQEDFYPFLKDNREKIEKILTFRIPYYVGPLARGNSRFAWMTRKSEETITPWNFEEVVDKGASAQSFIERMTNFDKNLPNEKVLPKHSLLYEYFTVYNELTKVKYVTEGMRKPAFLSGEQKKAIVDLLFKTNRKVTVKQLKEDYFKKIECFDSVEISGVEDRFNASLGTYHDLLKIIKDKDFLDNEENEDILEDIVLTLTLFEDREMIEERLKTYAHLFDDKVMKQLKRRRYTGWGRLSRKLINGIRDKQSGKTILDFLKSDGFANRNFMQLIHDDSLTFKEDIQKAQVSGQGDSLHEHIANLAGSPAIKKGILQTVKVVDELVKVMGRHKPENIVIEMARENQTTQKGQKNSRERMKRIEEGIKELGSQILKEHPVENTQLQNEKLYLYYLQNGRDMYVDQELDINRLSDYDVDHIVPQSFLKDDSIDNKVLTRSDKARGKSDNVPSEEVVKKMKNYWRQLLNAKLITQRKFDNLTKAERGGLSELDKAGFIKRQLVETRQITKHVAQILDSRMNTKYDENDKLIREVKVITLKSKLVSDFRKDFQFYKVREINNYHHAHDAYLNAVVGTALIKKYPKLESEFVYGDYKVYDVRKMIAKSEQEIGKATAKYFFYSNIMNFFKTEITLANGEIRKRPLIETNGETGEIVWDKGRDFATVRKVLSMPQVNIVKKTEVQTGGFSKESILPKRNSDKLIARKKDWDPKKYGGFDSPTVAYSVLVVAKVEKGKSKKLKSVKELLGITIMERSSFEKNPIDFLEAKGYKEVKKDLIIKLPKYSLFELENGRKRMLASAGELQKGNELALPSKYVNFLYLASHYEKLKGSPEDNEQKQLFVEQHKHYLDEIIEQISEFSKRVILADANLDKVLSAYNKHRDKPIREQAENIIHLFTLTNLGAPAAFKYFDTTIDRKRYTSTKEVLDATLIHQSITGLYETRIDLSQLGGDGGGGSEAAAKPAPGGTLNIEDEYRLHETSKEPDVPLGSTWLSDFPQAWAETGGMGLAVRQAPLIIPLKATSTPVSIKQYPMSQEARLGIKPHIQRLLDQGILVPCQSPWNTPLLPVKKPGTNDYRPVQDLREVNKRVEDIHPTVPNPYNLLSGLPPSHQWYTVLDLKDAFFCLRLHPTSQPLFAFEWRDPEMGISGQLTWTRLPQGFKNSPTLFDEALHRDLADFRIQHPDLILLQYVDDLLLAATSEQDCQRGTRALLQTLGNLGYRASAKKAQICQKQVKYLGYLLKEGQRWLTEARKETVMGQPTPKTPRQLREFLGTAGFCRLWIPGFAEMAAPLYPLTKTGTLFNWGPDQQKAYQEIKQALLTAPALGLPDLTKPFELFVDEKQGYAKGVLTQKLGPWRRPVAYLSKKLDPVAAGWPPCLRMVAAIAVLTKDAGKLTMGQPLVILAPHAVEALVKQPPDRWLSNARMTHYQAMLLDTDRVQFGPVVALNPATLLPLPEKEAPHDCLEILAETHGTRPDLTDQPIPDADYTWYTDGSSFLQEGQRRAGAAVTTETEVIWARALPAGTSAQRAELIALTQALKMAEGKKLNVYTDSRYAFATAHVHGEIYRRRGLLTSEGREIKNKNEILALLKALFLPKRLSIIHCPGHQKGNSAEARGNRMADQAAREAAMKAVLETSTLLAGKRTADGSEFEKRTADGSEFESPKKKAKVE

SEQ ID NO: 7203 - protein, 2096 aa, synthetic construct
MPAAKRVKLDGGDKKYSIGLDIGTNSVGWAVITDEYKVPSKKFKVLGNTDRHSIKKNLIGALLFDSGETAEATRLKRTARRRYTRRKNRICYLQEIFSNEMAKVDDSFFHRLEESFLVEEDKKHERHPIFGNIVDEVAYHEKYPTIYHLRKKLVDSTDKADLRLIYLALAHMIKFRGHFLIEGDLNPDNSDVDKLFIQLVQTYNQLFEENPINASGVDAKAILSARLSKSRRLENLIAQLPGEKKNGLFGNLIALSLGLTPNFKSNFDLAEDAKLQLSKDTYDDDLDNLLAQIGDQYADLFLAAKNLSDAILLSDILRVNTEITKAPLSASMIKRYDEHHQDLTLLKALVRQQLPEKYKEIFFDQSKNGYAGYIDGGASQEEFYKFIKPILEKMDGTEELLVKLNREDLLRKQRTFDNGSIPHQIHLGELHAILRRQEDFYPFLKDNREKIEKILTFRIPYYVGPLARGNSRFAWMTRKSEETITPWNFEEVVDKGASAQSFIERMTNFDKNLPNEKVLPKHSLLYEYFTVYNELTKVKYVTEGMRKPAFLSGEQKKAIVDLLFKTNRKVTVKQLKEDYFKKIECFDSVEISGVEDRFNASLGTYHDLLKIIKDKDFLDNEENEDILEDIVLTLTLFEDREMIEERLKTYAHLFDDKVMKQLKRRRYTGWGRLSRKLINGIRDKQSGKTILDFLKSDGFANRNFMQLIHDDSLTFKEDIQKAQVSGQGDSLHEHIANLAGSPAIKKGILQTVKVVDELVKVMGRHKPENIVIEMARENQTTQKGQKNSRERMKRIEEGIKELGSQILKEHPVENTQLQNEKLYLYYLQNGRDMYVDQELDINRLSDYDVDHIVPQSFLKDDSIDNKVLTRSDKARGKSDNVPSEEVVKKMKNYWRQLLNAKLITQRKFDNLTKAERGGLSELDKAGFIKRQLVETRQITKHVAQILDSRMNTKYDENDKLIREVKVITLKSKLVSDFRKDFQFYKVREINNYHHAHDAYLNAVVGTALIKKYPKLESEFVYGDYKVYDVRKMIAKSEQEIGKATAKYFFYSNIMNFFKTEITLANGEIRKRPLIETNGETGEIVWDKGRDFATVRKVLSMPQVNIVKKTEVQTGGFSKESILPKRNSDKLIARKKDWDPKKYGGFDSPTVAYSVLVVAKVEKGKSKKLKSVKELLGITIMERSSFEKNPIDFLEAKGYKEVKKDLIIKLPKYSLFELENGRKRMLASAGELQKGNELALPSKYVNFLYLASHYEKLKGSPEDNEQKQLFVEQHKHYLDEIIEQISEFSKRVILADANLDKVLSAYNKHRDKPIREQAENIIHLFTLTNLGAPAAFKYFDTTIDRKRYTSTKEVLDATLIHQSITGLYETRIDLSQLGGDGGGGSEAAAKPAPGGTLNIEDEYRLHETSKEPDVPLGSTWLSDFPQAWAETGGMGLAVRQAPLIIPLKATSTPVSIKQYPMSQEARLGIKPHIQRLLDQGILVPCQSPWNTPLLPVKKPGTNDYRPVQDLREVNKRVEDIHPTVPNPYNLLSGLPPSHQWYTVLDLKDAFFCLRLHPTSQPLFAFEWRDPEMGISGQLTWTRLPQGFKNSPTLFNEALHRDLADFRIQHPDLILLQYVDDLLLAATSEQDCQRGTRALLQTLGNLGYRASAKKAQICQKQVKYLGYLLKEGQRWLTEARKETVMGQPTPKTPRQLREFLGTAGFCRLWIPGFAEMAAPLYPLTKPGTLFNWGPDQQKAYQEIKQALLTAPALGLPDLTKPFELFVDEKQGYAKGVLTQKLGPWRRPVAYLSKKLDPVAAGWPPCLRMVAAIAVLTKDAGKLTMGQPLVILAPHAVEALVKQPPDRWLSNARMTHYQAMLLDTDRVQFGPVVALNPATLLPLPEKEAPHDCLEILAETHGTRPDLTDQPIPDADYTWYTDGSSFLQEGQRRAGAAVTTETEVIWARALPAGTSAQRAELIALTQALKMAEGKKLNVYTDSRYAFATAHVHGEIYRRRGWLTSEGREIKNKNEILALLKALFLPKRLSIIHCPGHQKGNSAEARGNRMADQAAREAAMKAVLETSTLLAGKRTADGSEFEKRTADGSEFESPKKKAKVE

SEQ ID NO: 7204 - protein, 2098 aa, synthetic construct
MPAAKRVKLDGGDKKYSIGLDIGTNSVGWAVITDEYKVPSKKFKVLGNTDRHSIKKNLIGALLFDSGETAEATRLKRTARRRYTRRKNRICYLQEIFSNEMAKVDDSFFHRLEESFLVEEDKKHERHPIFGNIVDEVAYHEKYPTIYHLRKKLVDSTDKADLRLIYLALAHMIKFRGHFLIEGDLNPDNSDVDKLFIQLVQTYNQLFEENPINASGVDAKAILSARLSKSRRLENLIAQLPGEKKNGLFGNLIALSLGLTPNFKSNFDLAEDAKLQLSKDTYDDDLDNLLAQIGDQYADLFLAAKNLSDAILLSDILRVNTEITKAPLSASMIKRYDEHHQDLTLLKALVRQQLPEKYKEIFFDQSKNGYAGYIDGGASQEEFYKFIKPILEKMDGTEELLVKLNREDLLRKQRTFDNGSIPHQIHLGELHAILRRQEDFYPFLKDNREKIEKILTFRIPYYVGPLARGNSRFAWMTRKSEETITPWNFEEVVDKGASAQSFIERMTNFDKNLPNEKVLPKHSLLYEYFTVYNELTKVKYVTEGMRKPAFLSGEQKKAIVDLLFKTNRKVTVKQLKEDYFKKIECFDSVEISGVEDRFNASLGTYHDLLKIIKDKDFLDNEENEDILEDIVLTLTLFEDREMIEERLKTYAHLFDDKVMKQLKRRRYTGWGRLSRKLINGIRDKQSGKTILDFLKSDGFANRNFMQLIHDDSLTFKEDIQKAQVSGQGDSLHEHIANLAGSPAIKKGILQTVKVVDELVKVMGRHKPENIVIEMARENQTTQKGQKNSRERMKRIEEGIKELGSQILKEHPVENTQLQNEKLYLYYLQNGRDMYVDQELDINRLSDYDVDHIVPQSFLKDDSIDNKVLTRSDKARGKSDNVPSEEVVKKMKNYWRQLLNAKLITQRKFDNLTKAERGGLSELDKAGFIKRQLVETRQITKHVAQILDSRMNTKYDENDKLIREVKVITLKSKLVSDFRKDFQFYKVREINNYHHAHDAYLNAVVGTALIKKYPKLESEFVYGDYKVYDVRKMIAKSEQEIGKATAKYFFYSNIMNFFKTEITLANGEIRKRPLIETNGETGEIVWDKGRDFATVRKVLSMPQVNIVKKTEVQTGGFSKESILPKRNSDKLIARKKDWDPKKYGGFDSPTVAYSVLVVAKVEKGKSKKLKSVKELLGITIMERSSFEKNPIDFLEAKGYKEVKKDLIIKLPKYSLFELENGRKRMLASAGELQKGNELALPSKYVNFLYLASHYEKLKGSPEDNEQKQLFVEQHKHYLDEIIEQISEFSKRVILADANLDKVLSAYNKHRDKPIREQAENIIHLFTLTNLGAPAAFKYFDTTIDRKRYTSTKEVLDATLIHQSITGLYETRIDLSQLGGDGGGGSPAPEAAAKGGTAPLEEEYRLFLEAPIQNVTLLEQWKREIPKVWAEINPPGLASTQAPIHVQLLSTALPVRVRQYPITLEAKRSLRETIRKFRAAGILRPVHSPWNTPLLPVRKSGTSEYRMVQDLREVNKRVETIHPTVPNPYTLLSLLPPDRIWYSVLDLKDAFFCIPLAPESQLIFAFEWADAEEGESGQLTWTRLPQGFKNSPTLFNEALNRDLQGFRLDHPSVSLLQYVDDLLIAADTQAACLSATRDLLMTLAELGYRVSGKKAQLCQEEVTYLGFKIHKGSRSLSNSRTQAILQIPVPKTKRQVREFLGKIGYCRLFIPGFAELAQPLYAATRPGNDPLVWGEKEEEAFQSLKLALTQPPALALPSLDKPFQLFVEETSGAAKGVLTQALGPWKRPVAYLSKRLDPVAAGWPRCLRAIAAAALLTREASKLTFGQDIEITSSHNLESLLRSPPDKWLTNARITQYQVLLLDPPRVRFKQTAALNPATLLPETDDTLPIHHCLDTLDSLTSTRPDLTDQPLAQAEATLFTDGSSYIRDGKRYAGAAVVTLDSVIWAEPLPIGTSAQKAELIALTKALEWSKDKSVNIYTDSRYAFATLHVHGMIYRERGWLTAGGKAIKNAPEILALLTAVWLPKRVAVMHCKGHQKDDAPTSTGNRRADEVAREVAIRPLSTQATISAGKRTADGSEFEKRTADGSEFESPKKKAKVE

SEQ ID NO: 7205 - protein, 2218 aa, synthetic construct
MPAAKRVKLDGGDKKYSIGLDIGTNSVGWAVITDEYKVPSKKFKVLGNTDRHSIKKNLIGALLFDSGETAEATRLKRTARRRYTRRKNRICYLQEIFSNEMAKVDDSFFHRLEESFLVEEDKKHERHPIFGNIVDEVAYHEKYPTIYHLRKKLVDSTDKADLRLIYLALAHMIKFRGHFLIEGDLNPDNSDVDKLFIQLVQTYNQLFEENPINASGVDAKAILSARLSKSRRLENLIAQLPGEKKNGLFGNLIALSLGLTPNFKSNFDLAEDAKLQLSKDTYDDDLDNLLAQIGDQYADLFLAAKNLSDAILLSDILRVNTEITKAPLSASMIKRYDEHHQDLTLLKALVRQQLPEKYKEIFFDQSKNGYAGYIDGGASQEEFYKFIKPILEKMDGTEELLVKLNREDLLRKQRTFDNGSIPHQIHLGELHAILRRQEDFYPFLKDNREKIEKILTFRIPYYVGPLARGNSRFAWMTRKSEETITPWNFEEVVDKGASAQSFIERMTNFDKNLPNEKVLPKHSLLYEYFTVYNELTKVKYVTEGMRKPAFLSGEQKKAIVDLLFKTNRKVTVKQLKEDYFKKIECFDSVEISGVEDRFNASLGTYHDLLKIIKDKDFLDNEENEDILEDIVLTLTLFEDREMIEERLKTYAHLFDDKVMKQLKRRRYTGWGRLSRKLINGIRDKQSGKTILDFLKSDGFANRNFMQLIHDDSLTFKEDIQKAQVSGQGDSLHEHIANLAGSPAIKKGILQTVKVVDELVKVMGRHKPENIVIEMARENQTTQKGQKNSRERMKRIEEGIKELGSQILKEHPVENTQLQNEKLYLYYLQNGRDMYVDQELDINRLSDYDVDHIVPQSFLKDDSIDNKVLTRSDKARGKSDNVPSEEVVKKMKNYWRQLLNAKLITQRKFDNLTKAERGGLSELDKAGFIKRQLVETRQITKHVAQILDSRMNTKYDENDKLIREVKVITLKSKLVSDFRKDFQFYKVREINNYHHAHDAYLNAVVGTALIKKYPKLESEFVYGDYKVYDVRKMIAKSEQEIGKATAKYFFYSNIMNFFKTEITLANGEIRKRPLIETNGETGEIVWDKGRDFATVRKVLSMPQVNIVKKTEVQTGGFSKESILPKRNSDKLIARKKDWDPKKYGGFDSPTVAYSVLVVAKVEKGKSKKLKSVKELLGITIMERSSFEKNPIDFLEAKGYKEVKKDLIIKLPKYSLFELENGRKRMLASAGELQKGNELALPSKYVNFLYLASHYEKLKGSPEDNEQKQLFVEQHKHYLDEIIEQISEFSKRVILADANLDKVLSAYNKHRDKPIREQAENIIHLFTLTNLGAPAAFKYFDTTIDRKRYTSTKEVLDATLIHQSITGLYETRIDLSQLGGDGGGGSPAPEAAAKGGTLGDQGSRGSDPLPEPRVTLTVEGIPTEFLVNTGAEHSVLTKPMGKMGSKRTVVAGATGSKVYPWTTKRLLKIGQKQVTHSFLVIPECPAPLLGRDLLTKLKAQIQFSTEGPQVTWEDRPAMCLVLNLEEEYRLHEKPVPPSIDPSWLQLFPMVWAEKAGMGLANQVPPVVVELKSDASPVAVRQYPMSKEAREGIRPHIQRFLDLGILVPCQSPWNTPLLPVKKPGTNDYRPVQDLREVNKRVQDIHPTVPNPYNLLSSLPPSHTWYSVLDLKDAFFCLKLHPNSQPLFAFEWRDPEKGNTGQLTWTRLPQGFKNSPTLFNEALHRDLASFRALNPQVVMLQYVDDLLVAAPTYRDCKEGTRRLLQELSKLGYRVSAKKAQLCREEVTYLGYLLKGGKRWLTPARKATVMKIPTPTTPRQVREFLGTAGFCRLWIPGFASLAAPLYPLTRPKVPFTWTEAHQEAFGRIKEALLSAPALALPDLTKPFALYVDEKEGVARGVLTQTLGPWRRPVAYLSKKLDPVASGWPTCLKAIAAVALLLKDADKLTLGQNVLVIAPHNLESIVRQPPDRWMTNARMTHYQSLLLNERVSFAPPAILNPATLLPVESDDTPIHICSEILAEETGTRPDLRDQPLPGVPAWYTDGSSFIMDGRRQAGAAIVDNKRTVWASNLPEGTSAQKAELIALTQALRLAEGKSINIYTDSRYAFATAHVHGAIYKQRGWLTSAGKDIKNKEEILALLEAIHLPKRVAIIHCPGHQRGTDPVATGNRKADEAAKQAAQSTRILTETTKNAGKRTADGSEFEKRTADGSEFESPKKKAKVE

SEQ ID NO: 7206 - protein, 2096 aa, synthetic construct
MPAAKRVKLDGGDKKYSIGLDIGTNSVGWAVITDEYKVPSKKFKVLGNTDRHSIKKNLIGALLFDSGETAEATRLKRTARRRYTRRKNRICYLQEIFSNEMAKVDDSFFHRLEESFLVEEDKKHERHPIFGNIVDEVAYHEKYPTIYHLRKKLVDSTDKADLRLIYLALAHMIKFRGHFLIEGDLNPDNSDVDKLFIQLVQTYNQLFEENPINASGVDAKAILSARLSKSRRLENLIAQLPGEKKNGLFGNLIALSLGLTPNFKSNFDLAEDAKLQLSKDTYDDDLDNLLAQIGDQYADLFLAAKNLSDAILLSDILRVNTEITKAPLSASMIKRYDEHHQDLTLLKALVRQQLPEKYKEIFFDQSKNGYAGYIDGGASQEEFYKFIKPILEKMDGTEELLVKLNREDLLRKQRTFDNGSIPHQIHLGELHAILRRQEDFYPFLKDNREKIEKILTFRIPYYVGPLARGNSRFAWMTRKSEETITPWNFEEVVDKGASAQSFIERMTNFDKNLPNEKVLPKHSLLYEYFTVYNELTKVKYVTEGMRKPAFLSGEQKKAIVDLLFKTNRKVTVKQLKEDYFKKIECFDSVEISGVEDRFNASLGTYHDLLKIIKDKDFLDNEENEDILEDIVLTLTLFEDREMIEERLKTYAHLFDDKVMKQLKRRRYTGWGRLSRKLINGIRDKQSGKTILDFLKSDGFANRNFMQLIHDDSLTFKEDIQKAQVSGQGDSLHEHIANLAGSPAIKKGILQTVKVVDELVKVMGRHKPENIVIEMARENQTTQKGQKNSRERMKRIEEGIKELGSQILKEHPVENTQLQNEKLYLYYLQNGRDMYVDQELDINRLSDYDVDHIVPQSFLKDDSIDNKVLTRSDKARGKSDNVPSEEVVKKMKNYWRQLLNAKLITQRKFDNLTKAERGGLSELDKAGFIKRQLVETRQITKHVAQILDSRMNTKYDENDKLIREVKVITLKSKLVSDFRKDFQFYKVREINNYHHAHDAYLNAVVGTALIKKYPKLESEFVYGDYKVYDVRKMIAKSEQEIGKATAKYFFYSNIMNFFKTEITLANGEIRKRPLIETNGETGEIVWDKGRDFATVRKVLSMPQVNIVKKTEVQTGGFSKESILPKRNSDKLIARKKDWDPKKYGGFDSPTVAYSVLVVAKVEKGKSKKLKSVKELLGITIMERSSFEKNPIDFLEAKGYKEVKKDLIIKLPKYSLFELENGRKRMLASAGELQKGNELALPSKYVNFLYLASHYEKLKGSPEDNEQKQLFVEQHKHYLDEIIEQISEFSKRVILADANLDKVLSAYNKHRDKPIREQAENIIHLFTLTNLGAPAAFKYFDTTIDRKRYTSTKEVLDATLIHQSITGLYETRIDLSQLGGDGGGGSPAPEAAAKGGTLNIEDEHRLHETSKEPDVSLGSTWLSDFPQAWAETGGMGLAVRQAPLIIPLKATSTPVSIKQYPMSQEARLGIKPHIQRLLDQGILVPCQSPWNTPLLPVKKPGTNDYRPVQDLREVNKRVEDIHPTVPNPYNLLSGLPPSHQWYTVLDLKDAFFCLRLHPTSQPLFAFEWRDPEMGISGQLTWTRLPQGFKNSPTLFDEALHRDLADFRIQHPDLILLQYVDDLLLAATSELDCQQGTRALLQTLGNLGYRASAKKAQICQKQVKYLGYLLKEGQRWLTEARKETVMGQPTPKTPRQLREFLGTAGFCRLWIPGFAEMAAPLYPLTKTGTLFNWGPDQQKAYQEIKQALLTAPALGLPDLTKPFELFVDEKQGYAKGVLTQKLGPWRRPVAYLSKKLDPVAAGWPPCLRMVAAIAVLTKDAGKLTMGQPLVILAPHAVEALVKQPPDRWLSNARMTHYQALLLDTDRVQFGPVVALNPATLLPLPEEGLQHNCLDILAEAHGTRPDLTDQPLPDADHTWYTDGSSLLQEGQRKAGAAVTTETEVIWAKALPAGTSAQRAELIALTQALKMAEGKKLNVYTDSRYAFATAHIHGEIYRRRGLLTSEGKEIKNKDEILALLKALFLPKRLSIIHCPGHQKGHSAEARGNRMADQAARKAAITETPDTSTLLAGKRTADGSEFEKRTADGSEFESPKKKAKVE

SEQ ID NO: 7207 - protein, 2090 aa, synthetic construct
MPAAKRVKLDGGDKKYSIGLDIGTNSVGWAVITDEYKVPSKKFKVLGNTDRHSIKKNLIGALLFDSGETAEATRLKRTARRRYTRRKNRICYLQEIFSNEMAKVDDSFFHRLEESFLVEEDKKHERHPIFGNIVDEVAYHEKYPTIYHLRKKLVDSTDKADLRLIYLALAHMIKFRGHFLIEGDLNPDNSDVDKLFIQLVQTYNQLFEENPINASGVDAKAILSARLSKSRRLENLIAQLPGEKKNGLFGNLIALSLGLTPNFKSNFDLAEDAKLQLSKDTYDDDLDNLLAQIGDQYADLFLAAKNLSDAILLSDILRVNTEITKAPLSASMIKRYDEHHQDLTLLKALVRQQLPEKYKEIFFDQSKNGYAGYIDGGASQEEFYKFIKPILEKMDGTEELLVKLNREDLLRKQRTFDNGSIPHQIHLGELHAILRRQEDFYPFLKDNREKIEKILTFRIPYYVGPLARGNSRFAWMTRKSEETITPWNFEEVVDKGASAQSFIERMTNFDKNLPNEKVLPKHSLLYEYFTVYNELTKVKYVTEGMRKPAFLSGEQKKAIVDLLFKTNRKVTVKQLKEDYFKKIECFDSVEISGVEDRFNASLGTYHDLLKIIKDKDFLDNEENEDILEDIVLTLTLFEDREMIEERLKTYAHLFDDKVMKQLKRRRYTGWGRLSRKLINGIRDKQSGKTILDFLKSDGFANRNFMQLIHDDSLTFKEDIQKAQVSGQGDSLHEHIANLAGSPAIKKGILQTVKVVDELVKVMGRHKPENIVIEMARENQTTQKGQKNSRERMKRIEEGIKELGSQILKEHPVENTQLQNEKLYLYYLQNGRDMYVDQELDINRLSDYDVDHIVPQSFLKDDSIDNKVLTRSDKARGKSDNVPSEEVVKKMKNYWRQLLNAKLITQRKFDNLTKAERGGLSELDKAGFIKRQLVETRQITKHVAQILDSRMNTKYDENDKLIREVKVITLKSKLVSDFRKDFQFYKVREINNYHHAHDAYLNAVVGTALIKKYPKLESEFVYGDYKVYDVRKMIAKSEQEIGKATAKYFFYSNIMNFFKTEITLANGEIRKRPLIETNGETGEIVWDKGRDFATVRKVLSMPQVNIVKKTEVQTGGFSKESILPKRNSDKLIARKKDWDPKKYGGFDSPTVAYSVLVVAKVEKGKSKKLKSVKELLGITIMERSSFEKNPIDFLEAKGYKEVKKDLIIKLPKYSLFELENGRKRMLASAGELQKGNELALPSKYVNFLYLASHYEKLKGSPEDNEQKQLFVEQHKHYLDEIIEQISEFSKRVILADANLDKVLSAYNKHRDKPIREQAENIIHLFTLTNLGAPAAFKYFDTTIDRKRYTSTKEVLDATLIHQSITGLYETRIDLSQLGGDGGGGSPAPEAAAKGGTLQLDDEYRLYSPLVKPDQNIQFWLEQFPQAWAETAGMGLAKQVPPQVIQLKASATPVSVRQYPLSKEAQEGIRPHVQRLIQQGILVPVQSPWNTPLLPVRKPGTNDYRPVQDLREVNKRVQDIHPTVPNPYNLLCALPPQRSWYTVLDLKDAFFCLRLHPTSQPLFAFEWRDPGTGRTGQLTWTRLPQGFKNSPTIFDEALHRDLANFRIQHPQVTLLQYVDDLLLAGATKQDCLEGTKALLLELSDLGYRASAKKAQICRREVTYLGYSLRDGQRWLTEARKKTVVQIPAPTTAKQVREFLGTAGFCRLWIPGFATLAAPLYPLTKEKGEFSWAPEHQKAFDAIKKALLSAPALALPDVTKPFTLYVDERKGVARGVLTQTLGPWRRPVAYLSKKLDPVASGWPVCLKAIAAVAILVKDADKLTLGQNITVIAPHALENIVRQPPDRWMTNARMTHYQSLLLTERVTFAPPAALNPATLLPEETDEPVTHDCHQLLIEETGVRKDLTDIPLTGEVLTWFTDGSSYVVEGKRMAGAAVVDGTRTIWASSLPEGTSAQKAELMALTQALRLAEGKSINIYTDSRYAFATAHVHGAIYKQRGLLTSAGREIKNKEEILSLLEALHLPKRLAIIHCPGHQKAKDPISRGNQMADRVAKQAAQGVNLLAGKRTADGSEFEKRTADGSEFESPKKKAKVE

SEQ ID NO: 7208 - protein, 2087 aa, synthetic construct
MPAAKRVKLDGGDKKYSIGLDIGTNSVGWAVITDEYKVPSKKFKVLGNTDRHSIKKNLIGALLFDSGETAEATRLKRTARRRYTRRKNRICYLQEIFSNEMAKVDDSFFHRLEESFLVEEDKKHERHPIFGNIVDEVAYHEKYPTIYHLRKKLVDSTDKADLRLIYLALAHMIKFRGHFLIEGDLNPDNSDVDKLFIQLVQTYNQLFEENPINASGVDAKAILSARLSKSRRLENLIAQLPGEKKNGLFGNLIALSLGLTPNFKSNFDLAEDAKLQLSKDTYDDDLDNLLAQIGDQYADLFLAAKNLSDAILLSDILRVNTEITKAPLSASMIKRYDEHHQDLTLLKALVRQQLPEKYKEIFFDQSKNGYAGYIDGGASQEEFYKFIKPILEKMDGTEELLVKLNREDLLRKQRTFDNGSIPHQIHLGELHAILRRQEDFYPFLKDNREKIEKILTFRIPYYVGPLARGNSRFAWMTRKSEETITPWNFEEVVDKGASAQSFIERMTNFDKNLPNEKVLPKHSLLYEYFTVYNELTKVKYVTEGMRKPAFLSGEQKKAIVDLLFKTNRKVTVKQLKEDYFKKIECFDSVEISGVEDRFNASLGTYHDLLKIIKDKDFLDNEENEDILEDIVLTLTLFEDREMIEERLKTYAHLFDDKVMKQLKRRRYTGWGRLSRKLINGIRDKQSGKTILDFLKSDGFANRNFMQLIHDDSLTFKEDIQKAQVSGQGDSLHEHIANLAGSPAIKKGILQTVKVVDELVKVMGRHKPENIVIEMARENQTTQKGQKNSRERMKRIEEGIKELGSQILKEHPVENTQLQNEKLYLYYLQNGRDMYVDQELDINRLSDYDVDHIVPQSFLKDDSIDNKVLTRSDKARGKSDNVPSEEVVKKMKNYWRQLLNAKLITQRKFDNLTKAERGGLSELDKAGFIKRQLVETRQITKHVAQILDSRMNTKYDENDKLIREVKVITLKSKLVSDFRKDFQFYKVREINNYHHAHDAYLNAVVGTALIKKYPKLESEFVYGDYKVYDVRKMIAKSEQEIGKATAKYFFYSNIMNFFKTEITLANGEIRKRPLIETNGETGEIVWDKGRDFATVRKVLSMPQVNIVKKTEVQTGGFSKESILPKRNSDKLIARKKDWDPKKYGGFDSPTVAYSVLVVAKVEKGKSKKLKSVKELLGITIMERSSFEKNPIDFLEAKGYKEVKKDLIIKLPKYSLFELENGRKRMLASAGELQKGNELALPSKYVNFLYLASHYEKLKGSPEDNEQKQLFVEQHKHYLDEIIEQISEFSKRVILADANLDKVLSAYNKHRDKPIREQAENIIHLFTLTNLGAPAAFKYFDTTIDRKRYTSTKEVLDATLIHQSITGLYETRIDLSQLGGDGGGGSPAPEAAAKGGIPWLMKKPLQLTTLVPLQEYEERLLKQTMLTGSYKEKLQSLFLKYDALWQHWENQVGHRRIKPHHIATGTVNPRPQKQYPINPKAKASIQTVINDLLKQGVLIQQNSIMNTPVYPVPKPDGKWRMVLDYREVNKTIPLIAAQNQHSAGILSSIFRGKYKTTLDLSNGFWAHSITPESYWLTAFTWLGQQYCWTRLPQGFLNSPALFNADVVDLLKEVPNVQVYVDDIYISHDDPREHLEQLEKVFSLLLNAGYVVSLKKSEIAQHEVEFLGFNITKEGRGLTETFKQKLLNITPPRDLKQLQSILGLLNFARNFIPNFSELVKPLYNIIATAPGKYITWTTDNSQQLQNIISMLNSAENLEERNPEVRLIMKVNTSPSAGYIRFYNEFAKRPIMYLNYVYTKAEVKFTNTEKLLTTIHKGLIKALDLGMGQEILVYSPIVSMTKIQKTPLPERKALPIRWITWMSYLEDPRIQFHYDKTLPELQQVPTVTDDIIAKIKHPSEFSMVFYTDGSAIKHPNVNKSHNAGMGIAQVQFKPEFTVINTWSIPLGDHTAQLAEVAAVEFACKKALKIDGPVLIVTDSFYVAESVNKELPYWQSNGFFNNKKKPLKHVSKWKSIADCIQLKPDIIIIHEKGHQPTASTFHTEGNNLADKLATQGSYVVNAGKRTADGSEFEKRTADGSEFESPKKKAKVE

SEQ ID NO: 7209 - protein, 2094 aa, synthetic construct
MPAAKRVKLDGGDKKYSIGLDIGTNSVGWAVITDEYKVPSKKFKVLGNTDRHSIKKNLIGALLFDSGETAEATRLKRTARRRYTRRKNRICYLQEIFSNEMAKVDDSFFHRLEESFLVEEDKKHERHPIFGNIVDEVAYHEKYPTIYHLRKKLVDSTDKADLRLIYLALAHMIKFRGHFLIEGDLNPDNSDVDKLFIQLVQTYNQLFEENPINASGVDAKAILSARLSKSRRLENLIAQLPGEKKNGLFGNLIALSLGLTPNFKSNFDLAEDAKLQLSKDTYDDDLDNLLAQIGDQYADLFLAAKNLSDAILLSDILRVNTEITKAPLSASMIKRYDEHHQDLTLLKALVRQQLPEKYKEIFFDQSKNGYAGYIDGGASQEEFYKFIKPILEKMDGTEELLVKLNREDLLRKQRTFDNGSIPHQIHLGELHAILRRQEDFYPFLKDNREKIEKILTFRIPYYVGPLARGNSRFAWMTRKSEETITPWNFEEVVDKGASAQSFIERMTNFDKNLPNEKVLPKHSLLYEYFTVYNELTKVKYVTEGMRKPAFLSGEQKKAIVDLLFKTNRKVTVKQLKEDYFKKIECFDSVEISGVEDRFNASLGTYHDLLKIIKDKDFLDNEENEDILEDIVLTLTLFEDREMIEERLKTYAHLFDDKVMKQLKRRRYTGWGRLSRKLINGIRDKQSGKTILDFLKSDGFANRNFMQLIHDDSLTFKEDIQKAQVSGQGDSLHEHIANLAGSPAIKKGILQTVKVVDELVKVMGRHKPENIVIEMARENQTTQKGQKNSRERMKRIEEGIKELGSQILKEHPVENTQLQNEKLYLYYLQNGRDMYVDQELDINRLSDYDVDHIVPQSFLKDDSIDNKVLTRSDKARGKSDNVPSEEVVKKMKNYWRQLLNAKLITQRKFDNLTKAERGGLSELDKAGFIKRQLVETRQITKHVAQILDSRMNTKYDENDKLIREVKVITLKSKLVSDFRKDFQFYKVREINNYHHAHDAYLNAVVGTALIKKYPKLESEFVYGDYKVYDVRKMIAKSEQEIGKATAKYFFYSNIMNFFKTEITLANGEIRKRPLIETNGETGEIVWDKGRDFATVRKVLSMPQVNIVKKTEVQTGGFSKESILPKRNSDKLIARKKDWDPKKYGGFDSPTVAYSVLVVAKVEKGKSKKLKSVKELLGITIMERSSFEKNPIDFLEAKGYKEVKKDLIIKLPKYSLFELENGRKRMLASAGELQKGNELALPSKYVNFLYLASHYEKLKGSPEDNEQKQLFVEQHKHYLDEIIEQISEFSKRVILADANLDKVLSAYNKHRDKPIREQAENIIHLFTLTNLGAPAAFKYFDTTIDRKRYTSTKEVLDATLIHQSITGLYETRIDLSQLGGDGGGGSPAPEAAAKGGVLNLEEEYRLHEKPVPSSIDPSWLQLFPTVWAERAGMGLANQVPPVVVELRSGASPVAVRQYPMSKEAREGIRPHIQRFLDLGVLVPCQSPWNTPLLPVKKPGTNDYRPVQDLREINKRVQDIHPTVPNPYNLLSSLPPSHTWYSVLDLKDAFFCLKLHPNSQPLFAFEWRDPEKGNTGQLTWTRLPQGFKNSPTLFNEALHRDLAPFRALNPQVVLLQYVDDLLVAAPTYRDCKEGTQKLLQELSKLGYRVSAKKAQLCQKEVTYLGYLLKEGKRWLTPARKATVMKIPPPTTPRQVREFLGTAGFCRLWIPGFASLAAPLYPLTKPSIPFIWTEEHQKAFDRIKEALLSAPALALPDLTKPFTLYVDERAGVARGVLTQTLGPWRRPVAYLSKKLDPVASGWPTCLKAVAAVALLLKDADKLTLGQNVTVIASHSLESIVRQPPDRWMTNARMTHYQSLLLNERVSFAPPAVLNPATLLPVESEATPVHRCSEILAEETGTRRDLKDQPLPGVPAWYTDGSSFIAEGKRRAGAAIVDGKRTVWASSLPEGTSAQKAELVALTQALRLAEGKDINIYTDSRYAFATAHIHGAIYKQRGWLTSAGKDIKNKEEILALLEAIHLPKRVAIIHCPGHQKGNDPVATGNRRADEAAKQAALSTRVLAETTKPAGKRTADGSEFEKRTADGSEFESPKKKAKVE

SEQ ID NO: 7210 - protein, 2102 aa, synthetic construct
MPAAKRVKLDGGDKKYSIGLDIGTNSVGWAVITDEYKVPSKKFKVLGNTDRHSIKKNLIGALLFDSGETAEATRLKRTARRRYTRRKNRICYLQEIFSNEMAKVDDSFFHRLEESFLVEEDKKHERHPIFGNIVDEVAYHEKYPTIYHLRKKLVDSTDKADLRLIYLALAHMIKFRGHFLIEGDLNPDNSDVDKLFIQLVQTYNQLFEENPINASGVDAKAILSARLSKSRRLENLIAQLPGEKKNGLFGNLIALSLGLTPNFKSNFDLAEDAKLQLSKDTYDDDLDNLLAQIGDQYADLFLAAKNLSDAILLSDILRVNTEITKAPLSASMIKRYDEHHQDLTLLKALVRQQLPEKYKEIFFDQSKNGYAGYIDGGASQEEFYKFIKPILEKMDGTEELLVKLNREDLLRKQRTFDNGSIPHQIHLGELHAILRRQEDFYPFLKDNREKIEKILTFRIPYYVGPLARGNSRFAWMTRKSEETITPWNFEEVVDKGASAQSFIERMTNFDKNLPNEKVLPKHSLLYEYFTVYNELTKVKYVTEGMRKPAFLSGEQKKAIVDLLFKTNRKVTVKQLKEDYFKKIECFDSVEISGVEDRFNASLGTYHDLLKIIKDKDFLDNEENEDILEDIVLTLTLFEDREMIEERLKTYAHLFDDKVMKQLKRRRYTGWGRLSRKLINGIRDKQSGKTILDFLKSDGFANRNFMQLIHDDSLTFKEDIQKAQVSGQGDSLHEHIANLAGSPAIKKGILQTVKVVDELVKVMGRHKPENIVIEMARENQTTQKGQKNSRERMKRIEEGIKELGSQILKEHPVENTQLQNEKLYLYYLQNGRDMYVDQELDINRLSDYDVDHIVPQSFLKDDSIDNKVLTRSDKARGKSDNVPSEEVVKKMKNYWRQLLNAKLITQRKFDNLTKAERGGLSELDKAGFIKRQLVETRQITKHVAQILDSRMNTKYDENDKLIREVKVITLKSKLVSDFRKDFQFYKVREINNYHHAHDAYLNAVVGTALIKKYPKLESEFVYGDYKVYDVRKMIAKSEQEIGKATAKYFFYSNIMNFFKTEITLANGEIRKRPLIETNGETGEIVWDKGRDFATVRKVLSMPQVNIVKKTEVQTGGFSKESILPKRNSDKLIARKKDWDPKKYGGFDSPTVAYSVLVVAKVEKGKSKKLKSVKELLGITIMERSSFEKNPIDFLEAKGYKEVKKDLIIKLPKYSLFELENGRKRMLASAGELQKGNELALPSKYVNFLYLASHYEKLKGSPEDNEQKQLFVEQHKHYLDEIIEQISEFSKRVILADANLDKVLSAYNKHRDKPIREQAENIIHLFTLTNLGAPAAFKYFDTTIDRKRYTSTKEVLDATLIHQSITGLYETRIDLSQLGGDGGEAAAKGGSPAPGGTVSLQDEHRLFDIPVTTSLPDVWLQDFPQAWAETGGLGRAKCQAPIIIDLKPTAVPVSIKQYPMSLEAHMGIRQHIIKFLELGVLRPCRSPWNTPLLPVKKPGTQDYRPVQDLREINKRTVDIHPTVPNPYNLLSTLKPDYSWYTVLDLKDAFFCLPLAPQSQELFAFEWKDPERGISGQLTWTRLPQGFKNSPTLFNEALHRDLTDFRTQHPEVTLLQYVDDLLLAAPTKKACTQGTRHLLQELGEKGYRASAKKAQICQTKVTYLGYILSEGKRWLTPGRIETVARIPPPRNPREVREFLGTAGFCRLWIPGFAELAAPLYALTKPSTPFTWQTEHQLAFEALKKALLSAPALGLPDTSKPFTLFLDERQGIAKGVLTQKLGPWKRPVAYLSKKLDPVAAGWPPCLRIMAATAMLVKDSAKLTLGQPLTVITPHTLEAIVRQPPDRWITNARLTHYQALLLDTDRVQFGPPVTLNPATLLPVPENQPSPHDCRQVLAETHGTREDLKDQELPDADHTWYTDGSSYLDSGTRRAGAAVVDGHNTIWAQSLPPGTSAQKAELIALTKALELSKGKKANIYTDSRYAFATAHTHGSIYERRGWLTSEGKEIKNKAEIIALLKALFLPQEVAIIHCPGHQKGQDPVAVGNRQADRVARQAAMAEVLTLATEPDNTSHITAGKRTADGSEFEKRTADGSEFESPKKKAKVE

SEQ ID NO: 7211 - protein, 2087 aa, synthetic construct
MPAAKRVKLDGGDKKYSIGLDIGTNSVGWAVITDEYKVPSKKFKVLGNTDRHSIKKNLIGALLFDSGETAEATRLKRTARRRYTRRKNRICYLQEIFSNEMAKVDDSFFHRLEESFLVEEDKKHERHPIFGNIVDEVAYHEKYPTIYHLRKKLVDSTDKADLRLIYLALAHMIKFRGHFLIEGDLNPDNSDVDKLFIQLVQTYNQLFEENPINASGVDAKAILSARLSKSRRLENLIAQLPGEKKNGLFGNLIALSLGLTPNFKSNFDLAEDAKLQLSKDTYDDDLDNLLAQIGDQYADLFLAAKNLSDAILLSDILRVNTEITKAPLSASMIKRYDEHHQDLTLLKALVRQQLPEKYKEIFFDQSKNGYAGYIDGGASQEEFYKFIKPILEKMDGTEELLVKLNREDLLRKQRTFDNGSIPHQIHLGELHAILRRQEDFYPFLKDNREKIEKILTFRIPYYVGPLARGNSRFAWMTRKSEETITPWNFEEVVDKGASAQSFIERMTNFDKNLPNEKVLPKHSLLYEYFTVYNELTKVKYVTEGMRKPAFLSGEQKKAIVDLLFKTNRKVTVKQLKEDYFKKIECFDSVEISGVEDRFNASLGTYHDLLKIIKDKDFLDNEENEDILEDIVLTLTLFEDREMIEERLKTYAHLFDDKVMKQLKRRRYTGWGRLSRKLINGIRDKQSGKTILDFLKSDGFANRNFMQLIHDDSLTFKEDIQKAQVSGQGDSLHEHIANLAGSPAIKKGILQTVKVVDELVKVMGRHKPENIVIEMARENQTTQKGQKNSRERMKRIEEGIKELGSQILKEHPVENTQLQNEKLYLYYLQNGRDMYVDQELDINRLSDYDVDHIVPQSFLKDDSIDNKVLTRSDKARGKSDNVPSEEVVKKMKNYWRQLLNAKLITQRKFDNLTKAERGGLSELDKAGFIKRQLVETRQITKHVAQILDSRMNTKYDENDKLIREVKVITLKSKLVSDFRKDFQFYKVREINNYHHAHDAYLNAVVGTALIKKYPKLESEFVYGDYKVYDVRKMIAKSEQEIGKATAKYFFYSNIMNFFKTEITLANGEIRKRPLIETNGETGEIVWDKGRDFATVRKVLSMPQVNIVKKTEVQTGGFSKESILPKRNSDKLIARKKDWDPKKYGGFDSPTVAYSVLVVAKVEKGKSKKLKSVKELLGITIMERSSFEKNPIDFLEAKGYKEVKKDLIIKLPKYSLFELENGRKRMLASAGELQKGNELALPSKYVNFLYLASHYEKLKGSPEDNEQKQLFVEQHKHYLDEIIEQISEFSKRVILADANLDKVLSAYNKHRDKPIREQAENIIHLFTLTNLGAPAAFKYFDTTIDRKRYTSTKEVLDATLIHQSITGLYETRIDLSQLGGDGGEAAAKGGSPAPGGVPWILKKPLELTIKLDLEEQQGTLLNNSILSKKGKEELKQLFEKYSALWQSWENQVGHRRIRPHKIATGTVKPTPQKQYHINPKAKPDIQIVINDLLKQGVLIQKESTMNTPVYPVPKPNGRWRMVLDYRAVNKVTPLIAVQNQHSYGILGSLFKGRYKTTIDLSNGFWAHPIVPEDYWITAFTWQGKQYCWTVLPQGFLNSPGLFNGDVVDLLQGIPNVEVYVDDVYISHDSEKEHLEYLDILFNRLKEAGYIISLKKSNIANSIVDFLGFQITNEGRGLTDTFKEKLENITAPTTLKQLQSILGLLNFARNFIPDFTELIAPLYALIPKSPKNYVPWQIEHSTTLETLITKLNGAEYLQGRKGDKTLIMKVNASYTTGYIRYYNEGEKKPISYVSIVFSKTELKFTELEKLLTTVHKGLLKALDLSMGQNIHVYSPIVSMQNIQKTPQTAKKALASRWLSWLSYLEDPRIRFFYDPQMPALKDLPAVDTGKDNKKHPSNFQHIFYTDGSAITSPTKEGHLNAGMGIVYFINKDGNLQKQQEWSISLGNHTAQFAEIAAFEFALKKCLPLGGNILVVTDSNYVAKAYNEELDVWASNGFVNNRKKPLKHISKWKSVADLKRLRPDVVVTHEPGHQKLDSSPHAYGNNLADQLATQASFKVHAGKRTADGSEFEKRTADGSEFESPKKKAKVE

SEQ ID NO: 7212 - protein, 2095 aa, synthetic construct
MPAAKRVKLDGGDKKYSIGLDIGTNSVGWAVITDEYKVPSKKFKVLGNTDRHSIKKNLIGALLFDSGETAEATRLKRTARRRYTRRKNRICYLQEIFSNEMAKVDDSFFHRLEESFLVEEDKKHERHPIFGNIVDEVAYHEKYPTIYHLRKKLVDSTDKADLRLIYLALAHMIKFRGHFLIEGDLNPDNSDVDKLFIQLVQTYNQLFEENPINASGVDAKAILSARLSKSRRLENLIAQLPGEKKNGLFGNLIALSLGLTPNFKSNFDLAEDAKLQLSKDTYDDDLDNLLAQIGDQYADLFLAAKNLSDAILLSDILRVNTEITKAPLSASMIKRYDEHHQDLTLLKALVRQQLPEKYKEIFFDQSKNGYAGYIDGGASQEEFYKFIKPILEKMDGTEELLVKLNREDLLRKQRTFDNGSIPHQIHLGELHAILRRQEDFYPFLKDNREKIEKILTFRIPYYVGPLARGNSRFAWMTRKSEETITPWNFEEVVDKGASAQSFIERMTNFDKNLPNEKVLPKHSLLYEYFTVYNELTKVKYVTEGMRKPAFLSGEQKKAIVDLLFKTNRKVTVKQLKEDYFKKIECFDSVEISGVEDRFNASLGTYHDLLKIIKDKDFLDNEENEDILEDIVLTLTLFEDREMIEERLKTYAHLFDDKVMKQLKRRRYTGWGRLSRKLINGIRDKQSGKTILDFLKSDGFANRNFMQLIHDDSLTFKEDIQKAQVSGQGDSLHEHIANLAGSPAIKKGILQTVKVVDELVKVMGRHKPENIVIEMARENQTTQKGQKNSRERMKRIEEGIKELGSQILKEHPVENTQLQNEKLYLYYLQNGRDMYVDQELDINRLSDYDVDHIVPQSFLKDDSIDNKVLTRSDKARGKSDNVPSEEVVKKMKNYWRQLLNAKLITQRKFDNLTKAERGGLSELDKAGFIKRQLVETRQITKHVAQILDSRMNTKYDENDKLIREVKVITLKSKLVSDFRKDFQFYKVREINNYHHAHDAYLNAVVGTALIKKYPKLESEFVYGDYKVYDVRKMIAKSEQEIGKATAKYFFYSNIMNFFKTEITLANGEIRKRPLIETNGETGEIVWDKGRDFATVRKVLSMPQVNIVKKTEVQTGGFSKESILPKRNSDKLIARKKDWDPKKYGGFDSPTVAYSVLVVAKVEKGKSKKLKSVKELLGITIMERSSFEKNPIDFLEAKGYKEVKKDLIIKLPKYSLFELENGRKRMLASAGELQKGNELALPSKYVNFLYLASHYEKLKGSPEDNEQKQLFVEQHKHYLDEIIEQISEFSKRVILADANLDKVLSAYNKHRDKPIREQAENIIHLFTLTNLGAPAAFKYFDTTIDRKRYTSTKEVLDATLIHQSITGLYETRIDLSQLGGDGGEAAAKGGSPAPGGTLQLEEEYRLFEPESTQKQEMDIWLKNFPQAWAETGGMGTAHCQAPVLIQLKATATPISIRQYPMPHEAYQGIKPHIRRMLDQGILKPCQSPWNTPLLPVKKPGTEDYRPVQDLREVNKRVEDIHPTVPNPYNLLSTLPPSHPWYTVLDLKDAFFCLRLHSESQLLFAFEWRDPEIGLSGQLTWTRLPQGFKNSPTLFNEALHSDLADFRVRYPALVLLQYVDDLLLAAATRTECLEGTKALLETLGNKGYRASAKKAQICLQEVTYLGYSLKDGQRWLTKARKEAILSIPVPKNSRQVREFLGKAGYCRLFIPGFAELAAPLYPLTRPGTLFQWGTEQQLAFEDIKKALLSSPALGLPDITKPFELFIDENSGFAKGVLVQKLGPWKRPVAYLSKKLDTVASGWPPCLRMVAAIAILVKDAGKLTLGQPLTILTSHPVEALVRQPPNKWLSNARMTHYQAMLLDAERVHFGPTVSLNPATLLPLPSGGNHHDCLQILAETHGTRPDLTDQPLPDADLTWYTDGSSFIRNGEREAGAAVTTESEVIWAAPLPPGTSAQRAELIALTQALKMAEGKKLTVYTDSRYAFATTHVHGEIYRRRGWLTSEGKEIKNKNEILALLEALFLPKRLSIIHCPGHQKGDSPQAKGNRLADDTAKKAATETHSSLTVLPAGKRTADGSEFEKRTADGSEFESPKKKAKVE

SEQ ID NO: 7213 - protein, 2176 aa, synthetic construct
MPAAKRVKLDGGDKKYSIGLDIGTNSVGWAVITDEYKVPSKKFKVLGNTDRHSIKKNLIGALLFDSGETAEATRLKRTARRRYTRRKNRICYLQEIFSNEMAKVDDSFFHRLEESFLVEEDKKHERHPIFGNIVDEVAYHEKYPTIYHLRKKLVDSTDKADLRLIYLALAHMIKFRGHFLIEGDLNPDNSDVDKLFIQLVQTYNQLFEENPINASGVDAKAILSARLSKSRRLENLIAQLPGEKKNGLFGNLIALSLGLTPNFKSNFDLAEDAKLQLSKDTYDDDLDNLLAQIGDQYADLFLAAKNLSDAILLSDILRVNTEITKAPLSASMIKRYDEHHQDLTLLKALVRQQLPEKYKEIFFDQSKNGYAGYIDGGASQEEFYKFIKPILEKMDGTEELLVKLNREDLLRKQRTFDNGSIPHQIHLGELHAILRRQEDFYPFLKDNREKIEKILTFRIPYYVGPLARGNSRFAWMTRKSEETITPWNFEEVVDKGASAQSFIERMTNFDKNLPNEKVLPKHSLLYEYFTVYNELTKVKYVTEGMRKPAFLSGEQKKAIVDLLFKTNRKVTVKQLKEDYFKKIECFDSVEISGVEDRFNASLGTYHDLLKIIKDKDFLDNEENEDILEDIVLTLTLFEDREMIEERLKTYAHLFDDKVMKQLKRRRYTGWGRLSRKLINGIRDKQSGKTILDFLKSDGFANRNFMQLIHDDSLTFKEDIQKAQVSGQGDSLHEHIANLAGSPAIKKGILQTVKVVDELVKVMGRHKPENIVIEMARENQTTQKGQKNSRERMKRIEEGIKELGSQILKEHPVENTQLQNEKLYLYYLQNGRDMYVDQELDINRLSDYDVDHIVPQSFLKDDSIDNKVLTRSDKARGKSDNVPSEEVVKKMKNYWRQLLNAKLITQRKFDNLTKAERGGLSELDKAGFIKRQLVETRQITKHVAQILDSRMNTKYDENDKLIREVKVITLKSKLVSDFRKDFQFYKVREINNYHHAHDAYLNAVVGTALIKKYPKLESEFVYGDYKVYDVRKMIAKSEQEIGKATAKYFFYSNIMNFFKTEITLANGEIRKRPLIETNGETGEIVWDKGRDFATVRKVLSMPQVNIVKKTEVQTGGFSKESILPKRNSDKLIARKKDWDPKKYGGFDSPTVAYSVLVVAKVEKGKSKKLKSVKELLGITIMERSSFEKNPIDFLEAKGYKEVKKDLIIKLPKYSLFELENGRKRMLASAGELQKGNELALPSKYVNFLYLASHYEKLKGSPEDNEQKQLFVEQHKHYLDEIIEQISEFSKRVILADANLDKVLSAYNKHRDKPIREQAENIIHLFTLTNLGAPAAFKYFDTTIDRKRYTSTKEVLDATLIHQSITGLYETRIDLSQLGGDGGEAAAKGGSPAPGGMNPLQLLQPLPAEIKGTKLLAHWNSGATITCIPESFLEDEQPIKKTLIKTIHGEKQQNVYYVTFKVKGRKVEAEVIASPYEYILLSPTDVPWLTQQPLQLTILVPLQEYQEKILSKTALPEDQKQQLKTLFVKYDNLWQHWENQVGHRKIRPHNIATGDYPPRPQKQYPINPKAKPSIQIVIDDLLKQGVLTPQNSTMNTPVYPVPKPDGRWRMVLDYREVNKTIPLTAAQNQHSAGILATIVRQKYKTTLDLANGFWAHPITPESYWLTAFTWQGKQYCWTRLPQGFLNSPALFNADVVDLLKEIPNVQVYVDDIYLSHDDPKEHVQQLEKVFQILLQAGYVVSLKKSEIGQKTVEFLGFNITKEGRGLTDTFKTKLLNITPPKDLKQLQSILGKLNFARNFIPNFAELVQPLYNLIAPAKGKYIEWSEENTKQLNMVIEALNTASNLEERLPEQRLVIKVNTSPSAGYVRYYNETGKKPIMYLNYVFSKAELKFSMLEKLLTTMHKALIKAMDLAMGQEILVYSPIVSMTKIQKTPLPERKALPIRWITWMTYLEDPRIQFHYDKTLPELKHIPDVYTSSQSPVKHPSQYEGVFYTDGSAIKSPDPTKSNNAGMGIVHATYKPEYQVLNQWSIPLGNHTAQMAEIAAVEFACKKALKIPGPVLVITDSFYVAESANKELPYWKSNGFVNNKKKPLKHISKWKSIAECLSMKPDITIQHEKGISLQIPVFILKGNALADKLATQGSYVVNAGKRTADGSEFEKRTADGSEFESPKKKAKVE

SEQ ID NO: 7214 - protein, 2094 aa, synthetic construct
MPAAKRVKLDGGDKKYSIGLDIGTNSVGWAVITDEYKVPSKKFKVLGNTDRHSIKKNLIGALLFDSGETAEATRLKRTARRRYTRRKNRICYLQEIFSNEMAKVDDSFFHRLEESFLVEEDKKHERHPIFGNIVDEVAYHEKYPTIYHLRKKLVDSTDKADLRLIYLALAHMIKFRGHFLIEGDLNPDNSDVDKLFIQLVQTYNQLFEENPINASGVDAKAILSARLSKSRRLENLIAQLPGEKKNGLFGNLIALSLGLTPNFKSNFDLAEDAKLQLSKDTYDDDLDNLLAQIGDQYADLFLAAKNLSDAILLSDILRVNTEITKAPLSASMIKRYDEHHQDLTLLKALVRQQLPEKYKEIFFDQSKNGYAGYIDGGASQEEFYKFIKPILEKMDGTEELLVKLNREDLLRKQRTFDNGSIPHQIHLGELHAILRRQEDFYPFLKDNREKIEKILTFRIPYYVGPLARGNSRFAWMTRKSEETITPWNFEEVVDKGASAQSFIERMTNFDKNLPNEKVLPKHSLLYEYFTVYNELTKVKYVTEGMRKPAFLSGEQKKAIVDLLFKTNRKVTVKQLKEDYFKKIECFDSVEISGVEDRFNASLGTYHDLLKIIKDKDFLDNEENEDILEDIVLTLTLFEDREMIEERLKTYAHLFDDKVMKQLKRRRYTGWGRLSRKLINGIRDKQSGKTILDFLKSDGFANRNFMQLIHDDSLTFKEDIQKAQVSGQGDSLHEHIANLAGSPAIKKGILQTVKVVDELVKVMGRHKPENIVIEMARENQTTQKGQKNSRERMKRIEEGIKELGSQILKEHPVENTQLQNEKLYLYYLQNGRDMYVDQELDINRLSDYDVDHIVPQSFLKDDSIDNKVLTRSDKARGKSDNVPSEEVVKKMKNYWRQLLNAKLITQRKFDNLTKAERGGLSELDKAGFIKRQLVETRQITKHVAQILDSRMNTKYDENDKLIREVKVITLKSKLVSDFRKDFQFYKVREINNYHHAHDAYLNAVVGTALIKKYPKLESEFVYGDYKVYDVRKMIAKSEQEIGKATAKYFFYSNIMNFFKTEITLANGEIRKRPLIETNGETGEIVWDKGRDFATVRKVLSMPQVNIVKKTEVQTGGFSKESILPKRNSDKLIARKKDWDPKKYGGFDSPTVAYSVLVVAKVEKGKSKKLKSVKELLGITIMERSSFEKNPIDFLEAKGYKEVKKDLIIKLPKYSLFELENGRKRMLASAGELQKGNELALPSKYVNFLYLASHYEKLKGSPEDNEQKQLFVEQHKHYLDEIIEQISEFSKRVILADANLDKVLSAYNKHRDKPIREQAENIIHLFTLTNLGAPAAFKYFDTTIDRKRYTSTKEVLDATLIHQSITGLYETRIDLSQLGGDGGEAAAKGGSPAPGGVLNLEEEYRLHEKPVPSSIDPSWLQLFPTVWAERAGMGLANQVPPVVVELRSGASPVAVRQYPMSKEAREGIRPHIQKFLDLGVLVPCRSPWNTPLLPVKKPGTNDYRPVQDLREINKRVQDIHPTVPNPYNLLSSLPPSYTWYSVLDLKDAFFCLRLHPNSQPLFAFEWKDPEKGNTGQLTWTRLPQGFKNSPTLFNEALHRDLAPFRALNPQVVLLQYVDDLLVAAPTYEDCKKGTQKLLQELSKLGYRVSAKKAQLCQREVTYLGYLLKEGKRWLTPARKATVMKIPVPTTPRQVREFLGTAGFCRLWIPGFASLAAPLYPLTKPSIPFIWTEEHQQAFDHIKKALLSAPALALPDLTKPFTLYIDERAGVARGVLTQTLGPWRRPVAYLSKKLDPVASGWPTCLKAVAAVALLLKDADKLTLGQNVTVIASHSLESIVRQPPDRWMTNARMTHYQSLLLNERVSFAPPAVLNPATLLPVESEATPVHRCSEILAEETGTRRDLEDQPLPGVPTWYTDGSSFITEGKRRAGAPIVDGKRTVWASSLPEGTSAQKAELVALTQALRLAEGKNINIYTDSRYAFATAHIHGAIYKQRGWLTSAGKDIKNKEEILALLEAIHLPRRVAIIHCPGHQRGSNPVATGNRRADEAAKQAALSTRVLAGTTKPAGKRTADGSEFEKRTADGSEFESPKKKAKVE

SEQ ID NO: 7215 - protein, 2127 aa, synthetic construct
MPAAKRVKLDGGDKKYSIGLDIGTNSVGWAVITDEYKVPSKKFKVLGNTDRHSIKKNLIGALLFDSGETAEATRLKRTARRRYTRRKNRICYLQEIFSNEMAKVDDSFFHRLEESFLVEEDKKHERHPIFGNIVDEVAYHEKYPTIYHLRKKLVDSTDKADLRLIYLALAHMIKFRGHFLIEGDLNPDNSDVDKLFIQLVQTYNQLFEENPINASGVDAKAILSARLSKSRRLENLIAQLPGEKKNGLFGNLIALSLGLTPNFKSNFDLAEDAKLQLSKDTYDDDLDNLLAQIGDQYADLFLAAKNLSDAILLSDILRVNTEITKAPLSASMIKRYDEHHQDLTLLKALVRQQLPEKYKEIFFDQSKNGYAGYIDGGASQEEFYKFIKPILEKMDGTEELLVKLNREDLLRKQRTFDNGSIPHQIHLGELHAILRRQEDFYPFLKDNREKIEKILTFRIPYYVGPLARGNSRFAWMTRKSEETITPWNFEEVVDKGASAQSFIERMTNFDKNLPNEKVLPKHSLLYEYFTVYNELTKVKYVTEGMRKPAFLSGEQKKAIVDLLFKTNRKVTVKQLKEDYFKKIECFDSVEISGVEDRFNASLGTYHDLLKIIKDKDFLDNEENEDILEDIVLTLTLFEDREMIEERLKTYAHLFDDKVMKQLKRRRYTGWGRLSRKLINGIRDKQSGKTILDFLKSDGFANRNFMQLIHDDSLTFKEDIQKAQVSGQGDSLHEHIANLAGSPAIKKGILQTVKVVDELVKVMGRHKPENIVIEMARENQTTQKGQKNSRERMKRIEEGIKELGSQILKEHPVENTQLQNEKLYLYYLQNGRDMYVDQELDINRLSDYDVDHIVPQSFLKDDSIDNKVLTRSDKARGKSDNVPSEEVVKKMKNYWRQLLNAKLITQRKFDNLTKAERGGLSELDKAGFIKRQLVETRQITKHVAQILDSRMNTKYDENDKLIREVKVITLKSKLVSDFRKDFQFYKVREINNYHHAHDAYLNAVVGTALIKKYPKLESEFVYGDYKVYDVRKMIAKSEQEIGKATAKYFFYSNIMNFFKTEITLANGEIRKRPLIETNGETGEIVWDKGRDFATVRKVLSMPQVNIVKKTEVQTGGFSKESILPKRNSDKLIARKKDWDPKKYGGFDSPTVAYSVLVVAKVEKGKSKKLKSVKELLGITIMERSSFEKNPIDFLEAKGYKEVKKDLIIKLPKYSLFELENGRKRMLASAGELQKGNELALPSKYVNFLYLASHYEKLKGSPEDNEQKQLFVEQHKHYLDEIIEQISEFSKRVILADANLDKVLSAYNKHRDKPIREQAENIIHLFTLTNLGAPAAFKYFDTTIDRKRYTSTKEVLDATLIHQSITGLYETRIDLSQLGGDGGEAAAKGGSPAPGGLLGRDLLTKLKAQIQFSTEGPQVTWEDRPAMCLVLNLEEEYRLHEKPVPPSIDPSWLQLFPMVWAEKAGMGLANQVPPVVVELKSDASPVAVRQYPMSKEAREGIRPHIQRFLDLGILVPCQSPWNTPLLPVKKPGTNDYRPVQDLREVNKRVQDIHPTVPNPYNLLSSLPPSHTWYSVLDLKDAFFCLKLHPNSQPLFAFEWRDPEKGNTGQLTWTRLPQGFKNSPTLFNEALHRDLASFRALNPQVVMLQYVDDLLVAAPTYRDCKEGTRRLLQELSKLGYRVSAKKAQLCREEVTYLGYLLKGGKRWLTPARKATVMKIPTPTTPRQVREFLGTAGFCRLWIPGFASLAAPLYPLTRPKVPFTWTEAHQEAFGRIKEALLSAPALALPDLTKPFALYVDEKEGVARGVLTQTLGPWRRPVAYLSKKLDPVASGWPTCLKAIAAVALLLKDADKLTLGQNVLVIAPHNLESIVRQPPDRWMTNARMTHYQSLLLNERVSFAPPAILNPATLLPVESDDTPIHICSEILAEETGTRPDLRDQPLPGVPAWYTDGSSFIMDGRRQAGAAIVDNKRTVWASNLPEGTSAQKAELIALTQALRLAEGKSINIYTDSRYAFATAHVHGAIYKQRGWLTSAGKDIKNKEEILALLEAIHLPKRVAIIHCPGHQRGTDPVATGNRKADEAAKQAAQSTRILTETTKNAGKRTADGSEFEKRTADGSEFESPKKKAKVE

SEQ ID NO: 7216 - protein, 2127 aa, synthetic construct
MPAAKRVKLDGGDKKYSIGLDIGTNSVGWAVITDEYKVPSKKFKVLGNTDRHSIKKNLIGALLFDSGETAEATRLKRTARRRYTRRKNRICYLQEIFSNEMAKVDDSFFHRLEESFLVEEDKKHERHPIFGNIVDEVAYHEKYPTIYHLRKKLVDSTDKADLRLIYLALAHMIKFRGHFLIEGDLNPDNSDVDKLFIQLVQTYNQLFEENPINASGVDAKAILSARLSKSRRLENLIAQLPGEKKNGLFGNLIALSLGLTPNFKSNFDLAEDAKLQLSKDTYDDDLDNLLAQIGDQYADLFLAAKNLSDAILLSDILRVNTEITKAPLSASMIKRYDEHHQDLTLLKALVRQQLPEKYKEIFFDQSKNGYAGYIDGGASQEEFYKFIKPILEKMDGTEELLVKLNREDLLRKQRTFDNGSIPHQIHLGELHAILRRQEDFYPFLKDNREKIEKILTFRIPYYVGPLARGNSRFAWMTRKSEETITPWNFEEVVDKGASAQSFIERMTNFDKNLPNEKVLPKHSLLYEYFTVYNELTKVKYVTEGMRKPAFLSGEQKKAIVDLLFKTNRKVTVKQLKEDYFKKIECFDSVEISGVEDRFNASLGTYHDLLKIIKDKDFLDNEENEDILEDIVLTLTLFEDREMIEERLKTYAHLFDDKVMKQLKRRRYTGWGRLSRKLINGIRDKQSGKTILDFLKSDGFANRNFMQLIHDDSLTFKEDIQKAQVSGQGDSLHEHIANLAGSPAIKKGILQTVKVVDELVKVMGRHKPENIVIEMARENQTTQKGQKNSRERMKRIEEGIKELGSQILKEHPVENTQLQNEKLYLYYLQNGRDMYVDQELDINRLSDYDVDHIVPQSFLKDDSIDNKVLTRSDKARGKSDNVPSEEVVKKMKNYWRQLLNAKLITQRKFDNLTKAERGGLSELDKAGFIKRQLVETRQITKHVAQILDSRMNTKYDENDKLIREVKVITLKSKLVSDFRKDFQFYKVREINNYHHAHDAYLNAVVGTALIKKYPKLESEFVYGDYKVYDVRKMIAKSEQEIGKATAKYFFYSNIMNFFKTEITLANGEIRKRPLIETNGETGEIVWDKGRDFATVRKVLSMPQVNIVKKTEVQTGGFSKESILPKRNSDKLIARKKDWDPKKYGGFDSPTVAYSVLVVAKVEKGKSKKLKSVKELLGITIMERSSFEKNPIDFLEAKGYKEVKKDLIIKLPKYSLFELENGRKRMLASAGELQKGNELALPSKYVNFLYLASHYEKLKGSPEDNEQKQLFVEQHKHYLDEIIEQISEFSKRVILADANLDKVLSAYNKHRDKPIREQAENIIHLFTLTNLGAPAAFKYFDTTIDRKRYTSTKEVLDATLIHQSITGLYETRIDLSQLGGDGGEAAAKGGSPAPGGLLGRDLLTKLKAQIQFSTEGPQVTWEDRPAMCLVLNLEEEYRLHEKPVPPSIDPSWLQLFPMVWAEKAGMGLANQVPPVVVELKSDASPVAVRQYPMSKEAREGIRPHIQRFLDLGILVPCQSPWNTPLLPVKKPGTNDYRPVQDLREVNKRVQDIHPTVPNPYNLLSSLPPSHTWYSVLDLKDAFFCLKLHPNSQPLFAFEWRDPEKGNTGQLTWTRLPQGFKNSPTLFNEALHRDLASFRALNPQVVMLQYVDDLLVAAPTYRDCKEGTRRLLQELSKLGYRVSAKKAQLCREEVTYLGYLLKGGKRWLTPARKATVMKIPTPTTPRQVREFLGKAGFCRLFIPGFASLAAPLYPLTRPKVPFTWTEAHQEAFGRIKEALLSAPALALPDLTKPFALYVDEKEGVARGVLTQTLGPWRRPVAYLSKKLDPVASGWPTCLKAIAAVALLLKDADKLTLGQNVLVIAPHNLESIVRQPPDRWMTNARMTHYQSLLLNERVSFAPPAILNPATLLPVESDDTPIHICSEILAEETGTRPDLRDQPLPGVPAWYTDGSSFIMDGRRQAGAAIVDNKRTVWASNLPEGTSAQKAELIALTQALRLAEGKSINIYTDSRYAFATAHVHGAIYKQRGWLTSAGKDIKNKEEILALLEAIHLPKRVAIIHCPGHQRGTDPVATGNRKADEAAKQAAQSTRILTETTKNAGKRTADGSEFEKRTADGSEFESPKKKAKVE

SEQ ID NO: 7217 - protein, 2218 aa, synthetic construct
MPAAKRVKLDGGDKKYSIGLDIGTNSVGWAVITDEYKVPSKKFKVLGNTDRHSIKKNLIGALLFDSGETAEATRLKRTARRRYTRRKNRICYLQEIFSNEMAKVDDSFFHRLEESFLVEEDKKHERHPIFGNIVDEVAYHEKYPTIYHLRKKLVDSTDKADLRLIYLALAHMIKFRGHFLIEGDLNPDNSDVDKLFIQLVQTYNQLFEENPINASGVDAKAILSARLSKSRRLENLIAQLPGEKKNGLFGNLIALSLGLTPNFKSNFDLAEDAKLQLSKDTYDDDLDNLLAQIGDQYADLFLAAKNLSDAILLSDILRVNTEITKAPLSASMIKRYDEHHQDLTLLKALVRQQLPEKYKEIFFDQSKNGYAGYIDGGASQEEFYKFIKPILEKMDGTEELLVKLNREDLLRKQRTFDNGSIPHQIHLGELHAILRRQEDFYPFLKDNREKIEKILTFRIPYYVGPLARGNSRFAWMTRKSEETITPWNFEEVVDKGASAQSFIERMTNFDKNLPNEKVLPKHSLLYEYFTVYNELTKVKYVTEGMRKPAFLSGEQKKAIVDLLFKTNRKVTVKQLKEDYFKKIECFDSVEISGVEDRFNASLGTYHDLLKIIKDKDFLDNEENEDILEDIVLTLTLFEDREMIEERLKTYAHLFDDKVMKQLKRRRYTGWGRLSRKLINGIRDKQSGKTILDFLKSDGFANRNFMQLIHDDSLTFKEDIQKAQVSGQGDSLHEHIANLAGSPAIKKGILQTVKVVDELVKVMGRHKPENIVIEMARENQTTQKGQKNSRERMKRIEEGIKELGSQILKEHPVENTQLQNEKLYLYYLQNGRDMYVDQELDINRLSDYDVDHIVPQSFLKDDSIDNKVLTRSDKARGKSDNVPSEEVVKKMKNYWRQLLNAKLITQRKFDNLTKAERGGLSELDKAGFIKRQLVETRQITKHVAQILDSRMNTKYDENDKLIREVKVITLKSKLVSDFRKDFQFYKVREINNYHHAHDAYLNAVVGTALIKKYPKLESEFVYGDYKVYDVRKMIAKSEQEIGKATAKYFFYSNIMNFFKTEITLANGEIRKRPLIETNGETGEIVWDKGRDFATVRKVLSMPQVNIVKKTEVQTGGFSKESILPKRNSDKLIARKKDWDPKKYGGFDSPTVAYSVLVVAKVEKGKSKKLKSVKELLGITIMERSSFEKNPIDFLEAKGYKEVKKDLIIKLPKYSLFELENGRKRMLASAGELQKGNELALPSKYVNFLYLASHYEKLKGSPEDNEQKQLFVEQHKHYLDEIIEQISEFSKRVILADANLDKVLSAYNKHRDKPIREQAENIIHLFTLTNLGAPAAFKYFDTTIDRKRYTSTKEVLDATLIHQSITGLYETRIDLSQLGGDGGEAAAKGGSPAPGGTLGDQGSRGSDPLPEPRVTLTVEGIPTEFLVNTGAEHSVLTKPMGKMGSKRTVVAGATGSKVYPWTTKRLLKIGQKQVTHSFLVIPECPAPLLGRDLLTKLKAQIQFSTEGPQVTWEDRPAMCLVLNLEEEYRLHEKPVPPSIDPSWLQLFPMVWAEKAGMGLANQVPPVVVELKSDASPVAVRQYPMSKEAREGIRPHIQRFLDLGILVPCQSPWNTPLLPVKKPGTNDYRPVQDLREVNKRVQDIHPTVPNPYNLLSSLPPSHTWYSVLDLKDAFFCLKLHPNSQPLFAFEWRDPEKGNTGQLTWTRLPQGFKNSPTLFNEALHRDLASFRALNPQVVMLQYVDDLLVAAPTYRDCKEGTRRLLQELSKLGYRVSAKKAQLCREEVTYLGYLLKGGKRWLTPARKATVMKIPTPTTPRQVREFLGTAGFCRLWIPGFASLAAPLYPLTRPKVPFTWTEAHQEAFGRIKEALLSAPALALPDLTKPFALYVDEKEGVARGVLTQTLGPWRRPVAYLSKKLDPVASGWPTCLKAIAAVALLLKDADKLTLGQNVLVIAPHNLESIVRQPPDRWMTNARMTHYQSLLLNERVSFAPPAILNPATLLPVESDDTPIHICSEILAEETGTRPDLRDQPLPGVPAWYTDGSSFIMDGRRQAGAAIVDNKRTVWASNLPEGTSAQKAELIALTQALRLAEGKSINIYTDSRYAFATAHVHGAIYKQRGWLTSAGKDIKNKEEILALLEAIHLPKRVAIIHCPGHQRGTDPVATGNRKADEAAKQAAQSTRILTETTKNAGKRTADGSEFEKRTADGSEFESPKKKAKVE

SEQ ID NO: 7218 - protein, 2096 aa, synthetic construct
MPAAKRVKLDGGDKKYSIGLDIGTNSVGWAVITDEYKVPSKKFKVLGNTDRHSIKKNLIGALLFDSGETAEATRLKRTARRRYTRRKNRICYLQEIFSNEMAKVDDSFFHRLEESFLVEEDKKHERHPIFGNIVDEVAYHEKYPTIYHLRKKLVDSTDKADLRLIYLALAHMIKFRGHFLIEGDLNPDNSDVDKLFIQLVQTYNQLFEENPINASGVDAKAILSARLSKSRRLENLIAQLPGEKKNGLFGNLIALSLGLTPNFKSNFDLAEDAKLQLSKDTYDDDLDNLLAQIGDQYADLFLAAKNLSDAILLSDILRVNTEITKAPLSASMIKRYDEHHQDLTLLKALVRQQLPEKYKEIFFDQSKNGYAGYIDGGASQEEFYKFIKPILEKMDGTEELLVKLNREDLLRKQRTFDNGSIPHQIHLGELHAILRRQEDFYPFLKDNREKIEKILTFRIPYYVGPLARGNSRFAWMTRKSEETITPWNFEEVVDKGASAQSFIERMTNFDKNLPNEKVLPKHSLLYEYFTVYNELTKVKYVTEGMRKPAFLSGEQKKAIVDLLFKTNRKVTVKQLKEDYFKKIECFDSVEISGVEDRFNASLGTYHDLLKIIKDKDFLDNEENEDILEDIVLTLTLFEDREMIEERLKTYAHLFDDKVMKQLKRRRYTGWGRLSRKLINGIRDKQSGKTILDFLKSDGFANRNFMQLIHDDSLTFKEDIQKAQVSGQGDSLHEHIANLAGSPAIKKGILQTVKVVDELVKVMGRHKPENIVIEMARENQTTQKGQKNSRERMKRIEEGIKELGSQILKEHPVENTQLQNEKLYLYYLQNGRDMYVDQELDINRLSDYDVDHIVPQSFLKDDSIDNKVLTRSDKARGKSDNVPSEEVVKKMKNYWRQLLNAKLITQRKFDNLTKAERGGLSELDKAGFIKRQLVETRQITKHVAQILDSRMNTKYDENDKLIREVKVITLKSKLVSDFRKDFQFYKVREINNYHHAHDAYLNAVVGTALIKKYPKLESEFVYGDYKVYDVRKMIAKSEQEIGKATAKYFFYSNIMNFFKTEITLANGEIRKRPLIETNGETGEIVWDKGRDFATVRKVLSMPQVNIVKKTEVQTGGFSKESILPKRNSDKLIARKKDWDPKKYGGFDSPTVAYSVLVVAKVEKGKSKKLKSVKELLGITIMERSSFEKNPIDFLEAKGYKEVKKDLIIKLPKYSLFELENGRKRMLASAGELQKGNELALPSKYVNFLYLASHYEKLKGSPEDNEQKQLFVEQHKHYLDEIIEQISEFSKRVILADANLDKVLSAYNKHRDKPIREQAENIIHLFTLTNLGAPAAFKYFDTTIDRKRYTSTKEVLDATLIHQSITGLYETRIDLSQLGGDGGEAAAKGGSPAPGGTLNLEDEYRLYETSAEPEVSPGSTWLSDFPQAWAETGGMGLAVRQAPLIIPLKATSTPVSIKQYPMSQEAKLGIKPHIQRLLDQGILVPCQSPWNTPLLPVKKPGTNDYRPVQDLREVNKRVEDIHPTVPNPYNLLSGLPPSHRWYTVLDLKDAFFCLRLHPTSQPLFAFEWRDPGMGISGQLTWTRLPQGFKNSPTLFNEALHRDLADFRIQHPDLILLQYVDDILLAATSELDCQQGTRALLLTLGNLGYRASAKKAQLCQKQVKYLGYLLKEGQRWLTEARKETVMGQPTPKTPRQLREFLGTAGFCRLWIPGFAEMAAPLYPLTKPGTLFNWGPDQQKAYQEIKQALLTAPALGLPDLTKPFELFVDEKQGYAKGVLTQKLGPWRRPVAYLSKKLDPVAAGWPPCLRMVAAIAVLRKDAGKLTMGQPLVILAPHAVEALVKQPPDRWLSNARMTHYQAMLLDTDRVQFGPVVALNPATLLPLPEEGAPHDCLEILAETHGTRPDLTDQPIPDADHTWYTDGSSFLQEGQRKAGAAVTTETEVIWARALPAGTSAQRAELIALTQALKMAEGKRLNVYTDSRYAFATAHIHGEIYRRRGWLTSEGREIKNKSEILALLKALFLPKRLSIIHCLGHQKGDSAEARGNRLADQAAREAAIKTPPDTSTLLAGKRTADGSEFEKRTADGSEFESPKKKAKVE

SEQ ID NO: 7219 - protein, 2096 aa, synthetic construct
MPAAKRVKLDGGDKKYSIGLDIGTNSVGWAVITDEYKVPSKKFKVLGNTDRHSIKKNLIGALLFDSGETAEATRLKRTARRRYTRRKNRICYLQEIFSNEMAKVDDSFFHRLEESFLVEEDKKHERHPIFGNIVDEVAYHEKYPTIYHLRKKLVDSTDKADLRLIYLALAHMIKFRGHFLIEGDLNPDNSDVDKLFIQLVQTYNQLFEENPINASGVDAKAILSARLSKSRRLENLIAQLPGEKKNGLFGNLIALSLGLTPNFKSNFDLAEDAKLQLSKDTYDDDLDNLLAQIGDQYADLFLAAKNLSDAILLSDILRVNTEITKAPLSASMIKRYDEHHQDLTLLKALVRQQLPEKYKEIFFDQSKNGYAGYIDGGASQEEFYKFIKPILEKMDGTEELLVKLNREDLLRKQRTFDNGSIPHQIHLGELHAILRRQEDFYPFLKDNREKIEKILTFRIPYYVGPLARGNSRFAWMTRKSEETITPWNFEEVVDKGASAQSFIERMTNFDKNLPNEKVLPKHSLLYEYFTVYNELTKVKYVTEGMRKPAFLSGEQKKAIVDLLFKTNRKVTVKQLKEDYFKKIECFDSVEISGVEDRFNASLGTYHDLLKIIKDKDFLDNEENEDILEDIVLTLTLFEDREMIEERLKTYAHLFDDKVMKQLKRRRYTGWGRLSRKLINGIRDKQSGKTILDFLKSDGFANRNFMQLIHDDSLTFKEDIQKAQVSGQGDSLHEHIANLAGSPAIKKGILQTVKVVDELVKVMGRHKPENIVIEMARENQTTQKGQKNSRERMKRIEEGIKELGSQILKEHPVENTQLQNEKLYLYYLQNGRDMYVDQELDINRLSDYDVDHIVPQSFLKDDSIDNKVLTRSDKARGKSDNVPSEEVVKKMKNYWRQLLNAKLITQRKFDNLTKAERGGLSELDKAGFIKRQLVETRQITKHVAQILDSRMNTKYDENDKLIREVKVITLKSKLVSDFRKDFQFYKVREINNYHHAHDAYLNAVVGTALIKKYPKLESEFVYGDYKVYDVRKMIAKSEQEIGKATAKYFFYSNIMNFFKTEITLANGEIRKRPLIETNGETGEIVWDKGRDFATVRKVLSMPQVNIVKKTEVQTGGFSKESILPKRNSDKLIARKKDWDPKKYGGFDSPTVAYSVLVVAKVEKGKSKKLKSVKELLGITIMERSSFEKNPIDFLEAKGYKEVKKDLIIKLPKYSLFELENGRKRMLASAGELQKGNELALPSKYVNFLYLASHYEKLKGSPEDNEQKQLFVEQHKHYLDEIIEQISEFSKRVILADANLDKVLSAYNKHRDKPIREQAENIIHLFTLTNLGAPAAFKYFDTTIDRKRYTSTKEVLDATLIHQSITGLYETRIDLSQLGGDGGEAAAKGGSPAPGGTLNLEDEYRLYETSAEPEVSPGSTWLSDFPQAWAETGGMGLAVRQAPLIIPLKATSTPVSIKQYPMSQEAKLGIKPHIQRLLDQGILVPCQSPWNTPLLPVKKPGTNDYRPVQDLREVNKRVEDIHPTVPNPYNLLSGLPPSHRWYTVLDLKDAFFCLRLHPTSQPLFAFEWRDPGMGISGQLTWTRLPQGFKNSPTLFNEALHRDLADFRIQHPDLILLQYVDDILLAATSELDCQQGTRALLLTLGNLGYRASAKKAQLCQKQVKYLGYLLKEGQRWLTEARKETVMGQPTPKTPRQLREFLGKAGFCRLFIPGFAEMAAPLYPLTKPGTLFNWGPDQQKAYQEIKQALLTAPALGLPDLTKPFELFVDEKQGYAKGVLTQKLGPWRRPVAYLSKKLDPVAAGWPPCLRMVAAIAVLRKDAGKLTMGQPLVILAPHAVEALVKQPPDRWLSNARMTHYQAMLLDTDRVQFGPVVALNPATLLPLPEEGAPHDCLEILAETHGTRPDLTDQPIPDADHTWYTDGSSFLQEGQRKAGAAVTTETEVIWARALPAGTSAQRAELIALTQALKMAEGKRLNVYTDSRYAFATAHIHGEIYRRRGWLTSEGREIKNKSEILALLKALFLPKRLSIIHCLGHQKGDSAEARGNRLADQAAREAAIKTPPDTSTLLAGKRTADGSEFEKRTADGSEFESPKKKAKVE

SEQ ID NO: 7220 - protein, 2096 aa, synthetic construct
MPAAKRVKLDGGDKKYSIGLDIGTNSVGWAVITDEYKVPSKKFKVLGNTDRHSIKKNLIGALLFDSGETAEATRLKRTARRRYTRRKNRICYLQEIFSNEMAKVDDSFFHRLEESFLVEEDKKHERHPIFGNIVDEVAYHEKYPTIYHLRKKLVDSTDKADLRLIYLALAHMIKFRGHFLIEGDLNPDNSDVDKLFIQLVQTYNQLFEENPINASGVDAKAILSARLSKSRRLENLIAQLPGEKKNGLFGNLIALSLGLTPNFKSNFDLAEDAKLQLSKDTYDDDLDNLLAQIGDQYADLFLAAKNLSDAILLSDILRVNTEITKAPLSASMIKRYDEHHQDLTLLKALVRQQLPEKYKEIFFDQSKNGYAGYIDGGASQEEFYKFIKPILEKMDGTEELLVKLNREDLLRKQRTFDNGSIPHQIHLGELHAILRRQEDFYPFLKDNREKIEKILTFRIPYYVGPLARGNSRFAWMTRKSEETITPWNFEEVVDKGASAQSFIERMTNFDKNLPNEKVLPKHSLLYEYFTVYNELTKVKYVTEGMRKPAFLSGEQKKAIVDLLFKTNRKVTVKQLKEDYFKKIECFDSVEISGVEDRFNASLGTYHDLLKIIKDKDFLDNEENEDILEDIVLTLTLFEDREMIEERLKTYAHLFDDKVMKQLKRRRYTGWGRLSRKLINGIRDKQSGKTILDFLKSDGFANRNFMQLIHDDSLTFKEDIQKAQVSGQGDSLHEHIANLAGSPAIKKGILQTVKVVDELVKVMGRHKPENIVIEMARENQTTQKGQKNSRERMKRIEEGIKELGSQILKEHPVENTQLQNEKLYLYYLQNGRDMYVDQELDINRLSDYDVDHIVPQSFLKDDSIDNKVLTRSDKARGKSDNVPSEEVVKKMKNYWRQLLNAKLITQRKFDNLTKAERGGLSELDKAGFIKRQLVETRQITKHVAQILDSRMNTKYDENDKLIREVKVITLKSKLVSDFRKDFQFYKVREINNYHHAHDAYLNAVVGTALIKKYPKLESEFVYGDYKVYDVRKMIAKSEQEIGKATAKYFFYSNIMNFFKTEITLANGEIRKRPLIETNGETGEIVWDKGRDFATVRKVLSMPQVNIVKKTEVQTGGFSKESILPKRNSDKLIARKKDWDPKKYGGFDSPTVAYSVLVVAKVEKGKSKKLKSVKELLGITIMERSSFEKNPIDFLEAKGYKEVKKDLIIKLPKYSLFELENGRKRMLASAGELQKGNELALPSKYVNFLYLASHYEKLKGSPEDNEQKQLFVEQHKHYLDEIIEQISEFSKRVILADANLDKVLSAYNKHRDKPIREQAENIIHLFTLTNLGAPAAFKYFDTTIDRKRYTSTKEVLDATLIHQSITGLYETRIDLSQLGGDGGEAAAKGGSPAPGGTLGIEDEYRLHETSTEPDVSLGSTWLSDFPQAWAETGGMGLAVRQAPLIIPLKATSTPVSIQQYPMSHEARLGIKPHIQRLLDQGILVPCQSPWNTPLLPVKKPGTNDYRPVQDLREVNKRVEDIHPTVPNPYNLLSGLPPSHQWYTVLDLKDAFFCLRLHPTSQPLFAFEWRDPGMGISGQLTWTRLPQGFKNSPTLFNEALHRDLADFRIQHPDLILLQYVDDILLAATSELDCQQGTRALLQTLGDLGYRASAKKAQICQKQVKYLGYLLREGQRWLTEARKETVMGQPVPKTPRQLREFLGTAGFCRLWIPGFAEMAAPLYPLTKPGTLFSWGPDQQKAYQEIKQALLTAPALGLPDLTKPFELFVDEKQGYAKGVLTQKLGPWRRPVAYLSKKLDPVAAGWPPCLRMVAAIAVLTKDAGKLTMGQPLVILAPHAVEALVKQPPDRWLSNARMTHYQAMLLDTDRVQFGPVVALNPATLLPLPEEGAPHDCLEILAETHGTRPDLTDQPIPDADHTWYTDGSSFLQEGQRKAGAAVTTETEVIWAGALPAGTSAQRAELIALTQALKMAEGKRLNVYTDSRYAFATAHIHGEIYRRRGWLTSEGREIKNKSEILALLKALFLPKRLSIIHCLGHQKGDSAEARGNRLADQAAREAAIKTPPDTSTLLAGKRTADGSEFEKRTADGSEFESPKKKAKVE

SEQ ID NO: 7221 - protein, 2096 aa, synthetic construct
MPAAKRVKLDGGDKKYSIGLDIGTNSVGWAVITDEYKVPSKKFKVLGNTDRHSIKKNLIGALLFDSGETAEATRLKRTARRRYTRRKNRICYLQEIFSNEMAKVDDSFFHRLEESFLVEEDKKHERHPIFGNIVDEVAYHEKYPTIYHLRKKLVDSTDKADLRLIYLALAHMIKFRGHFLIEGDLNPDNSDVDKLFIQLVQTYNQLFEENPINASGVDAKAILSARLSKSRRLENLIAQLPGEKKNGLFGNLIALSLGLTPNFKSNFDLAEDAKLQLSKDTYDDDLDNLLAQIGDQYADLFLAAKNLSDAILLSDILRVNTEITKAPLSASMIKRYDEHHQDLTLLKALVRQQLPEKYKEIFFDQSKNGYAGYIDGGASQEEFYKFIKPILEKMDGTEELLVKLNREDLLRKQRTFDNGSIPHQIHLGELHAILRRQEDFYPFLKDNREKIEKILTFRIPYYVGPLARGNSRFAWMTRKSEETITPWNFEEVVDKGASAQSFIERMTNFDKNLPNEKVLPKHSLLYEYFTVYNELTKVKYVTEGMRKPAFLSGEQKKAIVDLLFKTNRKVTVKQLKEDYFKKIECFDSVEISGVEDRFNASLGTYHDLLKIIKDKDFLDNEENEDILEDIVLTLTLFEDREMIEERLKTYAHLFDDKVMKQLKRRRYTGWGRLSRKLINGIRDKQSGKTILDFLKSDGFANRNFMQLIHDDSLTFKEDIQKAQVSGQGDSLHEHIANLAGSPAIKKGILQTVKVVDELVKVMGRHKPENIVIEMARENQTTQKGQKNSRERMKRIEEGIKELGSQILKEHPVENTQLQNEKLYLYYLQNGRDMYVDQELDINRLSDYDVDHIVPQSFLKDDSIDNKVLTRSDKARGKSDNVPSEEVVKKMKNYWRQLLNAKLITQRKFDNLTKAERGGLSELDKAGFIKRQLVETRQITKHVAQILDSRMNTKYDENDKLIREVKVITLKSKLVSDFRKDFQFYKVREINNYHHAHDAYLNAVVGTALIKKYPKLESEFVYGDYKVYDVRKMIAKSEQEIGKATAKYFFYSNIMNFFKTEITLANGEIRKRPLIETNGETGEIVWDKGRDFATVRKVLSMPQVNIVKKTEVQTGGFSKESILPKRNSDKLIARKKDWDPKKYGGFDSPTVAYSVLVVAKVEKGKSKKLKSVKELLGITIMERSSFEKNPIDFLEAKGYKEVKKDLIIKLPKYSLFELENGRKRMLASAGELQKGNELALPSKYVNFLYLASHYEKLKGSPEDNEQKQLFVEQHKHYLDEIIEQISEFSKRVILADANLDKVLSAYNKHRDKPIREQAENIIHLFTLTNLGAPAAFKYFDTTIDRKRYTSTKEVLDATLIHQSITGLYETRIDLSQLGGDGGEAAAKGGSPAPGGTLNIEDEYRLHETSKGPDVPLGSTWLSDFPQAWAETGGMGLAVRQAPLIIPLKATSTPVSIKQYPMSQEARLGIKPHIQRLLDQGILVPCQSPWNTPLLPVKKPGTNDYRPVQDLREVNKRVEDIHPTVPNPYNLLSGLPPSHQWYTVLDLKDAFFCLRLHPTSQSLFAFEWRDPEMGISGQLTWTRLPQGFKNSPTLFDEALHRDLADFRIQHPDLILLQYVDDLLLAATSELDCQQGTRALLQTLGDLGYRASAKKAQICQKQVKYLGYLLKEGQRWLTEARKETVMGQPTPKTPRQLREFLGTAGFCRLWIPGFAEMAAPLYPLTKTGTLFEWGPDQQKAYQEIKQALLTAPALGLPDLTKPFELFVDEKQGYAKGVLTQKLGPWRRPVAYLSKKLDPVAAGWPPCLRMVAAIAVLTKDAGKLTMGQPLVILAPHAVEALVKQPPDRWLSNARMTHYQALLLDTDRVQFGPIVALNPATLLPLPEEGLQHDCLDILAEAHGTRPDLTDQPLPDADHTWYTDGSSFLQEGQRKAGAAVTTETEVVWAKALPAGTSAQRAELIALTQALKMAEGKKLNVYTDSRYAFATAHIHGEIYRRRGLLTSEGKEIKNKDEILALLKALFLPKRLSIIHCPGHQKGNRAEARGNRMADQAAREVATRETPETSTLLAGKRTADGSEFEKRTADGSEFESPKKKAKVE

SEQ ID NO: 7222 - protein, 2096 aa, synthetic construct
MPAAKRVKLDGGDKKYSIGLDIGTNSVGWAVITDEYKVPSKKFKVLGNTDRHSIKKNLIGALLFDSGETAEATRLKRTARRRYTRRKNRICYLQEIFSNEMAKVDDSFFHRLEESFLVEEDKKHERHPIFGNIVDEVAYHEKYPTIYHLRKKLVDSTDKADLRLIYLALAHMIKFRGHFLIEGDLNPDNSDVDKLFIQLVQTYNQLFEENPINASGVDAKAILSARLSKSRRLENLIAQLPGEKKNGLFGNLIALSLGLTPNFKSNFDLAEDAKLQLSKDTYDDDLDNLLAQIGDQYADLFLAAKNLSDAILLSDILRVNTEITKAPLSASMIKRYDEHHQDLTLLKALVRQQLPEKYKEIFFDQSKNGYAGYIDGGASQEEFYKFIKPILEKMDGTEELLVKLNREDLLRKQRTFDNGSIPHQIHLGELHAILRRQEDFYPFLKDNREKIEKILTFRIPYYVGPLARGNSRFAWMTRKSEETITPWNFEEVVDKGASAQSFIERMTNFDKNLPNEKVLPKHSLLYEYFTVYNELTKVKYVTEGMRKPAFLSGEQKKAIVDLLFKTNRKVTVKQLKEDYFKKIECFDSVEISGVEDRFNASLGTYHDLLKIIKDKDFLDNEENEDILEDIVLTLTLFEDREMIEERLKTYAHLFDDKVMKQLKRRRYTGWGRLSRKLINGIRDKQSGKTILDFLKSDGFANRNFMQLIHDDSLTFKEDIQKAQVSGQGDSLHEHIANLAGSPAIKKGILQTVKVVDELVKVMGRHKPENIVIEMARENQTTQKGQKNSRERMKRIEEGIKELGSQILKEHPVENTQLQNEKLYLYYLQNGRDMYVDQELDINRLSDYDVDHIVPQSFLKDDSIDNKVLTRSDKARGKSDNVPSEEVVKKMKNYWRQLLNAKLITQRKFDNLTKAERGGLSELDKAGFIKRQLVETRQITKHVAQILDSRMNTKYDENDKLIREVKVITLKSKLVSDFRKDFQFYKVREINNYHHAHDAYLNAVVGTALIKKYPKLESEFVYGDYKVYDVRKMIAKSEQEIGKATAKYFFYSNIMNFFKTEITLANGEIRKRPLIETNGETGEIVWDKGRDFATVRKVLSMPQVNIVKKTEVQTGGFSKESILPKRNSDKLIARKKDWDPKKYGGFDSPTVAYSVLVVAKVEKGKSKKLKSVKELLGITIMERSSFEKNPIDFLEAKGYKEVKKDLIIKLPKYSLFELENGRKRMLASAGELQKGNELALPSKYVNFLYLASHYEKLKGSPEDNEQKQLFVEQHKHYLDEIIEQISEFSKRVILADANLDKVLSAYNKHRDKPIREQAENIIHLFTLTNLGAPAAFKYFDTTIDRKRYTSTKEVLDATLIHQSITGLYETRIDLSQLGGDGGEAAAKGGSPAPGGTLNIEDEYRLHETSKGPDVPLGSTWLSDFPQAWAETGGMGLAVRQAPLIIPLKATSTPVSIKQYPMSQEARLGIKPHIQRLLDQGILVPCQSPWNTPLLPVKKPGTNDYRPVQDLREVNKRVEDIHPTVPNPYNLLSGLPPSHQWYTVLDLKDAFFCLRLHPTSQSLFAFEWRDPEMGISGQLTWTRLPQGFKNSPTLFNEALHRDLADFRIQHPDLILLQYVDDLLLAATSELDCQQGTRALLQTLGDLGYRASAKKAQICQKQVKYLGYLLKEGQRWLTEARKETVMGQPTPKTPRQLREFLGKAGFCRLFIPGFAEMAAPLYPLTKPGTLFEWGPDQQKAYQEIKQALLTAPALGLPDLTKPFELFVDEKQGYAKGVLTQKLGPWRRPVAYLSKKLDPVAAGWPPCLRMVAAIAVLTKDAGKLTMGQPLVILAPHAVEALVKQPPDRWLSNARMTHYQALLLDTDRVQFGPIVALNPATLLPLPEEGLQHDCLDILAEAHGTRPDLTDQPLPDADHTWYTDGSSFLQEGQRKAGAAVTTETEVVWAKALPAGTSAQRAELIALTQALKMAEGKKLNVYTDSRYAFATAHIHGEIYRRRGWLTSEGKEIKNKDEILALLKALFLPKRLSIIHCPGHQKGNRAEARGNRMADQAAREVATRETPETSTLLAGKRTADGSEFEKRTADGSEFESPKKKAKVE

SEQ ID NO: 7223 - protein, 2087 aa, synthetic construct
MPAAKRVKLDGGDKKYSIGLDIGTNSVGWAVITDEYKVPSKKFKVLGNTDRHSIKKNLIGALLFDSGETAEATRLKRTARRRYTRRKNRICYLQEIFSNEMAKVDDSFFHRLEESFLVEEDKKHERHPIFGNIVDEVAYHEKYPTIYHLRKKLVDSTDKADLRLIYLALAHMIKFRGHFLIEGDLNPDNSDVDKLFIQLVQTYNQLFEENPINASGVDAKAILSARLSKSRRLENLIAQLPGEKKNGLFGNLIALSLGLTPNFKSNFDLAEDAKLQLSKDTYDDDLDNLLAQIGDQYADLFLAAKNLSDAILLSDILRVNTEITKAPLSASMIKRYDEHHQDLTLLKALVRQQLPEKYKEIFFDQSKNGYAGYIDGGASQEEFYKFIKPILEKMDGTEELLVKLNREDLLRKQRTFDNGSIPHQIHLGELHAILRRQEDFYPFLKDNREKIEKILTFRIPYYVGPLARGNSRFAWMTRKSEETITPWNFEEVVDKGASAQSFIERMTNFDKNLPNEKVLPKHSLLYEYFTVYNELTKVKYVTEGMRKPAFLSGEQKKAIVDLLFKTNRKVTVKQLKEDYFKKIECFDSVEISGVEDRFNASLGTYHDLLKIIKDKDFLDNEENEDILEDIVLTLTLFEDREMIEERLKTYAHLFDDKVMKQLKRRRYTGWGRLSRKLINGIRDKQSGKTILDFLKSDGFANRNFMQLIHDDSLTFKEDIQKAQVSGQGDSLHEHIANLAGSPAIKKGILQTVKVVDELVKVMGRHKPENIVIEMARENQTTQKGQKNSRERMKRIEEGIKELGSQILKEHPVENTQLQNEKLYLYYLQNGRDMYVDQELDINRLSDYDVDHIVPQSFLKDDSIDNKVLTRSDKARGKSDNVPSEEVVKKMKNYWRQLLNAKLITQRKFDNLTKAERGGLSELDKAGFIKRQLVETRQITKHVAQILDSRMNTKYDENDKLIREVKVITLKSKLVSDFRKDFQFYKVREINNYHHAHDAYLNAVVGTALIKKYPKLESEFVYGDYKVYDVRKMIAKSEQEIGKATAKYFFYSNIMNFFKTEITLANGEIRKRPLIETNGETGEIVWDKGRDFATVRKVLSMPQVNIVKKTEVQTGGFSKESILPKRNSDKLIARKKDWDPKKYGGFDSPTVAYSVLVVAKVEKGKSKKLKSVKELLGITIMERSSFEKNPIDFLEAKGYKEVKKDLIIKLPKYSLFELENGRKRMLASAGELQKGNELALPSKYVNFLYLASHYEKLKGSPEDNEQKQLFVEQHKHYLDEIIEQISEFSKRVILADANLDKVLSAYNKHRDKPIREQAENIIHLFTLTNLGAPAAFKYFDTTIDRKRYTSTKEVLDATLIHQSITGLYETRIDLSQLGGDGGEAAAKGGSPAPGGIPWLMKKPLQLTTLVPLQEYEERLLKQTMLTGSYKEKLQSLFLKYDALWQHWENQVGHRRIKPHHIATGTVNPRPQKQYPINPKAKASIQTVINDLLKQGVLIQQNSIMNTPVYPVPKPDGKWRMVLDYREVNKTIPLIAAQNQHSAGILSSIFRGKYKTTLDLSNGFWAHSITPESYWLTAFTWLGQQYCWTRLPQGFLNSPALFTADVVDLLKEVPNVQVYVDDIYISHDDPREHLEQLEKVFSLLLNAGYVVSLKKSEIAQHEVEFLGFNITKEGRGLTETFKQKLLNITPPRDLKQLQSILGLLNFARNFIPNFSELVKPLYNIIATANGKYITWTTDNSQQLQNIISMLNSAENLEERNPEVRLIMKVNTSPSAGYIRFYNEFAKRPIMYLNYVYTKAEVKFTNTEKLLTTIHKGLIKALDLGMGQEILVYSPIVSMTKIQKTPLPERKALPIRWITWMSYLEDPRIQFHYDKTLPELQQVPTVTDDIIAKIKHPSEFSMVFYTDGSAIKHPNVNKSHNAGMGIAQVQFKPEFTVINTWSIPLGDHTAQLAEVAAVEFACKKALKIDGPVLIVTDSFYVAESVNKELPYWQSNGFFNNKKKPLKHVSKWKSIADCIQLKPDIIIIHEKGHQPTASTFHTEGNNLADKLATQGSYVVNAGKRTADGSEFEKRTADGSEFESPKKKAKVE

SEQ ID NO: 7224 - protein, 2087 aa, synthetic construct
MPAAKRVKLDGGDKKYSIGLDIGTNSVGWAVITDEYKVPSKKFKVLGNTDRHSIKKNLIGALLFDSGETAEATRLKRTARRRYTRRKNRICYLQEIFSNEMAKVDDSFFHRLEESFLVEEDKKHERHPIFGNIVDEVAYHEKYPTIYHLRKKLVDSTDKADLRLIYLALAHMIKFRGHFLIEGDLNPDNSDVDKLFIQLVQTYNQLFEENPINASGVDAKAILSARLSKSRRLENLIAQLPGEKKNGLFGNLIALSLGLTPNFKSNFDLAEDAKLQLSKDTYDDDLDNLLAQIGDQYADLFLAAKNLSDAILLSDILRVNTEITKAPLSASMIKRYDEHHQDLTLLKALVRQQLPEKYKEIFFDQSKNGYAGYIDGGASQEEFYKFIKPILEKMDGTEELLVKLNREDLLRKQRTFDNGSIPHQIHLGELHAILRRQEDFYPFLKDNREKIEKILTFRIPYYVGPLARGNSRFAWMTRKSEETITPWNFEEVVDKGASAQSFIERMTNFDKNLPNEKVLPKHSLLYEYFTVYNELTKVKYVTEGMRKPAFLSGEQKKAIVDLLFKTNRKVTVKQLKEDYFKKIECFDSVEISGVEDRFNASLGTYHDLLKIIKDKDFLDNEENEDILEDIVLTLTLFEDREMIEERLKTYAHLFDDKVMKQLKRRRYTGWGRLSRKLINGIRDKQSGKTILDFLKSDGFANRNFMQLIHDDSLTFKEDIQKAQVSGQGDSLHEHIANLAGSPAIKKGILQTVKVVDELVKVMGRHKPENIVIEMARENQTTQKGQKNSRERMKRIEEGIKELGSQILKEHPVENTQLQNEKLYLYYLQNGRDMYVDQELDINRLSDYDVDHIVPQSFLKDDSIDNKVLTRSDKARGKSDNVPSEEVVKKMKNYWRQLLNAKLITQRKFDNLTKAERGGLSELDKAGFIKRQLVETRQITKHVAQILDSRMNTKYDENDKLIREVKVITLKSKLVSDFRKDFQFYKVREINNYHHAHDAYLNAVVGTALIKKYPKLESEFVYGDYKVYDVRKMIAKSEQEIGKATAKYFFYSNIMNFFKTEITLANGEIRKRPLIETNGETGEIVWDKGRDFATVRKVLSMPQVNIVKKTEVQTGGFSKESILPKRNSDKLIARKKDWDPKKYGGFDSPTVAYSVLVVAKVEKGKSKKLKSVKELLGITIMERSSFEKNPIDFLEAKGYKEVKKDLIIKLPKYSLFELENGRKRMLASAGELQKGNELALPSKYVNFLYLASHYEKLKGSPEDNEQKQLFVEQHKHYLDEIIEQISEFSKRVILADANLDKVLSAYNKHRDKPIREQAENIIHLFTLTNLGAPAAFKYFDTTIDRKRYTSTKEVLDATLIHQSITGLYETRIDLSQLGGDGGEAAAKGGSPAPGGIPWLMKKPLQLTTLVPLQEYEERLLKQTMLTGSYKEKLQSLFLKYDALWQHWENQVGHRRIKPHHIATGTVNPRPQKQYPINPKAKASIQTVINDLLKQGVLIQQNSIMNTPVYPVPKPDGKWRMVLDYREVNKTIPLIAAQNQHSAGILSSIFRGKYKTTLDLSNGFWAHSITPESYWLTAFTWLGQQYCWTRLPQGFLNSPALFNADVVDLLKEVPNVQVYVDDIYISHDDPREHLEQLEKVFSLLLNAGYVVSLKKSEIAQHEVEFLGFNITKEGRGLTETFKQKLLNITPPRDLKQLQSILGLLNFARNFIPNFSELVKPLYNIIATAPGKYITWTTDNSQQLQNIISMLNSAENLEERNPEVRLIMKVNTSPSAGYIRFYNEFAKRPIMYLNYVYTKAEVKFTNTEKLLTTIHKGLIKALDLGMGQEILVYSPIVSMTKIQKTPLPERKALPIRWITWMSYLEDPRIQFHYDKTLPELQQVPTVTDDIIAKIKHPSEFSMVFYTDGSAIKHPNVNKSHNAGMGIAQVQFKPEFTVINTWSIPLGDHTAQLAEVAAVEFACKKALKIDGPVLIVTDSFYVAESVNKELPYWQSNGFFNNKKKPLKHVSKWKSIADCIQLKPDIIIIHEKGHQPTASTFHTEGNNLADKLATQGSYVVNAGKRTADGSEFEKRTADGSEFESPKKKAKVE

SEQ ID NO: 7225 - protein, 2094 aa, synthetic construct
MPAAKRVKLDGGDKKYSIGLDIGTNSVGWAVITDEYKVPSKKFKVLGNTDRHSIKKNLIGALLFDSGETAEATRLKRTARRRYTRRKNRICYLQEIFSNEMAKVDDSFFHRLEESFLVEEDKKHERHPIFGNIVDEVAYHEKYPTIYHLRKKLVDSTDKADLRLIYLALAHMIKFRGHFLIEGDLNPDNSDVDKLFIQLVQTYNQLFEENPINASGVDAKAILSARLSKSRRLENLIAQLPGEKKNGLFGNLIALSLGLTPNFKSNFDLAEDAKLQLSKDTYDDDLDNLLAQIGDQYADLFLAAKNLSDAILLSDILRVNTEITKAPLSASMIKRYDEHHQDLTLLKALVRQQLPEKYKEIFFDQSKNGYAGYIDGGASQEEFYKFIKPILEKMDGTEELLVKLNREDLLRKQRTFDNGSIPHQIHLGELHAILRRQEDFYPFLKDNREKIEKILTFRIPYYVGPLARGNSRFAWMTRKSEETITPWNFEEVVDKGASAQSFIERMTNFDKNLPNEKVLPKHSLLYEYFTVYNELTKVKYVTEGMRKPAFLSGEQKKAIVDLLFKTNRKVTVKQLKEDYFKKIECFDSVEISGVEDRFNASLGTYHDLLKIIKDKDFLDNEENEDILEDIVLTLTLFEDREMIEERLKTYAHLFDDKVMKQLKRRRYTGWGRLSRKLINGIRDKQSGKTILDFLKSDGFANRNFMQLIHDDSLTFKEDIQKAQVSGQGDSLHEHIANLAGSPAIKKGILQTVKVVDELVKVMGRHKPENIVIEMARENQTTQKGQKNSRERMKRIEEGIKELGSQILKEHPVENTQLQNEKLYLYYLQNGRDMYVDQELDINRLSDYDVDHIVPQSFLKDDSIDNKVLTRSDKARGKSDNVPSEEVVKKMKNYWRQLLNAKLITQRKFDNLTKAERGGLSELDKAGFIKRQLVETRQITKHVAQILDSRMNTKYDENDKLIREVKVITLKSKLVSDFRKDFQFYKVREINNYHHAHDAYLNAVVGTALIKKYPKLESEFVYGDYKVYDVRKMIAKSEQEIGKATAKYFFYSNIMNFFKTEITLANGEIRKRPLIETNGETGEIVWDKGRDFATVRKVLSMPQVNIVKKTEVQTGGFSKESILPKRNSDKLIARKKDWDPKKYGGFDSPTVAYSVLVVAKVEKGKSKKLKSVKELLGITIMERSSFEKNPIDFLEAKGYKEVKKDLIIKLPKYSLFELENGRKRMLASAGELQKGNELALPSKYVNFLYLASHYEKLKGSPEDNEQKQLFVEQHKHYLDEIIEQISEFSKRVILADANLDKVLSAYNKHRDKPIREQAENIIHLFTLTNLGAPAAFKYFDTTIDRKRYTSTKEVLDATLIHQSITGLYETRIDLSQLGGDGGEAAAKGGSPAPGGVLNLEEEYRLHEKPVPSSIDPSWLQLFPTVWAERAGMGLANQVPPVVVELRSGASPVAVRQYPMSKEAREGIRPHIQRFLDLGVLVPCQSPWNTPLLPVKKPGTNDYRPVQDLREINKRVQDIHPTVPNPYNLLSSLPPSHTWYSVLDLKDAFFCLKLHPNSQPLFAFEWRDPEKGNTGQLTWTRLPQGFKNSPTLFDEALHRDLAPFRALNPQVVLLQYVDDLLVAAPTYRDCKEGTQKLLQELSKLGYRVSAKKAQLCQKEVTYLGYLLKEGKRWLTPARKATVMKIPPPTTPRQVREFLGTAGFCRLWIPGFASLAAPLYPLTKESIPFIWTEEHQKAFDRIKEALLSAPALALPDLTKPFTLYVDERAGVARGVLTQTLGPWRRPVAYLSKKLDPVASGWPTCLKAVAAVALLLKDADKLTLGQNVTVIASHSLESIVRQPPDRWMTNARMTHYQSLLLNERVSFAPPAVLNPATLLPVESEATPVHRCSEILAEETGTRRDLKDQPLPGVPAWYTDGSSFIAEGKRRAGAAIVDGKRTVWASSLPEGTSAQKAELVALTQALRLAEGKDINIYTDSRYAFATAHIHGAIYKQRGLLTSAGKDIKNKEEILALLEAIHLPKRVAIIHCPGHQKGNDPVATGNRRADEAAKQAALSTRVLAETTKPAGKRTADGSEFEKRTADGSEFESPKKKAKVE

SEQ ID NO: 7226 - protein, 2094 aa, synthetic construct
MPAAKRVKLDGGDKKYSIGLDIGTNSVGWAVITDEYKVPSKKFKVLGNTDRHSIKKNLIGALLFDSGETAEATRLKRTARRRYTRRKNRICYLQEIFSNEMAKVDDSFFHRLEESFLVEEDKKHERHPIFGNIVDEVAYHEKYPTIYHLRKKLVDSTDKADLRLIYLALAHMIKFRGHFLIEGDLNPDNSDVDKLFIQLVQTYNQLFEENPINASGVDAKAILSARLSKSRRLENLIAQLPGEKKNGLFGNLIALSLGLTPNFKSNFDLAEDAKLQLSKDTYDDDLDNLLAQIGDQYADLFLAAKNLSDAILLSDILRVNTEITKAPLSASMIKRYDEHHQDLTLLKALVRQQLPEKYKEIFFDQSKNGYAGYIDGGASQEEFYKFIKPILEKMDGTEELLVKLNREDLLRKQRTFDNGSIPHQIHLGELHAILRRQEDFYPFLKDNREKIEKILTFRIPYYVGPLARGNSRFAWMTRKSEETITPWNFEEVVDKGASAQSFIERMTNFDKNLPNEKVLPKHSLLYEYFTVYNELTKVKYVTEGMRKPAFLSGEQKKAIVDLLFKTNRKVTVKQLKEDYFKKIECFDSVEISGVEDRFNASLGTYHDLLKIIKDKDFLDNEENEDILEDIVLTLTLFEDREMIEERLKTYAHLFDDKVMKQLKRRRYTGWGRLSRKLINGIRDKQSGKTILDFLKSDGFANRNFMQLIHDDSLTFKEDIQKAQVSGQGDSLHEHIANLAGSPAIKKGILQTVKVVDELVKVMGRHKPENIVIEMARENQTTQKGQKNSRERMKRIEEGIKELGSQILKEHPVENTQLQNEKLYLYYLQNGRDMYVDQELDINRLSDYDVDHIVPQSFLKDDSIDNKVLTRSDKARGKSDNVPSEEVVKKMKNYWRQLLNAKLITQRKFDNLTKAERGGLSELDKAGFIKRQLVETRQITKHVAQILDSRMNTKYDENDKLIREVKVITLKSKLVSDFRKDFQFYKVREINNYHHAHDAYLNAVVGTALIKKYPKLESEFVYGDYKVYDVRKMIAKSEQEIGKATAKYFFYSNIMNFFKTEITLANGEIRKRPLIETNGETGEIVWDKGRDFATVRKVLSMPQVNIVKKTEVQTGGFSKESILPKRNSDKLIARKKDWDPKKYGGFDSPTVAYSVLVVAKVEKGKSKKLKSVKELLGITIMERSSFEKNPIDFLEAKGYKEVKKDLIIKLPKYSLFELENGRKRMLASAGELQKGNELALPSKYVNFLYLASHYEKLKGSPEDNEQKQLFVEQHKHYLDEIIEQISEFSKRVILADANLDKVLSAYNKHRDKPIREQAENIIHLFTLTNLGAPAAFKYFDTTIDRKRYTSTKEVLDATLIHQSITGLYETRIDLSQLGGDGGEAAAKGGSPAPGGVLNLEEEYRLHEKPVPSSIDPSWLQLFPTVWAERAGMGLANQVPPVVVELRSGASPVAVRQYPMSKEAREGIRPHIQRFLDLGVLVPCQSPWNTPLLPVKKPGTNDYRPVQDLREINKRVQDIHPTVPNPYNLLSSLPPSHTWYSVLDLKDAFFCLKLHPNSQPLFAFEWRDPEKGNTGQLTWTRLPQGFKNSPTLFNEALHRDLAPFRALNPQVVLLQYVDDLLVAAPTYRDCKEGTQKLLQELSKLGYRVSAKKAQLCQKEVTYLGYLLKEGKRWLTPARKATVMKIPPPTTPRQVREFLGKAGFCRLFIPGFASLAAPLYPLTKPSIPFIWTEEHQKAFDRIKEALLSAPALALPDLTKPFTLYVDERAGVARGVLTQTLGPWRRPVAYLSKKLDPVASGWPTCLKAVAAVALLLKDADKLTLGQNVTVIASHSLESIVRQPPDRWMTNARMTHYQSLLLNERVSFAPPAVLNPATLLPVESEATPVHRCSEILAEETGTRRDLKDQPLPGVPAWYTDGSSFIAEGKRRAGAAIVDGKRTVWASSLPEGTSAQKAELVALTQALRLAEGKDINIYTDSRYAFATAHIHGAIYKQRGWLTSAGKDIKNKEEILALLEAIHLPKRVAIIHCPGHQKGNDPVATGNRRADEAAKQAALSTRVLAETTKPAGKRTADGSEFEKRTADGSEFESPKKKAKVE

SEQ ID NO: 7227 - protein, 2096 aa, synthetic construct
MPAAKRVKLDGGDKKYSIGLDIGTNSVGWAVITDEYKVPSKKFKVLGNTDRHSIKKNLIGALLFDSGETAEATRLKRTARRRYTRRKNRICYLQEIFSNEMAKVDDSFFHRLEESFLVEEDKKHERHPIFGNIVDEVAYHEKYPTIYHLRKKLVDSTDKADLRLIYLALAHMIKFRGHFLIEGDLNPDNSDVDKLFIQLVQTYNQLFEENPINASGVDAKAILSARLSKSRRLENLIAQLPGEKKNGLFGNLIALSLGLTPNFKSNFDLAEDAKLQLSKDTYDDDLDNLLAQIGDQYADLFLAAKNLSDAILLSDILRVNTEITKAPLSASMIKRYDEHHQDLTLLKALVRQQLPEKYKEIFFDQSKNGYAGYIDGGASQEEFYKFIKPILEKMDGTEELLVKLNREDLLRKQRTFDNGSIPHQIHLGELHAILRRQEDFYPFLKDNREKIEKILTFRIPYYVGPLARGNSRFAWMTRKSEETITPWNFEEVVDKGASAQSFIERMTNFDKNLPNEKVLPKHSLLYEYFTVYNELTKVKYVTEGMRKPAFLSGEQKKAIVDLLFKTNRKVTVKQLKEDYFKKIECFDSVEISGVEDRFNASLGTYHDLLKIIKDKDFLDNEENEDILEDIVLTLTLFEDREMIEERLKTYAHLFDDKVMKQLKRRRYTGWGRLSRKLINGIRDKQSGKTILDFLKSDGFANRNFMQLIHDDSLTFKEDIQKAQVSGQGDSLHEHIANLAGSPAIKKGILQTVKVVDELVKVMGRHKPENIVIEMARENQTTQKGQKNSRERMKRIEEGIKELGSQILKEHPVENTQLQNEKLYLYYLQNGRDMYVDQELDINRLSDYDVDHIVPQSFLKDDSIDNKVLTRSDKARGKSDNVPSEEVVKKMKNYWRQLLNAKLITQRKFDNLTKAERGGLSELDKAGFIKRQLVETRQITKHVAQILDSRMNTKYDENDKLIREVKVITLKSKLVSDFRKDFQFYKVREINNYHHAHDAYLNAVVGTALIKKYPKLESEFVYGDYKVYDVRKMIAKSEQEIGKATAKYFFYSNIMNFFKTEITLANGEIRKRPLIETNGETGEIVWDKGRDFATVRKVLSMPQVNIVKKTEVQTGGFSKESILPKRNSDKLIARKKDWDPKKYGGFDSPTVAYSVLVVAKVEKGKSKKLKSVKELLGITIMERSSFEKNPIDFLEAKGYKEVKKDLIIKLPKYSLFELENGRKRMLASAGELQKGNELALPSKYVNFLYLASHYEKLKGSPEDNEQKQLFVEQHKHYLDEIIEQISEFSKRVILADANLDKVLSAYNKHRDKPIREQAENIIHLFTLTNLGAPAAFKYFDTTIDRKRYTSTKEVLDATLIHQSITGLYETRIDLSQLGGDGGEAAAKGGSPAPGGTLNIEDEYRLHETSKEPDVPLGSTWLSDFPQAWAETGGMGLAVRQAPLIIPLKATSTPVSIKQYPMSQEARLGIKPHIQRLLDQGILVPCQSPWNTPLLPVKKPGTNDYRPVQDLREVNKRVEDIHPTVPNPYNLLSGLPPSHQWYTVLDLKDAFFCLRLHPTSQPLFAFEWRDPEMGISGQLTWTRLPQGFKNSPTLFNEALHRDLADFRIQHPDLILLQYVDDLLLAATSEQDCQRGTRALLQTLGNLGYRASAKKAQICQKQVKYLGYLLKEGQRWLTEARKETVMGQPTPKTPRQLREFLGTAGFCRLWIPGFAEMAAPLYPLTKPGTLFNWGPDQQKAYQEIKQALLTAPALGLPDLTKPFELFVDEKQGYAKGVLTQKLGPWRRPVAYLSKKLDPVAAGWPPCLRMVAAIAVLTKDAGKLTMGQPLVILAPHAVEALVKQPPDRWLSNARMTHYQAMLLDTDRVQFGPVVALNPATLLPLPEKEAPHDCLEILAETHGTRPDLTDQPIPDADYTWYTDGSSFLQEGQRRAGAAVTTETEVIWARALPAGTSAQRAELIALTQALKMAEGKKLNVYTDSRYAFATAHVHGEIYRRRGWLTSEGREIKNKNEILALLKALFLPKRLSIIHCPGHQKGNSAEARGNRMADQAAREAAMKAVLETSTLLAGKRTADGSEFEKRTADGSEFESPKKKAKVE

SEQ ID NO: 7228 - protein, 2087 aa, synthetic construct
MPAAKRVKLDGGDKKYSIGLDIGTNSVGWAVITDEYKVPSKKFKVLGNTDRHSIKKNLIGALLFDSGETAEATRLKRTARRRYTRRKNRICYLQEIFSNEMAKVDDSFFHRLEESFLVEEDKKHERHPIFGNIVDEVAYHEKYPTIYHLRKKLVDSTDKADLRLIYLALAHMIKFRGHFLIEGDLNPDNSDVDKLFIQLVQTYNQLFEENPINASGVDAKAILSARLSKSRRLENLIAQLPGEKKNGLFGNLIALSLGLTPNFKSNFDLAEDAKLQLSKDTYDDDLDNLLAQIGDQYADLFLAAKNLSDAILLSDILRVNTEITKAPLSASMIKRYDEHHQDLTLLKALVRQQLPEKYKEIFFDQSKNGYAGYIDGGASQEEFYKFIKPILEKMDGTEELLVKLNREDLLRKQRTFDNGSIPHQIHLGELHAILRRQEDFYPFLKDNREKIEKILTFRIPYYVGPLARGNSRFAWMTRKSEETITPWNFEEVVDKGASAQSFIERMTNFDKNLPNEKVLPKHSLLYEYFTVYNELTKVKYVTEGMRKPAFLSGEQKKAIVDLLFKTNRKVTVKQLKEDYFKKIECFDSVEISGVEDRFNASLGTYHDLLKIIKDKDFLDNEENEDILEDIVLTLTLFEDREMIEERLKTYAHLFDDKVMKQLKRRRYTGWGRLSRKLINGIRDKQSGKTILDFLKSDGFANRNFMQLIHDDSLTFKEDIQKAQVSGQGDSLHEHIANLAGSPAIKKGILQTVKVVDELVKVMGRHKPENIVIEMARENQTTQKGQKNSRERMKRIEEGIKELGSQILKEHPVENTQLQNEKLYLYYLQNGRDMYVDQELDINRLSDYDVDHIVPQSFLKDDSIDNKVLTRSDKARGKSDNVPSEEVVKKMKNYWRQLLNAKLITQRKFDNLTKAERGGLSELDKAGFIKRQLVETRQITKHVAQILDSRMNTKYDENDKLIREVKVITLKSKLVSDFRKDFQFYKVREINNYHHAHDAYLNAVVGTALIKKYPKLESEFVYGDYKVYDVRKMIAKSEQEIGKATAKYFFYSNIMNFFKTEITLANGEIRKRPLIETNGETGEIVWDKGRDFATVRKVLSMPQVNIVKKTEVQTGGFSKESILPKRNSDKLIARKKDWDPKKYGGFDSPTVAYSVLVVAKVEKGKSKKLKSVKELLGITIMERSSFEKNPIDFLEAKGYKEVKKDLIIKLPKYSLFELENGRKRMLASAGELQKGNELALPSKYVNFLYLASHYEKLKGSPEDNEQKQLFVEQHKHYLDEIIEQISEFSKRVILADANLDKVLSAYNKHRDKPIREQAENIIHLFTLTNLGAPAAFKYFDTTIDRKRYTSTKEVLDATLIHQSITGLYETRIDLSQLGGDGGEAAAKPAPGGSGGVPWILKKPLELTIKLDLEEQQGTLLNNSILSKKGKEELKQLFEKYSALWQSWENQVGHRRIRPHKIATGTVKPTPQKQYHINPKAKPDIQIVINDLLKQGVLIQKESTMNTPVYPVPKPNGRWRMVLDYRAVNKVTPLIAVQNQHSYGILGSLFKGRYKTTIDLSNGFWAHPIVPEDYWITAFTWQGKQYCWTVLPQGFLNSPGLFNGDVVDLLQGIPNVEVYVDDVYISHDSEKEHLEYLDILFNRLKEAGYIISLKKSNIANSIVDFLGFQITNEGRGLTDTFKEKLENITAPTTLKQLQSILGLLNFARNFIPDFTELIAPLYALIPKSPKNYVPWQIEHSTTLETLITKLNGAEYLQGRKGDKTLIMKVNASYTTGYIRYYNEGEKKPISYVSIVFSKTELKFTELEKLLTTVHKGLLKALDLSMGQNIHVYSPIVSMQNIQKTPQTAKKALASRWLSWLSYLEDPRIRFFYDPQMPALKDLPAVDTGKDNKKHPSNFQHIFYTDGSAITSPTKEGHLNAGMGIVYFINKDGNLQKQQEWSISLGNHTAQFAEIAAFEFALKKCLPLGGNILVVTDSNYVAKAYNEELDVWASNGFVNNRKKPLKHISKWKSVADLKRLRPDVVVTHEPGHQKLDSSPHAYGNNLADQLATQASFKVHAGKRTADGSEFEKRTADGSEFESPKKKAKVE

SEQ ID NO: 7229 - protein, 2176 aa, synthetic construct
MPAAKRVKLDGGDKKYSIGLDIGTNSVGWAVITDEYKVPSKKFKVLGNTDRHSIKKNLIGALLFDSGETAEATRLKRTARRRYTRRKNRICYLQEIFSNEMAKVDDSFFHRLEESFLVEEDKKHERHPIFGNIVDEVAYHEKYPTIYHLRKKLVDSTDKADLRLIYLALAHMIKFRGHFLIEGDLNPDNSDVDKLFIQLVQTYNQLFEENPINASGVDAKAILSARLSKSRRLENLIAQLPGEKKNGLFGNLIALSLGLTPNFKSNFDLAEDAKLQLSKDTYDDDLDNLLAQIGDQYADLFLAAKNLSDAILLSDILRVNTEITKAPLSASMIKRYDEHHQDLTLLKALVRQQLPEKYKEIFFDQSKNGYAGYIDGGASQEEFYKFIKPILEKMDGTEELLVKLNREDLLRKQRTFDNGSIPHQIHLGELHAILRRQEDFYPFLKDNREKIEKILTFRIPYYVGPLARGNSRFAWMTRKSEETITPWNFEEVVDKGASAQSFIERMTNFDKNLPNEKVLPKHSLLYEYFTVYNELTKVKYVTEGMRKPAFLSGEQKKAIVDLLFKTNRKVTVKQLKEDYFKKIECFDSVEISGVEDRFNASLGTYHDLLKIIKDKDFLDNEENEDILEDIVLTLTLFEDREMIEERLKTYAHLFDDKVMKQLKRRRYTGWGRLSRKLINGIRDKQSGKTILDFLKSDGFANRNFMQLIHDDSLTFKEDIQKAQVSGQGDSLHEHIANLAGSPAIKKGILQTVKVVDELVKVMGRHKPENIVIEMARENQTTQKGQKNSRERMKRIEEGIKELGSQILKEHPVENTQLQNEKLYLYYLQNGRDMYVDQELDINRLSDYDVDHIVPQSFLKDDSIDNKVLTRSDKARGKSDNVPSEEVVKKMKNYWRQLLNAKLITQRKFDNLTKAERGGLSELDKAGFIKRQLVETRQITKHVAQILDSRMNTKYDENDKLIREVKVITLKSKLVSDFRKDFQFYKVREINNYHHAHDAYLNAVVGTALIKKYPKLESEFVYGDYKVYDVRKMIAKSEQEIGKATAKYFFYSNIMNFFKTEITLANGEIRKRPLIETNGETGEIVWDKGRDFATVRKVLSMPQVNIVKKTEVQTGGFSKESILPKRNSDKLIARKKDWDPKKYGGFDSPTVAYSVLVVAKVEKGKSKKLKSVKELLGITIMERSSFEKNPIDFLEAKGYKEVKKDLIIKLPKYSLFELENGRKRMLASAGELQKGNELALPSKYVNFLYLASHYEKLKGSPEDNEQKQLFVEQHKHYLDEIIEQISEFSKRVILADANLDKVLSAYNKHRDKPIREQAENIIHLFTLTNLGAPAAFKYFDTTIDRKRYTSTKEVLDATLIHQSITGLYETRIDLSQLGGDGGEAAAKPAPGGSGGMNPLQLLQPLPAEIKGTKLLAHWNSGATITCIPESFLEDEQPIKKTLIKTIHGEKQQNVYYVTFKVKGRKVEAEVIASPYEYILLSPTDVPWLTQQPLQLTILVPLQEYQEKILSKTALPEDQKQQLKTLFVKYDNLWQHWENQVGHRKIRPHNIATGDYPPRPQKQYPINPKAKPSIQIVIDDLLKQGVLTPQNSTMNTPVYPVPKPDGRWRMVLDYREVNKTIPLTAAQNQHSAGILATIVRQKYKTTLDLANGFWAHPITPESYWLTAFTWQGKQYCWTRLPQGFLNSPALFNADVVDLLKEIPNVQVYVDDIYLSHDDPKEHVQQLEKVFQILLQAGYVVSLKKSEIGQKTVEFLGFNITKEGRGLTDTFKTKLLNITPPKDLKQLQSILGLLNFARNFIPNFAELVQPLYNLIAPAKGKYIEWSEENTKQLNMVIEALNTASNLEERLPEQRLVIKVNTSPSAGYVRYYNETGKKPIMYLNYVFSKAELKFSMLEKLLTTMHKALIKAMDLAMGQEILVYSPIVSMTKIQKTPLPERKALPIRWITWMTYLEDPRIQFHYDKTLPELKHIPDVYTSSQSPVKHPSQYEGVFYTDGSAIKSPDPTKSNNAGMGIVHATYKPEYQVLNQWSIPLGNHTAQMAEIAAVEFACKKALKIPGPVLVITDSFYVAESANKELPYWKSNGFVNNKKKPLKHISKWKSIAECLSMKPDITIQHEKGISLQIPVFILKGNALADKLATQGSYVVNAGKRTADGSEFEKRTADGSEFESPKKKAKVE

SEQ ID NO: 7230 - protein, 2094 aa, synthetic construct
MPAAKRVKLDGGDKKYSIGLDIGTNSVGWAVITDEYKVPSKKFKVLGNTDRHSIKKNLIGALLFDSGETAEATRLKRTARRRYTRRKNRICYLQEIFSNEMAKVDDSFFHRLEESFLVEEDKKHERHPIFGNIVDEVAYHEKYPTIYHLRKKLVDSTDKADLRLIYLALAHMIKFRGHFLIEGDLNPDNSDVDKLFIQLVQTYNQLFEENPINASGVDAKAILSARLSKSRRLENLIAQLPGEKKNGLFGNLIALSLGLTPNFKSNFDLAEDAKLQLSKDTYDDDLDNLLAQIGDQYADLFLAAKNLSDAILLSDILRVNTEITKAPLSASMIKRYDEHHQDLTLLKALVRQQLPEKYKEIFFDQSKNGYAGYIDGGASQEEFYKFIKPILEKMDGTEELLVKLNREDLLRKQRTFDNGSIPHQIHLGELHAILRRQEDFYPFLKDNREKIEKILTFRIPYYVGPLARGNSRFAWMTRKSEETITPWNFEEVVDKGASAQSFIERMTNFDKNLPNEKVLPKHSLLYEYFTVYNELTKVKYVTEGMRKPAFLSGEQKKAIVDLLFKTNRKVTVKQLKEDYFKKIECFDSVEISGVEDRFNASLGTYHDLLKIIKDKDFLDNEENEDILEDIVLTLTLFEDREMIEERLKTYAHLFDDKVMKQLKRRRYTGWGRLSRKLINGIRDKQSGKTILDFLKSDGFANRNFMQLIHDDSLTFKEDIQKAQVSGQGDSLHEHIANLAGSPAIKKGILQTVKVVDELVKVMGRHKPENIVIEMARENQTTQKGQKNSRERMKRIEEGIKELGSQILKEHPVENTQLQNEKLYLYYLQNGRDMYVDQELDINRLSDYDVDHIVPQSFLKDDSIDNKVLTRSDKARGKSDNVPSEEVVKKMKNYWRQLLNAKLITQRKFDNLTKAERGGLSELDKAGFIKRQLVETRQITKHVAQILDSRMNTKYDENDKLIREVKVITLKSKLVSDFRKDFQFYKVREINNYHHAHDAYLNAVVGTALIKKYPKLESEFVYGDYKVYDVRKMIAKSEQEIGKATAKYFFYSNIMNFFKTEITLANGEIRKRPLIETNGETGEIVWDKGRDFATVRKVLSMPQVNIVKKTEVQTGGFSKESILPKRNSDKLIARKKDWDPKKYGGFDSPTVAYSVLVVAKVEKGKSKKLKSVKELLGITIMERSSFEKNPIDFLEAKGYKEVKKDLIIKLPKYSLFELENGRKRMLASAGELQKGNELALPSKYVNFLYLASHYEKLKGSPEDNEQKQLFVEQHKHYLDEIIEQISEFSKRVILADANLDKVLSAYNKHRDKPIREQAENIIHLFTLTNLGAPAAFKYFDTTIDRKRYTSTKEVLDATLIHQSITGLYETRIDLSQLGGDGGEAAAKPAPGGSGGVLNLEEEYRLHEKPVPSSIDPSWLQLFPTVWAERAGMGLANQVPPVVVELRSGASPVAVRQYPMSKEAREGIRPHIQKFLDLGVLVPCRSPWNTPLLPVKKPGTNDYRPVQDLREINKRVQDIHPTVPNPYNLLSSLPPSYTWYSVLDLKDAFFCLRLHPNSQPLFAFEWKDPEKGNTGQLTWTRLPQGFKNSPTLFNEALHRDLAPFRALNPQVVLLQYVDDLLVAAPTYEDCKKGTQKLLQELSKLGYRVSAKKAQLCQREVTYLGYLLKEGKRWLTPARKATVMKIPVPTTPRQVREFLGTAGFCRLWIPGFASLAAPLYPLTKPSIPFIWTEEHQQAFDHIKKALLSAPALALPDLTKPFTLYIDERAGVARGVLTQTLGPWRRPVAYLSKKLDPVASGWPTCLKAVAAVALLLKDADKLTLGQNVTVIASHSLESIVRQPPDRWMTNARMTHYQSLLLNERVSFAPPAVLNPATLLPVESEATPVHRCSEILAEETGTRRDLEDQPLPGVPTWYTDGSSFITEGKRRAGAPIVDGKRTVWASSLPEGTSAQKAELVALTQALRLAEGKNINIYTDSRYAFATAHIHGAIYKQRGWLTSAGKDIKNKEEILALLEAIHLPRRVAIIHCPGHQRGSNPVATGNRRADEAAKQAALSTRVLAGTTKPAGKRTADGSEFEKRTADGSEFESPKKKAKVE

SEQ ID NO: 7231 - protein, 2127 aa, synthetic construct
MPAAKRVKLDGGDKKYSIGLDIGTNSVGWAVITDEYKVPSKKFKVLGNTDRHSIKKNLIGALLFDSGETAEATRLKRTARRRYTRRKNRICYLQEIFSNEMAKVDDSFFHRLEESFLVEEDKKHERHPIFGNIVDEVAYHEKYPTIYHLRKKLVDSTDKADLRLIYLALAHMIKFRGHFLIEGDLNPDNSDVDKLFIQLVQTYNQLFEENPINASGVDAKAILSARLSKSRRLENLIAQLPGEKKNGLFGNLIALSLGLTPNFKSNFDLAEDAKLQLSKDTYDDDLDNLLAQIGDQYADLFLAAKNLSDAILLSDILRVNTEITKAPLSASMIKRYDEHHQDLTLLKALVRQQLPEKYKEIFFDQSKNGYAGYIDGGASQEEFYKFIKPILEKMDGTEELLVKLNREDLLRKQRTFDNGSIPHQIHLGELHAILRRQEDFYPFLKDNREKIEKILTFRIPYYVGPLARGNSRFAWMTRKSEETITPWNFEEVVDKGASAQSFIERMTNFDKNLPNEKVLPKHSLLYEYFTVYNELTKVKYVTEGMRKPAFLSGEQKKAIVDLLFKTNRKVTVKQLKEDYFKKIECFDSVEISGVEDRFNASLGTYHDLLKIIKDKDFLDNEENEDILEDIVLTLTLFEDREMIEERLKTYAHLFDDKVMKQLKRRRYTGWGRLSRKLINGIRDKQSGKTILDFLKSDGFANRNFMQLIHDDSLTFKEDIQKAQVSGQGDSLHEHIANLAGSPAIKKGILQTVKVVDELVKVMGRHKPENIVIEMARENQTTQKGQKNSRERMKRIEEGIKELGSQILKEHPVENTQLQNEKLYLYYLQNGRDMYVDQELDINRLSDYDVDHIVPQSFLKDDSIDNKVLTRSDKARGKSDNVPSEEVVKKMKNYWRQLLNAKLITQRKFDNLTKAERGGLSELDKAGFIKRQLVETRQITKHVAQILDSRMNTKYDENDKLIREVKVITLKSKLVSDFRKDFQFYKVREINNYHHAHDAYLNAVVGTALIKKYPKLESEFVYGDYKVYDVRKMIAKSEQEIGKATAKYFFYSNIMNFFKTEITLANGEIRKRPLIETNGETGEIVWDKGRDFATVRKVLSMPQVNIVKKTEVQTGGFSKESILPKRNSDKLIARKKDWDPKKYGGFDSPTVAYSVLVVAKVEKGKSKKLKSVKELLGITIMERSSFEKNPIDFLEAKGYKEVKKDLIIKLPKYSLFELENGRKRMLASAGELQKGNELALPSKYVNFLYLASHYEKLKGSPEDNEQKQLFVEQHKHYLDEIIEQISEFSKRVILADANLDKVLSAYNKHRDKPIREQAENIIHLFTLTNLGAPAAFKYFDTTIDRKRYTSTKEVLDATLIHQSITGLYETRIDLSQLGGDGGEAAAKPAPGGSGGLLGRDLLTKLKAQIQFSTEGPQVTWEDRPAMCLVLNLEEEYRLHEKPVPPSIDPSWLQLFPMVWAEKAGMGLANQVPPVVVELKSDASPVAVRQYPMSKEAREGIRPHIQRFLDLGILVPCQSPWNTPLLPVKKPGTNDYRPVQDLREVNKRVQDIHPTVPNPYNLLSSLPPSHTWYSVLDLKDAFFCLKLHPNSQPLFAFEWRDPEKGNTGQLTWTRLPQGFKNSPTLFNEALHRDLASFRALNPQVVMLQYVDDLLVAAPTYRDCKEGTRRLLQELSKLGYRVSAKKAQLCREEVTYLGYLLKGGKRWLTPARKATVMKIPTPTTPRQVREFLGTAGFCRLWIPGFASLAAPLYPLTRPKVPFTWTEAHQEAFGRIKEALLSAPALALPDLTKPFALYVDEKEGVARGVLTQTLGPWRRPVAYLSKKLDPVASGWPTCLKAIAAVALLLKDADKLTLGQNVLVIAPHNLESIVRQPPDRWMTNARMTHYQSLLLNERVSFAPPAILNPATLLPVESDDTPIHICSEILAEETGTRPDLRDQPLPGVPAWYTDGSSFIMDGRRQAGAAIVDNKRTVWASNLPEGTSAQKAELIALTQALRLAEGKSINIYTDSRYAFATAHVHGAIYKQRGWLTSAGKDIKNKEEILALLEAIHLPKRVAIIHCPGHQRGTDPVATGNRKADEAAKQAAQSTRILTETTKNAGKRTADGSEFEKRTADGSEFESPKKKAKVE

SEQ ID NO: 7232 - protein, 2218 aa, synthetic construct
MPAAKRVKLDGGDKKYSIGLDIGTNSVGWAVITDEYKVPSKKFKVLGNTDRHSIKKNLIGALLFDSGETAEATRLKRTARRRYTRRKNRICYLQEIFSNEMAKVDDSFFHRLEESFLVEEDKKHERHPIFGNIVDEVAYHEKYPTIYHLRKKLVDSTDKADLRLIYLALAHMIKFRGHFLIEGDLNPDNSDVDKLFIQLVQTYNQLFEENPINASGVDAKAILSARLSKSRRLENLIAQLPGEKKNGLFGNLIALSLGLTPNFKSNFDLAEDAKLQLSKDTYDDDLDNLLAQIGDQYADLFLAAKNLSDAILLSDILRVNTEITKAPLSASMIKRYDEHHQDLTLLKALVRQQLPEKYKEIFFDQSKNGYAGYIDGGASQEEFYKFIKPILEKMDGTEELLVKLNREDLLRKQRTFDNGSIPHQIHLGELHAILRRQEDFYPFLKDNREKIEKILTFRIPYYVGPLARGNSRFAWMTRKSEETITPWNFEEVVDKGASAQSFIERMTNFDKNLPNEKVLPKHSLLYEYFTVYNELTKVKYVTEGMRKPAFLSGEQKKAIVDLLFKTNRKVTVKQLKEDYFKKIECFDSVEISGVEDRFNASLGTYHDLLKIIKDKDFLDNEENEDILEDIVLTLTLFEDREMIEERLKTYAHLFDDKVMKQLKRRRYTGWGRLSRKLINGIRDKQSGKTILDFLKSDGFANRNFMQLIHDDSLTFKEDIQKAQVSGQGDSLHEHIANLAGSPAIKKGILQTVKVVDELVKVMGRHKPENIVIEMARENQTTQKGQKNSRERMKRIEEGIKELGSQILKEHPVENTQLQNEKLYLYYLQNGRDMYVDQELDINRLSDYDVDHIVPQSFLKDDSIDNKVLTRSDKARGKSDNVPSEEVVKKMKNYWRQLLNAKLITQRKFDNLTKAERGGLSELDKAGFIKRQLVETRQITKHVAQILDSRMNTKYDENDKLIREVKVITLKSKLVSDFRKDFQFYKVREINNYHHAHDAYLNAVVGTALIKKYPKLESEFVYGDYKVYDVRKMIAKSEQEIGKATAKYFFYSNIMNFFKTEITLANGEIRKRPLIETNGETGEIVWDKGRDFATVRKVLSMPQVNIVKKTEVQTGGFSKESILPKRNSDKLIARKKDWDPKKYGGFDSPTVAYSVLVVAKVEKGKSKKLKSVKELLGITIMERSSFEKNPIDFLEAKGYKEVKKDLIIKLPKYSLFELENGRKRMLASAGELQKGNELALPSKYVNFLYLASHYEKLKGSPEDNEQKQLFVEQHKHYLDEIIEQISEFSKRVILADANLDKVLSAYNKHRDKPIREQAENIIHLFTLTNLGAPAAFKYFDTTIDRKRYTSTKEVLDATLIHQSITGLYETRIDLSQLGGDGGEAAAKPAPGGSGGTLGDQGSRGSDPLPEPRVTLTVEGIPTEFLVNTGAEHSVLTKPMGKMGSKRTVVAGATGSKVYPWTTKRLLKIGQKQVTHSFLVIPECPAPLLGRDLLTKLKAQIQFSTEGPQVTWEDRPAMCLVLNLEEEYRLHEKPVPPSIDPSWLQLFPMVWAEKAGMGLANQVPPVVVELKSDASPVAVRQYPMSKEAREGIRPHIQRFLDLGILVPCQSPWNTPLLPVKKPGTNDYRPVQDLREVNKRVQDIHPTVPNPYNLLSSLPPSHTWYSVLDLKDAFFCLKLHPNSQPLFAFEWRDPEKGNTGQLTWTRLPQGFKNSPTLFNEALHRDLASFRALNPQVVMLQYVDDLLVAAPTYRDCKEGTRRLLQELSKLGYRVSAKKAQLCREEVTYLGYLLKGGKRWLTPARKATVMKIPTPTTPRQVREFLGTAGFCRLWIPGFASLAAPLYPLTRPKVPFTWTEAHQEAFGRIKEALLSAPALALPDLTKPFALYVDEKEGVARGVLTQTLGPWRRPVAYLSKKLDPVASGWPTCLKAIAAVALLLKDADKLTLGQNVLVIAPHNLESIVRQPPDRWMTNARMTHYQSLLLNERVSFAPPAILNPATLLPVESDDTPIHICSEILAEETGTRPDLRDQPLPGVPAWYTDGSSFIMDGRRQAGAAIVDNKRTVWASNLPEGTSAQKAELIALTQALRLAEGKSINIYTDSRYAFATAHVHGAIYKQRGWLTSAGKDIKNKEEILALLEAIHLPKRVAIIHCPGHQRGTDPVATGNRKADEAAKQAAQSTRILTETTKNAGKRTADGSEFEKRTADGSEFESPKKKAKVE

SEQ ID NO: 7233 - protein, 2096 aa, synthetic construct
MPAAKRVKLDGGDKKYSIGLDIGTNSVGWAVITDEYKVPSKKFKVLGNTDRHSIKKNLIGALLFDSGETAEATRLKRTARRRYTRRKNRICYLQEIFSNEMAKVDDSFFHRLEESFLVEEDKKHERHPIFGNIVDEVAYHEKYPTIYHLRKKLVDSTDKADLRLIYLALAHMIKFRGHFLIEGDLNPDNSDVDKLFIQLVQTYNQLFEENPINASGVDAKAILSARLSKSRRLENLIAQLPGEKKNGLFGNLIALSLGLTPNFKSNFDLAEDAKLQLSKDTYDDDLDNLLAQIGDQYADLFLAAKNLSDAILLSDILRVNTEITKAPLSASMIKRYDEHHQDLTLLKALVRQQLPEKYKEIFFDQSKNGYAGYIDGGASQEEFYKFIKPILEKMDGTEELLVKLNREDLLRKQRTFDNGSIPHQIHLGELHAILRRQEDFYPFLKDNREKIEKILTFRIPYYVGPLARGNSRFAWMTRKSEETITPWNFEEVVDKGASAQSFIERMTNFDKNLPNEKVLPKHSLLYEYFTVYNELTKVKYVTEGMRKPAFLSGEQKKAIVDLLFKTNRKVTVKQLKEDYFKKIECFDSVEISGVEDRFNASLGTYHDLLKIIKDKDFLDNEENEDILEDIVLTLTLFEDREMIEERLKTYAHLFDDKVMKQLKRRRYTGWGRLSRKLINGIRDKQSGKTILDFLKSDGFANRNFMQLIHDDSLTFKEDIQKAQVSGQGDSLHEHIANLAGSPAIKKGILQTVKVVDELVKVMGRHKPENIVIEMARENQTTQKGQKNSRERMKRIEEGIKELGSQILKEHPVENTQLQNEKLYLYYLQNGRDMYVDQELDINRLSDYDVDHIVPQSFLKDDSIDNKVLTRSDKARGKSDNVPSEEVVKKMKNYWRQLLNAKLITQRKFDNLTKAERGGLSELDKAGFIKRQLVETRQITKHVAQILDSRMNTKYDENDKLIREVKVITLKSKLVSDFRKDFQFYKVREINNYHHAHDAYLNAVVGTALIKKYPKLESEFVYGDYKVYDVRKMIAKSEQEIGKATAKYFFYSNIMNFFKTEITLANGEIRKRPLIETNGETGEIVWDKGRDFATVRKVLSMPQVNIVKKTEVQTGGFSKESILPKRNSDKLIARKKDWDPKKYGGFDSPTVAYSVLVVAKVEKGKSKKLKSVKELLGITIMERSSFEKNPIDFLEAKGYKEVKKDLIIKLPKYSLFELENGRKRMLASAGELQKGNELALPSKYVNFLYLASHYEKLKGSPEDNEQKQLFVEQHKHYLDEIIEQISEFSKRVILADANLDKVLSAYNKHRDKPIREQAENIIHLFTLTNLGAPAAFKYFDTTIDRKRYTSTKEVLDATLIHQSITGLYETRIDLSQLGGDGGEAAAKPAPGGSGGTLGIEDEYRLHETSTEPDVSLGSTWLSDFPQAWAETGGMGLAVRQAPLIIPLKATSTPVSIQQYPMSHEARLGIKPHIQRLLDQGILVPCQSPWNTPLLPVKKPGTNDYRPVQDLREVNKRVEDIHPTVPNPYNLLSGLPPSHQWYTVLDLKDAFFCLRLHPTSQPLFAFEWRDPGMGISGQLTWTRLPQGFKNSPTLFNEALHRDLADFRIQHPDLILLQYVDDILLAATSELDCQQGTRALLQTLGDLGYRASAKKAQICQKQVKYLGYLLREGQRWLTEARKETVMGQPVPKTPRQLREFLGTAGFCRLWIPGFAEMAAPLYPLTKPGTLFSWGPDQQKAYQEIKQALLTAPALGLPDLTKPFELFVDEKQGYAKGVLTQKLGPWRRPVAYLSKKLDPVAAGWPPCLRMVAAIAVLTKDAGKLTMGQPLVILAPHAVEALVKQPPDRWLSNARMTHYQAMLLDTDRVQFGPVVALNPATLLPLPEEGAPHDCLEILAETHGTRPDLTDQPIPDADHTWYTDGSSFLQEGQRKAGAAVTTETEVIWAGALPAGTSAQRAELIALTQALKMAEGKRLNVYTDSRYAFATAHIHGEIYRRRGWLTSEGREIKNKSEILALLKALFLPKRLSIIHCLGHQKGDSAEARGNRLADQAAREAAIKTPPDTSTLLAGKRTADGSEFEKRTADGSEFESPKKKAKVE

SEQ ID NO: 7234 - protein, 2096 aa, synthetic construct
MPAAKRVKLDGGDKKYSIGLDIGTNSVGWAVITDEYKVPSKKFKVLGNTDRHSIKKNLIGALLFDSGETAEATRLKRTARRRYTRRKNRICYLQEIFSNEMAKVDDSFFHRLEESFLVEEDKKHERHPIFGNIVDEVAYHEKYPTIYHLRKKLVDSTDKADLRLIYLALAHMIKFRGHFLIEGDLNPDNSDVDKLFIQLVQTYNQLFEENPINASGVDAKAILSARLSKSRRLENLIAQLPGEKKNGLFGNLIALSLGLTPNFKSNFDLAEDAKLQLSKDTYDDDLDNLLAQIGDQYADLFLAAKNLSDAILLSDILRVNTEITKAPLSASMIKRYDEHHQDLTLLKALVRQQLPEKYKEIFFDQSKNGYAGYIDGGASQEEFYKFIKPILEKMDGTEELLVKLNREDLLRKQRTFDNGSIPHQIHLGELHAILRRQEDFYPFLKDNREKIEKILTFRIPYYVGPLARGNSRFAWMTRKSEETITPWNFEEVVDKGASAQSFIERMTNFDKNLPNEKVLPKHSLLYEYFTVYNELTKVKYVTEGMRKPAFLSGEQKKAIVDLLFKTNRKVTVKQLKEDYFKKIECFDSVEISGVEDRFNASLGTYHDLLKIIKDKDFLDNEENEDILEDIVLTLTLFEDREMIEERLKTYAHLFDDKVMKQLKRRRYTGWGRLSRKLINGIRDKQSGKTILDFLKSDGFANRNFMQLIHDDSLTFKEDIQKAQVSGQGDSLHEHIANLAGSPAIKKGILQTVKVVDELVKVMGRHKPENIVIEMARENQTTQKGQKNSRERMKRIEEGIKELGSQILKEHPVENTQLQNEKLYLYYLQNGRDMYVDQELDINRLSDYDVDHIVPQSFLKDDSIDNKVLTRSDKARGKSDNVPSEEVVKKMKNYWRQLLNAKLITQRKFDNLTKAERGGLSELDKAGFIKRQLVETRQITKHVAQILDSRMNTKYDENDKLIREVKVITLKSKLVSDFRKDFQFYKVREINNYHHAHDAYLNAVVGTALIKKYPKLESEFVYGDYKVYDVRKMIAKSEQEIGKATAKYFFYSNIMNFFKTEITLANGEIRKRPLIETNGETGEIVWDKGRDFATVRKVLSMPQVNIVKKTEVQTGGFSKESILPKRNSDKLIARKKDWDPKKYGGFDSPTVAYSVLVVAKVEKGKSKKLKSVKELLGITIMERSSFEKNPIDFLEAKGYKEVKKDLIIKLPKYSLFELENGRKRMLASAGELQKGNELALPSKYVNFLYLASHYEKLKGSPEDNEQKQLFVEQHKHYLDEIIEQISEFSKRVILADANLDKVLSAYNKHRDKPIREQAENIIHLFTLTNLGAPAAFKYFDTTIDRKRYTSTKEVLDATLIHQSITGLYETRIDLSQLGGDGGEAAAKPAPGGSGGTLGIEDEYRLHETSTEPDVSLGSTWLSDFPQAWAETGGMGLAVRQAPLIIPLKATSTPVSIQQYPMSHEARLGIKPHIQRLLDQGILVPCQSPWNTPLLPVKKPGTNDYRPVQDLREVNKRVEDIHPTVPNPYNLLSGLPPSHQWYTVLDLKDAFFCLRLHPTSQPLFAFEWRDPGMGISGQLTWTRLPQGFKNSPTLFDEALHRDLADFRIQHPDLILLQYVDDILLAATSELDCQQGTRALLQTLGDLGYRASAKKAQICQKQVKYLGYLLREGQRWLTEARKETVMGQPVPKTPRQLREFLGTAGFCRLWIPGFAEMAAPLYPLTKTGTLFSWGPDQQKAYQEIKQALLTAPALGLPDLTKPFELFVDEKQGYAKGVLTQKLGPWRRPVAYLSKKLDPVAAGWPPCLRMVAAIAVLTKDAGKLTMGQPLVILAPHAVEALVKQPPDRWLSNARMTHYQAMLLDTDRVQFGPVVALNPATLLPLPEEGAPHDCLEILAETHGTRPDLTDQPIPDADHTWYTDGSSFLQEGQRKAGAAVTTETEVIWAGALPAGTSAQRAELIALTQALKMAEGKRLNVYTDSRYAFATAHIHGEIYRRRGLLTSEGREIKNKSEILALLKALFLPKRLSIIHCLGHQKGDSAEARGNRLADQAAREAAIKTPPDTSTLLAGKRTADGSEFEKRTADGSEFESPKKKAKVE

SEQ ID NO: 7235 - protein, 2096 aa, synthetic construct; identical to SEQ ID NO: 7233

SEQ ID NO: 7236 - protein, 2096 aa, synthetic construct
MPAAKRVKLDGGDKKYSIGLDIGTNSVGWAVITDEYKVPSKKFKVLGNTDRHSIKKNLIGALLFDSGETAEATRLKRTARRRYTRRKNRICYLQEIFSNEMAKVDDSFFHRLEESFLVEEDKKHERHPIFGNIVDEVAYHEKYPTIYHLRKKLVDSTDKADLRLIYLALAHMIKFRGHFLIEGDLNPDNSDVDKLFIQLVQTYNQLFEENPINASGVDAKAILSARLSKSRRLENLIAQLPGEKKNGLFGNLIALSLGLTPNFKSNFDLAEDAKLQLSKDTYDDDLDNLLAQIGDQYADLFLAAKNLSDAILLSDILRVNTEITKAPLSASMIKRYDEHHQDLTLLKALVRQQLPEKYKEIFFDQSKNGYAGYIDGGASQEEFYKFIKPILEKMDGTEELLVKLNREDLLRKQRTFDNGSIPHQIHLGELHAILRRQEDFYPFLKDNREKIEKILTFRIPYYVGPLARGNSRFAWMTRKSEETITPWNFEEVVDKGASAQSFIERMTNFDKNLPNEKVLPKHSLLYEYFTVYNELTKVKYVTEGMRKPAFLSGEQKKAIVDLLFKTNRKVTVKQLKEDYFKKIECFDSVEISGVEDRFNASLGTYHDLLKIIKDKDFLDNEENEDILEDIVLTLTLFEDREMIEERLKTYAHLFDDKVMKQLKRRRYTGWGRLSRKLINGIRDKQSGKTILDFLKSDGFANRNFMQLIHDDSLTFKEDIQKAQVSGQGDSLHEHIANLAGSPAIKKGILQTVKVVDELVKVMGRHKPENIVIEMARENQTTQKGQKNSRERMKRIEEGIKELGSQILKEHPVENTQLQNEKLYLYYLQNGRDMYVDQELDINRLSDYDVDHIVPQSFLKDDSIDNKVLTRSDKARGKSDNVPSEEVVKKMKNYWRQLLNAKLITQRKFDNLTKAERGGLSELDKAGFIKRQLVETRQITKHVAQILDSRMNTKYDENDKLIREVKVITLKSKLVSDFRKDFQFYKVREINNYHHAHDAYLNAVVGTALIKKYPKLESEFVYGDYKVYDVRKMIAKSEQEIGKATAKYFFYSNIMNFFKTEITLANGEIRKRPLIETNGETGEIVWDKGRDFATVRKVLSMPQVNIVKKTEVQTGGFSKESILPKRNSDKLIARKKDWDPKKYGGFDSPTVAYSVLVVAKVEKGKSKKLKSVKELLGITIMERSSFEKNPIDFLEAKGYKEVKKDLIIKLPKYSLFELENGRKRMLASAGELQKGNELALPSKYVNFLYLASHYEKLKGSPEDNEQKQLFVEQHKHYLDEIIEQISEFSKRVILADANLDKVLSAYNKHRDKPIREQAENIIHLFTLTNLGAPAAFKYFDTTIDRKRYTSTKEVLDATLIHQSITGLYETRIDLSQLGGDGGEAAAKPAPGGSGGTLNIEDEYRLHEISTEPDVSPGSTWLSDFPQAWAETGGMGLAVRQAPLIIPLKATSTPVSIKQYPMSQEAKLGIKPHIQRLLDQGILVPCQSPWNTPLLPVKKPGTNDYRPVQGLREVNKRVEDIHPTVPNPYNLLSGLPTSHRWYTVLDLKDAFFCLRLHPTSQPLFASEWRDPGMGISGQLTWTRLPQGFKNSPTLFNEALHRGLADFRIQHPDLILLQYVDDLLLAATSELDCQQGTRALLKTLGNLGYRASAKKAQICQKQVKYLGYLLREGQRWLTEARKETVMGQPTPKTPRQLREFLGKAGFCRLFIPRFAEMAAPLYPLTKPGTLFNWGPDQQKAYHEIKQALLTAPALGLPDLTKPFELFVDEKQGYAKGVLTQKLGPWRRPVAYLSKKLDPVAAGWPPCLRMVAAIAVLTKDAGKLTMGQPLVILAPHAVEALVKQPPDRWLSNARMTHYQAMLLDTDRVQFGPVVALNPATLLPLPEEGAPHDCLEILAETHGTEPDLTDQPIPDADHTWYTDGSSFLQEGQRKAGAAVTTETEVIWARALPAGTSAQRAELIALTQALKMAEGKRLNVYTDSRYAFATAHIHGEIYKRRGWLTSEGREIKNKSEILALLKALFLPKRLSIIHCLGHQKGDSAEARGNRLADQAAREAAIKTPPDTSTLLAGKRTADGSEFEKRTADGSEFESPKKKAKVE

SEQ ID NO: 7237 - protein, 2116 aa, synthetic construct
MPAAKRVKLDGGDKKYSIGLDIGTNSVGWAVITDEYKVPSKKFKVLGNTDRHSIKKNLIGALLFDSGETAEATRLKRTARRRYTRRKNRICYLQEIFSNEMAKVDDSFFHRLEESFLVEEDKKHERHPIFGNIVDEVAYHEKYPTIYHLRKKLVDSTDKADLRLIYLALAHMIKFRGHFLIEGDLNPDNSDVDKLFIQLVQTYNQLFEENPINASGVDAKAILSARLSKSRRLENLIAQLPGEKKNGLFGNLIALSLGLTPNFKSNFDLAEDAKLQLSKDTYDDDLDNLLAQIGDQYADLFLAAKNLSDAILLSDILRVNTEITKAPLSASMIKRYDEHHQDLTLLKALVRQQLPEKYKEIFFDQSKNGYAGYIDGGASQEEFYKFIKPILEKMDGTEELLVKLNREDLLRKQRTFDNGSIPHQIHLGELHAILRRQEDFYPFLKDNREKIEKILTFRIPYYVGPLARGNSRFAWMTRKSEETITPWNFEEVVDKGASAQSFIERMTNFDKNLPNEKVLPKHSLLYEYFTVYNELTKVKYVTEGMRKPAFLSGEQKKAIVDLLFKTNRKVTVKQLKEDYFKKIECFDSVEISGVEDRFNASLGTYHDLLKIIKDKDFLDNEENEDILEDIVLTLTLFEDREMIEERLKTYAHLFDDKVMKQLKRRRYTGWGRLSRKLINGIRDKQSGKTILDFLKSDGFANRNFMQLIHDDSLTFKEDIQKAQVSGQGDSLHEHIANLAGSPAIKKGILQTVKVVDELVKVMGRHKPENIVIEMARENQTTQKGQKNSRERMKRIEEGIKELGSQILKEHPVENTQLQNEKLYLYYLQNGRDMYVDQELDINRLSDYDVDHIVPQSFLKDDSIDNKVLTRSDKARGKSDNVPSEEVVKKMKNYWRQLLNAKLITQRKFDNLTKAERGGLSELDKAGFIKRQLVETRQITKHVAQILDSRMNTKYDENDKLIREVKVITLKSKLVSDFRKDFQFYKVREINNYHHAHDAYLNAVVGTALIKKYPKLESEFVYGDYKVYDVRKMIAKSEQEIGKATAKYFFYSNIMNFFKTEITLANGEIRKRPLIETNGETGEIVWDKGRDFATVRKVLSMPQVNIVKKTEVQTGGFSKESILPKRNSDKLIARKKDWDPKKYGGFDSPTVAYSVLVVAKVEKGKSKKLKSVKELLGITIMERSSFEKNPIDFLEAKGYKEVKKDLIIKLPKYSLFELENGRKRMLASAGELQKGNELALPSKYVNFLYLASHYEKLKGSPEDNEQKQLFVEQHKHYLDEIIEQISEFSKRVILADANLDKVLSAYNKHRDKPIREQAENIIHLFTLTNLGAPAAFKYFDTTIDRKRYTSTKEVLDATLIHQSITGLYETRIDLSQLGGDGGEAAAKPAPGGSGGVQEISDSRPMLHIYLNGRRFLGLLDTGADKTCIAGRDWPANWPIHQTESSLQGLGMACGVARSSQPLRWQHEDKSGIIHPFVIPTLPFTLWGRDIMKDIKVRLMTDSPDDSQDLMIGAIESNLFADQISWKSDQPVWLNQWPLKQEKLQALQQLVTEQLQLGHLEESNSPWNTPVFVIKKKSGKWRLLQDLRAVNATMHDMGALQPGLPSPVAVPKGWEIIIIDLQDCFFNIKLHPEDCKRFAFSVPSPNFKRPYQRFQWKVLPQGMKNSPTLCQKFVDKAILTVRDKYQDSYIVHYMDDILLAHPSRSIVDEILTSMIQALNKHGLVVSTEKIQKYDNLKYLGTHIQGDSVSYQKLQIRTDKLRTLNDFQKLLGNINWIRPFLKLTTGELKPLFEILNGDSNPISTRKLTPEACKALQLMNERLSTARVKRLDLSQPWSLCILKTEYTPTACLWQDGVVEWIHLPHISPKVITPYDIFCTQLIIKGRHRSKELFSKDPDYIVVPYTKVQFDLLLQEKEDWPISLLGFLGEVHFHLPKDPLLTFTLQTAIIFPHMTSTTPLEKGIVIFTDGSANGRSVTYIQGREPIIKENTQNTAQQAEIVAVITAFEEVSQPFNLYTDSKYVTGLFPEIETATLSPRTKIYTELKHLQRLIHKRQEKFYIGHIRGHTGLPGPLAQGNAYADSLTRILTAAGKRTADGSEFEKRTADGSEFESPKKKAKVE

SEQ ID NO: 7238 - protein, 2087 aa, synthetic construct
MPAAKRVKLDGGDKKYSIGLDIGTNSVGWAVITDEYKVPSKKFKVLGNTDRHSIKKNLIGALLFDSGETAEATRLKRTARRRYTRRKNRICYLQEIFSNEMAKVDDSFFHRLEESFLVEEDKKHERHPIFGNIVDEVAYHEKYPTIYHLRKKLVDSTDKADLRLIYLALAHMIKFRGHFLIEGDLNPDNSDVDKLFIQLVQTYNQLFEENPINASGVDAKAILSARLSKSRRLENLIAQLPGEKKNGLFGNLIALSLGLTPNFKSNFDLAEDAKLQLSKDTYDDDLDNLLAQIGDQYADLFLAAKNLSDAILLSDILRVNTEITKAPLSASMIKRYDEHHQDLTLLKALVRQQLPEKYKEIFFDQSKNGYAGYIDGGASQEEFYKFIKPILEKMDGTEELLVKLNREDLLRKQRTFDNGSIPHQIHLGELHAILRRQEDFYPFLKDNREKIEKILTFRIPYYVGPLARGNSRFAWMTRKSEETITPWNFEEVVDKGASAQSFIERMTNFDKNLPNEKVLPKHSLLYEYFTVYNELTKVKYVTEGMRKPAFLSGEQKKAIVDLLFKTNRKVTVKQLKEDYFKKIECFDSVEISGVEDRFNASLGTYHDLLKIIKDKDFLDNEENEDILEDIVLTLTLFEDREMIEERLKTYAHLFDDKVMKQLKRRRYTGWGRLSRKLINGIRDKQSGKTILDFLKSDGFANRNFMQLIHDDSLTFKEDIQKAQVSGQGDSLHEHIANLAGSPAIKKGILQTVKVVDELVKVMGRHKPENIVIEMARENQTTQKGQKNSRERMKRIEEGIKELGSQILKEHPVENTQLQNEKLYLYYLQNGRDMYVDQELDINRLSDYDVDHIVPQSFLKDDSIDNKVLTRSDKARGKSDNVPSEEVVKKMKNYWRQLLNAKLITQRKFDNLTKAERGGLSELDKAGFIKRQLVETRQITKHVAQILDSRMNTKYDENDKLIREVKVITLKSKLVSDFRKDFQFYKVREINNYHHAHDAYLNAVVGTALIKKYPKLESEFVYGDYKVYDVRKMIAKSEQEIGKATAKYFFYSNIMNFFKTEITLANGEIRKRPLIETNGETGEIVWDKGRDFATVRKVLSMPQVNIVKKTEVQTGGFSKESILPKRNSDKLIARKKDWDPKKYGGFDSPTVAYSVLVVAKVEKGKSKKLKSVKELLGITIMERSSFEKNPIDFLEAKGYKEVKKDLIIKLPKYSLFELENGRKRMLASAGELQKGNELALPSKYVNFLYLASHYEKLKGSPEDNEQKQLFVEQHKHYLDEIIEQISEFSKRVILADANLDKVLSAYNKHRDKPIREQAENIIHLFTLTNLGAPAAFKYFDTTIDRKRYTSTKEVLDATLIHQSITGLYETRIDLSQLGGDGGEAAAKPAPGGSGGIPWLMKKPLQLTTLVPLQEYEERLLKQTMLTGSYKEKLQSLFLKYDALWQHWENQVGHRRIKPHHIATGTVNPRPQKQYPINPKAKASIQTVINDLLKQGVLIQQNSIMNTPVYPVPKPDGKWRMVLDYREVNKTIPLIAAQNQHSAGILSSIFRGKYKTTLDLSNGFWAHSITPESYWLTAFTWLGQQYCWTRLPQGFLNSPALFNADVVDLLKEVPNVQVYVDDIYISHDDPREHLEQLEKVFSLLLNAGYVVSLKKSEIAQHEVEFLGFNITKEGRGLTETFKQKLLNITPPRDLKQLQSILGKLNFARNFIPNFSELVKPLYNIIATAPGKYITWTTDNSQQLQNIISMLNSAENLEERNPEVRLIMKVNTSPSAGYIRFYNEFAKRPIMYLNYVYTKAEVKFTNTEKLLTTIHKGLIKALDLGMGQEILVYSPIVSMTKIQKTPLPERKALPIRWITWMSYLEDPRIQFHYDKTLPELQQVPTVTDDIIAKIKHPSEFSMVFYTDGSAIKHPNVNKSHNAGMGIAQVQFKPEFTVINTWSIPLGDHTAQLAEVAAVEFACKKALKIDGPVLIVTDSFYVAESVNKELPYWQSNGFFNNKKKPLKHVSKWKSIADCIQLKPDIIIIHEKGHQPTASTFHTEGNNLADKLATQGSYVVNAGKRTADGSEFEKRTADGSEFESPKKKAKVE

SEQ ID NO: 7239 - protein, 2176 aa, synthetic construct
MPAAKRVKLDGGDKKYSIGLDIGTNSVGWAVITDEYKVPSKKFKVLGNTDRHSIKKNLIGALLFDSGETAEATRLKRTARRRYTRRKNRICYLQEIFSNEMAKVDDSFFHRLEESFLVEEDKKHERHPIFGNIVDEVAYHEKYPTIYHLRKKLVDSTDKADLRLIYLALAHMIKFRGHFLIEGDLNPDNSDVDKLFIQLVQTYNQLFEENPINASGVDAKAILSARLSKSRRLENLIAQLPGEKKNGLFGNLIALSLGLTPNFKSNFDLAEDAKLQLSKDTYDDDLDNLLAQIGDQYADLFLAAKNLSDAILLSDILRVNTEITKAPLSASMIKRYDEHHQDLTLLKALVRQQLPEKYKEIFFDQSKNGYAGYIDGGASQEEFYKFIKPILEKMDGTEELLVKLNREDLLRKQRTFDNGSIPHQIHLGELHAILRRQEDFYPFLKDNREKIEKILTFRIPYYVGPLARGNSRFAWMTRKSEETITPWNFEEVVDKGASAQSFIERMTNFDKNLPNEKVLPKHSLLYEYFTVYNELTKVKYVTEGMRKPAFLSGEQKKAIVDLLFKTNRKVTVKQLKEDYFKKIECFDSVEISGVEDRFNASLGTYHDLLKIIKDKDFLDNEENEDILEDIVLTLTLFEDREMIEERLKTYAHLFDDKVMKQLKRRRYTGWGRLSRKLINGIRDKQSGKTILDFLKSDGFANRNFMQLIHDDSLTFKEDIQKAQVSGQGDSLHEHIANLAGSPAIKKGILQTVKVVDELVKVMGRHKPENIVIEMARENQTTQKGQKNSRERMKRIEEGIKELGSQILKEHPVENTQLQNEKLYLYYLQNGRDMYVDQELDINRLSDYDVDHIVPQSFLKDDSIDNKVLTRSDKARGKSDNVPSEEVVKKMKNYWRQLLNAKLITQRKFDNLTKAERGGLSELDKAGFIKRQLVETRQITKHVAQILDSRMNTKYDENDKLIREVKVITLKSKLVSDFRKDFQFYKVREINNYHHAHDAYLNAVVGTALIKKYPKLESEFVYGDYKVYDVRKMIAKSEQEIGKATAKYFFYSNIMNFFKTEITLANGEIRKRPLIETNGETGEIVWDKGRDFATVRKVLSMPQVNIVKKTEVQTGGFSKESILPKRNSDKLIARKKDWDPKKYGGFDSPTVAYSVLVVAKVEKGKSKKLKSVKELLGITIMERSSFEKNPIDFLEAKGYKEVKKDLIIKLPKYSLFELENGRKRMLASAGELQKGNELALPSKYVNFLYLASHYEKLKGSPEDNEQKQLFVEQHKHYLDEIIEQISEFSKRVILADANLDKVLSAYNKHRDKPIREQAENIIHLFTLTNLGAPAAFKYFDTTIDRKRYTSTKEVLDATLIHQSITGLYETRIDLSQLGGDGGEAAAKPAPGGSGGMDPLQLLQPLEAEIKGTKLKAHWNSGATITCVPQAFLEEEVPIKNIWIKTIHGEKEQPVYYLTFKIQGRKVEAEVISSPYDYILVSPSDIPWLMKKPLQLTTLVPLQEYEERLLKQTMLTGSYKEKLQSLFLKYDALWQHWENQVGHRRIKPHHIATGTVNPRPQKQYPINPKAKASIQTVINDLLKQGVLIQQNSIMNTPVYPVPKPDGKWRMVLDYREVNKTIPLIAAQNQHSAGILSSIFRGKYKTTLDLSNGFWAHSITPESYWLTAFTWLGQQYCWTRLPQGFLNSPALFNADVVDLLKEVPNVQVYVDDIYISHDDPREHLEQLEKVFSLLLNAGYVVSLKKSEIAQHEVEFLGFNITKEGRGLTETFKQKLLNITPPRDLKQLQSILGLLNFARNFIPNFSELVKPLYNIIATAPGKYITWTTDNSQQLQNIISMLNSAENLEERNPEVRLIMKVNTSPSAGYIRFYNEFAKRPIMYLNYVYTKAEVKFTNTEKLLTTIHKGLIKALDLGMGQEILVYSPIVSMTKIQKTPLPERKALPIRWITWMSYLEDPRIQFHYDKTLPELQQVPTVTDDIIAKIKHPSEFSMVFYTDGSAIKHPNVNKSHNAGMGIAQVQFKPEFTVINTWSIPLGDHTAQLAEVAAVEFACKKALKIDGPVLIVTDSFYVAESVNKELPYWQSNGFFNNKKKPLKHVSKWKSIADCIQLKPDIIIIHEKGHQPTASTFHTEGNNLADKLATQGSYVVNAGKRTADGSEFEKRTADGSEFESPKKKAKVE

SEQ ID NO: 7240 - protein, 2094 aa, synthetic construct
MPAAKRVKLDGGDKKYSIGLDIGTNSVGWAVITDEYKVPSKKFKVLGNTDRHSIKKNLIGALLFDSGETAEATRLKRTARRRYTRRKNRICYLQEIFSNEMAKVDDSFFHRLEESFLVEEDKKHERHPIFGNIVDEVAYHEKYPTIYHLRKKLVDSTDKADLRLIYLALAHMIKFRGHFLIEGDLNPDNSDVDKLFIQLVQTYNQLFEENPINASGVDAKAILSARLSKSRRLENLIAQLPGEKKNGLFGNLIALSLGLTPNFKSNFDLAEDAKLQLSKDTYDDDLDNLLAQIGDQYADLFLAAKNLSDAILLSDILRVNTEITKAPLSASMIKRYDEHHQDLTLLKALVRQQLPEKYKEIFFDQSKNGYAGYIDGGASQEEFYKFIKPILEKMDGTEELLVKLNREDLLRKQRTFDNGSIPHQIHLGELHAILRRQEDFYPFLKDNREKIEKILTFRIPYYVGPLARGNSRFAWMTRKSEETITPWNFEEVVDKGASAQSFIERMTNFDKNLPNEKVLPKHSLLYEYFTVYNELTKVKYVTEGMRKPAFLSGEQKKAIVDLLFKTNRKVTVKQLKEDYFKKIECFDSVEISGVEDRFNASLGTYHDLLKIIKDKDFLDNEENEDILEDIVLTLTLFEDREMIEERLKTYAHLFDDKVMKQLKRRRYTGWGRLSRKLINGIRDKQSGKTILDFLKSDGFANRNFMQLIHDDSLTFKEDIQKAQVSGQGDSLHEHIANLAGSPAIKKGILQTVKVVDELVKVMGRHKPENIVIEMARENQTTQKGQKNSRERMKRIEEGIKELGSQILKEHPVENTQLQNEKLYLYYLQNGRDMYVDQELDINRLSDYDVDHIVPQSFLKDDSIDNKVLTRSDKARGKSDNVPSEEVVKKMKNYWRQLLNAKLITQRKFDNLTKAERGGLSELDKAGFIKRQLVETRQITKHVAQILDSRMNTKYDENDKLIREVKVITLKSKLVSDFRKDFQFYKVREINNYHHAHDAYLNAVVGTALIKKYPKLESEFVYGDYKVYDVRKMIAKSEQEIGKATAKYFFYSNIMNFFKTEITLANGEIRKRPLIETNGETGEIVWDKGRDFATVRKVLSMPQVNIVKKTEVQTGGFSKESILPKRNSDKLIARKKDWDPKKYGGFDSPTVAYSVLVVAKVEKGKSKKLKSVKELLGITIMERSSFEKNPIDFLEAKGYKEVKKDLIIKLPKYSLFELENGRKRMLASAGELQKGNELALPSKYVNFLYLASHYEKLKGSPEDNEQKQLFVEQHKHYLDEIIEQISEFSKRVILADANLDKVLSAYNKHRDKPIREQAENIIHLFTLTNLGAPAAFKYFDTTIDRKRYTSTKEVLDATLIHQSITGLYETRIDLSQLGGDGGEAAAKPAPGGSGGVLNLEEEYRLHEKPVPSSIDPSWLQLFPTVWAERAGMGLANQVPPVVVELRSGASPVAVRQYPMSKEAREGIRPHIQRFLDLGVLVPCQSPWNTPLLPVKKPGTNDYRPVQDLREINKRVQDIHPTVPNPYNLLSSLPPSHTWYSVLDLKDAFFCLKLHPNSQPLFAFEWRDPEKGNTGQLTWTRLPQGFKNSPTLFNEALHRDLAPFRALNPQVVLLQYVDDLLVAAPTYRDCKEGTQKLLQELSKLGYRVSAKKAQLCQKEVTYLGYLLKEGKRWLTPARKATVMKIPPPTTPRQVREFLGTAGFCRLWIPGFASLAAPLYPLTKPSIPFIWTEEHQKAFDRIKEALLSAPALALPDLTKPFTLYVDERAGVARGVLTQTLGPWRRPVAYLSKKLDPVASGWPTCLKAVAAVALLLKDADKLTLGQNVTVIASHSLESIVRQPPDRWMTNARMTHYQSLLLNERVSFAPPAVLNPATLLPVESEATPVHRCSEILAEETGTRRDLKDQPLPGVPAWYTDGSSFIAEGKRRAGAAIVDGKRTVWASSLPEGTSAQKAELVALTQALRLAEGKDINIYTDSRYAFATAHIHGAIYKQRGWLTSAGKDIKNKEEILALLEAIHLPKRVAIIHCPGHQKGNDPVATGNRRADEAAKQAALSTRVLAETTKPAGKRTADGSEFEKRTADGSEFESPKKKAKVE

SEQ ID NO: 7241 - protein, 2096 aa, synthetic construct
MPAAKRVKLDGGDKKYSIGLDIGTNSVGWAVITDEYKVPSKKFKVLGNTDRHSIKKNLIGALLFDSGETAEATRLKRTARRRYTRRKNRICYLQEIFSNEMAKVDDSFFHRLEESFLVEEDKKHERHPIFGNIVDEVAYHEKYPTIYHLRKKLVDSTDKADLRLIYLALAHMIKFRGHFLIEGDLNPDNSDVDKLFIQLVQTYNQLFEENPINASGVDAKAILSARLSKSRRLENLIAQLPGEKKNGLFGNLIALSLGLTPNFKSNFDLAEDAKLQLSKDTYDDDLDNLLAQIGDQYADLFLAAKNLSDAILLSDILRVNTEITKAPLSASMIKRYDEHHQDLTLLKALVRQQLPEKYKEIFFDQSKNGYAGYIDGGASQEEFYKFIKPILEKMDGTEELLVKLNREDLLRKQRTFDNGSIPHQIHLGELHAILRRQEDFYPFLKDNREKIEKILTFRIPYYVGPLARGNSRFAWMTRKSEETITPWNFEEVVDKGASAQSFIERMTNFDKNLPNEKVLPKHSLLYEYFTVYNELTKVKYVTEGMRKPAFLSGEQKKAIVDLLFKTNRKVTVKQLKEDYFKKIECFDSVEISGVEDRFNASLGTYHDLLKIIKDKDFLDNEENEDILEDIVLTLTLFEDREMIEERLKTYAHLFDDKVMKQLKRRRYTGWGRLSRKLINGIRDKQSGKTILDFLKSDGFANRNFMQLIHDDSLTFKEDIQKAQVSGQGDSLHEHIANLAGSPAIKKGILQTVKVVDELVKVMGRHKPENIVIEMARENQTTQKGQKNSRERMKRIEEGIKELGSQILKEHPVENTQLQNEKLYLYYLQNGRDMYVDQELDINRLSDYDVDHIVPQSFLKDDSIDNKVLTRSDKARGKSDNVPSEEVVKKMKNYWRQLLNAKLITQRKFDNLTKAERGGLSELDKAGFIKRQLVETRQITKHVAQILDSRMNTKYDENDKLIREVKVITLKSKLVSDFRKDFQFYKVREINNYHHAHDAYLNAVVGTALIKKYPKLESEFVYGDYKVYDVRKMIAKSEQEIGKATAKYFFYSNIMNFFKTEITLANGEIRKRPLIETNGETGEIVWDKGRDFATVRKVLSMPQVNIVKKTEVQTGGFSKESILPKRNSDKLIARKKDWDPKKYGGFDSPTVAYSVLVVAKVEKGKSKKLKSVKELLGITIMERSSFEKNPIDFLEAKGYKEVKKDLIIKLPKYSLFELENGRKRMLASAGELQKGNELALPSKYVNFLYLASHYEKLKGSPEDNEQKQLFVEQHKHYLDEIIEQISEFSKRVILADANLDKVLSAYNKHRDKPIREQAENIIHLFTLTNLGAPAAFKYFDTTIDRKRYTSTKEVLDATLIHQSITGLYETRIDLSQLGGDGGEAAAKPAPGGSGGTLNIEDEYRLHETSKEPDVPLGSTWLSDFPQAWAETGGMGLAVRQAPLIIPLKATSTPVSIKQYPMSQEARLGIKPHIQRLLDQGILVPCQSPWNTPLLPVKKPGTNDYRPVQDLREVNKRVEDIHPTVPNPYNLLSGLPPSHQWYTVLDLKDAFFCLRLHPTSQPLFAFEWRDPEMGISGQLTWTRLPQGFKNSPTLFDEALHRDLADFRIQHPDLILLQYVDDLLLAATSEQDCQRGTRALLQTLGNLGYRASAKKAQICQKQVKYLGYLLKEGQRWLTEARKETVMGQPTPKTPRQLREFLGTAGFCRLWIPGFAEMAAPLYPLTKTGTLFNWGPDQQKAYQEIKQALLTAPALGLPDLTKPFELFVDEKQGYAKGVLTQKLGPWRRPVAYLSKKLDPVAAGWPPCLRMVAAIAVLTKDAGKLTMGQPLVILAPHAVEALVKQPPDRWLSNARMTHYQAMLLDTDRVQFGPVVALNPATLLPLPEKEAPHDCLEILAETHGTRPDLTDQPIPDADYTWYTDGSSFLQEGQRRAGAAVTTETEVIWARALPAGTSAQRAELIALTQALKMAEGKKLNVYTDSRYAFATAHVHGEIYRRRGLLTSEGREIKNKNEILALLKALFLPKRLSIIHCPGHQKGNSAEARGNRMADQAAREAAMKAVLETSTLLAGKRTADGSEFEKRTADGSEFESPKKKAKVE

SEQ ID NO: 7242 - protein, 2096 aa, synthetic construct; identical to SEQ ID NO: 4527

SEQ ID NO: 7243 - protein, 2098 aa, synthetic construct
MPAAKRVKLDGGDKKYSIGLDIGTNSVGWAVITDEYKVPSKKFKVLGNTDRHSIKKNLIGALLFDSGETAEATRLKRTARRRYTRRKNRICYLQEIFSNEMAKVDDSFFHRLEESFLVEEDKKHERHPIFGNIVDEVAYHEKYPTIYHLRKKLVDSTDKADLRLIYLALAHMIKFRGHFLIEGDLNPDNSDVDKLFIQLVQTYNQLFEENPINASGVDAKAILSARLSKSRRLENLIAQLPGEKKNGLFGNLIALSLGLTPNFKSNFDLAEDAKLQLSKDTYDDDLDNLLAQIGDQYADLFLAAKNLSDAILLSDILRVNTEITKAPLSASMIKRYDEHHQDLTLLKALVRQQLPEKYKEIFFDQSKNGYAGYIDGGASQEEFYKFIKPILEKMDGTEELLVKLNREDLLRKQRTFDNGSIPHQIHLGELHAILRRQEDFYPFLKDNREKIEKILTFRIPYYVGPLARGNSRFAWMTRKSEETITPWNFEEVVDKGASAQSFIERMTNFDKNLPNEKVLPKHSLLYEYFTVYNELTKVKYVTEGMRKPAFLSGEQKKAIVDLLFKTNRKVTVKQLKEDYFKKIECFDSVEISGVEDRFNASLGTYHDLLKIIKDKDFLDNEENEDILEDIVLTLTLFEDREMIEERLKTYAHLFDDKVMKQLKRRRYTGWGRLSRKLINGIRDKQSGKTILDFLKSDGFANRNFMQLIHDDSLTFKEDIQKAQVSGQGDSLHEHIANLAGSPAIKKGILQTVKVVDELVKVMGRHKPENIVIEMARENQTTQKGQKNSRERMKRIEEGIKELGSQILKEHPVENTQLQNEKLYLYYLQNGRDMYVDQELDINRLSDYDVDHIVPQSFLKDDSIDNKVLTRSDKARGKSDNVPSEEVVKKMKNYWRQLLNAKLITQRKFDNLTKAERGGLSELDKAGFIKRQLVETRQITKHVAQILDSRMNTKYDENDKLIREVKVITLKSKLVSDFRKDFQFYKVREINNYHHAHDAYLNAVVGTALIKKYPKLESEFVYGDYKVYDVRKMIAKSEQEIGKATAKYFFYSNIMNFFKTEITLANGEIRKRPLIETNGETGEIVWDKGRDFATVRKVLSMPQVNIVKKTEVQTGGFSKESILPKRNSDKLIARKKDWDPKKYGGFDSPTVAYSVLVVAKVEKGKSKKLKSVKELLGITIMERSSFEKNPIDFLEAKGYKEVKKDLIIKLPKYSLFELENGRKRMLASAGELQKGNELALPSKYVNFLYLASHYEKLKGSPEDNEQKQLFVEQHKHYLDEIIEQISEFSKRVILADANLDKVLSAYNKHRDKPIREQAENIIHLFTLTNLGAPAAFKYFDTTIDRKRYTSTKEVLDATLIHQSITGLYETRIDLSQLGGDGGPAPGGSEAAAKGGTAPLEEEYRLFLEAPIQNVTLLEQWKREIPKVWAEINPPGLASTQAPIHVQLLSTALPVRVRQYPITLEAKRSLRETIRKFRAAGILRPVHSPWNTPLLPVRKSGTSEYRMVQDLREVNKRVETIHPTVPNPYTLLSLLPPDRIWYSVLDLKDAFFCIPLAPESQLIFAFEWADAEEGESGQLTWTRLPQGFKNSPTLFDEALNRDLQGFRLDHPSVSLLQYVDDLLIAADTQAACLSATRDLLMTLAELGYRVSGKKAQLCQEEVTYLGFKIHKGSRSLSNSRTQAILQIPVPKTKRQVREFLGTIGYCRLWIPGFAELAQPLYAATRGGNDPLVWGEKEEEAFQSLKLALTQPPALALPSLDKPFQLFVEETSGAAKGVLTQALGPWKRPVAYLSKRLDPVAAGWPRCLRAIAAAALLTREASKLTFGQDIEITSSHNLESLLRSPPDKWLTNARITQYQVLLLDPPRVRFKQTAALNPATLLPETDDTLPIHHCLDTLDSLTSTRPDLTDQPLAQAEATLFTDGSSYIRDGKRYAGAAVVTLDSVIWAEPLPIGTSAQKAELIALTKALEWSKDKSVNIYTDSRYAFATLHVHGMIYRERGLLTAGGKAIKNAPEILALLTAVWLPKRVAVMHCKGHQKDDAPTSTGNRRADEVAREVAIRPLSTQATISAGKRTADGSEFEKRTADGSEFESPKKKAKVE

SEQ ID NO: 7244 - protein, 2098 aa, synthetic construct
MPAAKRVKLDGGDKKYSIGLDIGTNSVGWAVITDEYKVPSKKFKVLGNTDRHSIKKNLIGALLFDSGETAEATRLKRTARRRYTRRKNRICYLQEIFSNEMAKVDDSFFHRLEESFLVEEDKKHERHPIFGNIVDEVAYHEKYPTIYHLRKKLVDSTDKADLRLIYLALAHMIKFRGHFLIEGDLNPDNSDVDKLFIQLVQTYNQLFEENPINASGVDAKAILSARLSKSRRLENLIAQLPGEKKNGLFGNLIALSLGLTPNFKSNFDLAEDAKLQLSKDTYDDDLDNLLAQIGDQYADLFLAAKNLSDAILLSDILRVNTEITKAPLSASMIKRYDEHHQDLTLLKALVRQQLPEKYKEIFFDQSKNGYAGYIDGGASQEEFYKFIKPILEKMDGTEELLVKLNREDLLRKQRTFDNGSIPHQIHLGELHAILRRQEDFYPFLKDNREKIEKILTFRIPYYVGPLARGNSRFAWMTRKSEETITPWNFEEVVDKGASAQSFIERMTNFDKNLPNEKVLPKHSLLYEYFTVYNELTKVKYVTEGMRKPAFLSGEQKKAIVDLLFKTNRKVTVKQLKEDYFKKIECFDSVEISGVEDRFNASLGTYHDLLKIIKDKDFLDNEENEDILEDIVLTLTLFEDREMIEERLKTYAHLFDDKVMKQLKRRRYTGWGRLSRKLINGIRDKQSGKTILDFLKSDGFANRNFMQLIHDDSLTFKEDIQKAQVSGQGDSLHEHIANLAGSPAIKKGILQTVKVVDELVKVMGRHKPENIVIEMARENQTTQKGQKNSRERMKRIEEGIKELGSQILKEHPVENTQLQNEKLYLYYLQNGRDMYVDQELDINRLSDYDVDHIVPQSFLKDDSIDNKVLTRSDKARGKSDNVPSEEVVKKMKNYWRQLLNAKLITQRKFDNLTKAERGGLSELDKAGFIKRQLVETRQITKHVAQILDSRMNTKYDENDKLIREVKVITLKSKLVSDFRKDFQFYKVREINNYHHAHDAYLNAVVGTALIKKYPKLESEFVYGDYKVYDVRKMIAKSEQEIGKATAKYFFYSNIMNFFKTEITLANGEIRKRPLIETNGETGEIVWDKGRDFATVRKVLSMPQVNIVKKTEVQTGGFSKESILPKRNSDKLIARKKDWDPKKYGGFDSPTVAYSVLVVAKVEKGKSKKLKSVKELLGITIMERSSFEKNPIDFLEAKGYKEVKKDLIIKLPKYSLFELENGRKRMLASAGELQKGNELALPSKYVNFLYLASHYEKLKGSPEDNEQKQLFVEQHKHYLDEIIEQISEFSKRVILADANLDKVLSAYNKHRDKPIREQAENIIHLFTLTNLGAPAAFKYFDTTIDRKRYTSTKEVLDATLIHQSITGLYETRIDLSQLGGDGGPAPGGSEAAAKGGTAPLEEEYRLFLEAPIQNVTLLEQWKREIPKVWAEINPPGLASTQAPIHVQLLSTALPVRVRQYPITLEAKRSLRETIRKFRAAGILRPVHSPWNTPLLPVRKSGTSEYRMVQDLREVNKRVETIHPTVPNPYTLLSLLPPDRIWYSVLDLKDAFFCIPLAPESQLIFAFEWADAEEGESGQLTWTRLPQGFKNSPTLFNEALNRDLQGFRLDHPSVSLLQYVDDLLIAADTQAACLSATRDLLMTLAELGYRVSGKKAQLCQEEVTYLGFKIHKGSRSLSNSRTQAILQIPVPKTKRQVREFLGTIGYCRLWIPGFAELAQPLYAATRPGNDPLVWGEKEEEAFQSLKLALTQPPALALPSLDKPFQLFVEETSGAAKGVLTQALGPWKRPVAYLSKRLDPVAAGWPRCLRAIAAAALLTREASKLTFGQDIEITSSHNLESLLRSPPDKWLTNARITQYQVLLLDPPRVRFKQTAALNPATLLPETDDTLPIHHCLDTLDSLTSTRPDLTDQPLAQAEATLFTDGSSYIRDGKRYAGAAVVTLDSVIWAEPLPIGTSAQKAELIALTKALEWSKDKSVNIYTDSRYAFATLHVHGMIYRERGWLTAGGKAIKNAPEILALLTAVWLPKRVAVMHCKGHQKDDAPTSTGNRRADEVAREVAIRPLSTQATISAGKRTADGSEFEKRTADGSEFESPKKKAKVE

SEQ ID NO: 7245 - protein, 2095 aa, synthetic construct
MPAAKRVKLDGGDKKYSIGLDIGTNSVGWAVITDEYKVPSKKFKVLGNTDRHSIKKNLIGALLFDSGETAEATRLKRTARRRYTRRKNRICYLQEIFSNEMAKVDDSFFHRLEESFLVEEDKKHERHPIFGNIVDEVAYHEKYPTIYHLRKKLVDSTDKADLRLIYLALAHMIKFRGHFLIEGDLNPDNSDVDKLFIQLVQTYNQLFEENPINASGVDAKAILSARLSKSRRLENLIAQLPGEKKNGLFGNLIALSLGLTPNFKSNFDLAEDAKLQLSKDTYDDDLDNLLAQIGDQYADLFLAAKNLSDAILLSDILRVNTEITKAPLSASMIKRYDEHHQDLTLLKALVRQQLPEKYKEIFFDQSKNGYAGYIDGGASQEEFYKFIKPILEKMDGTEELLVKLNREDLLRKQRTFDNGSIPHQIHLGELHAILRRQEDFYPFLKDNREKIEKILTFRIPYYVGPLARGNSRFAWMTRKSEETITPWNFEEVVDKGASAQSFIERMTNFDKNLPNEKVLPKHSLLYEYFTVYNELTKVKYVTEGMRKPAFLSGEQKKAIVDLLFKTNRKVTVKQLKEDYFKKIECFDSVEISGVEDRFNASLGTYHDLLKIIKDKDFLDNEENEDILEDIVLTLTLFEDREMIEERLKTYAHLFDDKVMKQLKRRRYTGWGRLSRKLINGIRDKQSGKTILDFLKSDGFANRNFMQLIHDDSLTFKEDIQKAQVSGQGDSLHEHIANLAGSPAIKKGILQTVKVVDELVKVMGRHKPENIVIEMARENQTTQKGQKNSRERMKRIEEGIKELGSQILKEHPVENTQLQNEKLYLYYLQNGRDMYVDQELDINRLSDYDVDHIVPQSFLKDDSIDNKVLTRSDKARGKSDNVPSEEVVKKMKNYWRQLLNAKLITQRKFDNLTKAERGGLSELDKAGFIKRQLVETRQITKHVAQILDSRMNTKYDENDKLIREVKVITLKSKLVSDFRKDFQFYKVREINNYHHAHDAYLNAVVGTALIKKYPKLESEFVYGDYKVYDVRKMIAKSEQEIGKATAKYFFYSNIMNFFKTEITLANGEIRKRPLIETNGETGEIVWDKGRDFATVRKVLSMPQVNIVKKTEVQTGGFSKESILPKRNSDKLIARKKDWDPKKYGGFDSPTVAYSVLVVAKVEKGKSKKLKSVKELLGITIMERSSFEKNPIDFLEAKGYKEVKKDLIIKLPKYSLFELENGRKRMLASAGELQKGNELALPSKYVNFLYLASHYEKLKGSPEDNEQKQLFVEQHKHYLDEIIEQISEFSKRVILADANLDKVLSAYNKHRDKPIREQAENIIHLFTLTNLGAPAAFKYFDTTIDRKRYTSTKEVLDATLIHQSITGLYETRIDLSQLGGDGGPAPGGSEAAAKGGTLQLEEEYRLFEPESTQKQEMDIWLKNFPQAWAETGGMGTAHCQAPVLIQLKATATPISIRQYPMPHEAYQGIKPHIRRMLDQGILKPCQSPWNTPLLPVKKPGTEDYRPVQDLREVNKRVEDIHPTVPNPYNLLSTLPPSHPWYTVLDLKDAFFCLRLHSESQLLFAFEWRDPEIGLSGQLTWTRLPQGFKNSPTLFNEALHSDLADFRVRYPALVLLQYVDDLLLAAATRTECLEGTKALLETLGNKGYRASAKKAQICLQEVTYLGYSLKDGQRWLTKARKEAILSIPVPKNSRQVREFLGTAGYCRLWIPGFAELAAPLYPLTRPGTLFQWGTEQQLAFEDIKKALLSSPALGLPDITKPFELFIDENSGFAKGVLVQKLGPWKRPVAYLSKKLDTVASGWPPCLRMVAAIAILVKDAGKLTLGQPLTILTSHPVEALVRQPPNKWLSNARMTHYQAMLLDAERVHFGPTVSLNPATLLPLPSGGNHHDCLQILAETHGTRPDLTDQPLPDADLTWYTDGSSFIRNGEREAGAAVTTESEVIWAAPLPPGTSAQRAELIALTQALKMAEGKKLTVYTDSRYAFATTHVHGEIYRRRGWLTSEGKEIKNKNEILALLEALFLPKRLSIIHCPGHQKGDSPQAKGNRLADDTAKKAATETHSSLTVLPAGKRTADGSEFEKRTADGSEFESPKKKAKVE

SEQ ID NO: 7246 - protein, 2096 aa, synthetic construct
MPAAKRVKLDGGDKKYSIGLDIGTNSVGWAVITDEYKVPSKKFKVLGNTDRHSIKKNLIGALLFDSGETAEATRLKRTARRRYTRRKNRICYLQEIFSNEMAKVDDSFFHRLEESFLVEEDKKHERHPIFGNIVDEVAYHEKYPTIYHLRKKLVDSTDKADLRLIYLALAHMIKFRGHFLIEGDLNPDNSDVDKLFIQLVQTYNQLFEENPINASGVDAKAILSARLSKSRRLENLIAQLPGEKKNGLFGNLIALSLGLTPNFKSNFDLAEDAKLQLSKDTYDDDLDNLLAQIGDQYADLFLAAKNLSDAILLSDILRVNTEITKAPLSASMIKRYDEHHQDLTLLKALVRQQLPEKYKEIFFDQSKNGYAGYIDGGASQEEFYKFIKPILEKMDGTEELLVKLNREDLLRKQRTFDNGSIPHQIHLGELHAILRRQEDFYPFLKDNREKIEKILTFRIPYYVGPLARGNSRFAWMTRKSEETITPWNFEEVVDKGASAQSFIERMTNFDKNLPNEKVLPKHSLLYEYFTVYNELTKVKYVTEGMRKPAFLSGEQKKAIVDLLFKTNRKVTVKQLKEDYFKKIECFDSVEISGVEDRFNASLGTYHDLLKIIKDKDFLDNEENEDILEDIVLTLTLFEDREMIEERLKTYAHLFDDKVMKQLKRRRYTGWGRLSRKLINGIRDKQSGKTILDFLKSDGFANRNFMQLIHDDSLTFKEDIQKAQVSGQGDSLHEHIANLAGSPAIKKGILQTVKVVDELVKVMGRHKPENIVIEMARENQTTQKGQKNSRERMKRIEEGIKELGSQILKEHPVENTQLQNEKLYLYYLQNGRDMYVDQELDINRLSDYDVDHIVPQSFLKDDSIDNKVLTRSDKARGKSDNVPSEEVVKKMKNYWRQLLNAKLITQRKFDNLTKAERGGLSELDKAGFIKRQLVETRQITKHVAQILDSRMNTKYDENDKLIREVKVITLKSKLVSDFRKDFQFYKVREINNYHHAHDAYLNAVVGTALIKKYPKLESEFVYGDYKVYDVRKMIAKSEQEIGKATAKYFFYSNIMNFFKTEITLANGEIRKRPLIETNGETGEIVWDKGRDFATVRKVLSMPQVNIVKKTEVQTGGFSKESILPKRNSDKLIARKKDWDPKKYGGFDSPTVAYSVLVVAKVEKGKSKKLKSVKELLGITIMERSSFEKNPIDFLEAKGYKEVKKDLIIKLPKYSLFELENGRKRMLASAGELQKGNELALPSKYVNFLYLASHYEKLKGSPEDNEQKQLFVEQHKHYLDEIIEQISEFSKRVILADANLDKVLSAYNKHRDKPIREQAENIIHLFTLTNLGAPAAFKYFDTTIDRKRYTSTKEVLDATLIHQSITGLYETRIDLSQLGGDGGPAPGGSEAAAKGGTLGIEDEYRLHETSTEPDVSLGSTWLSDFPQAWAETGGMGLAVRQAPLIIPLKATSTPVSIQQYPMSHEARLGIKPHIQRLLDQGILVPCQSPWNTPLLPVKKPGTNDYRPVQDLREVNKRVEDIHPTVPNPYNLLSGLPPSHQWYTVLDLKDAFFCLRLHPTSQPLFAFEWRDPGMGISGQLTWTRLPQGFKNSPTLFNEALHRDLADFRIQHPDLILLQYVDDILLAATSELDCQQGTRALLQTLGDLGYRASAKKAQICQKQVKYLGYLLREGQRWLTEARKETVMGQPVPKTPRQLREFLGTAGFCRLWIPGFAEMAAPLYPLTKPGTLFSWGPDQQKAYQEIKQALLTAPALGLPDLTKPFELFVDEKQGYAKGVLTQKLGPWRRPVAYLSKKLDPVAAGWPPCLRMVAAIAVLTKDAGKLTMGQPLVILAPHAVEALVKQPPDRWLSNARMTHYQAMLLDTDRVQFGPVVALNPATLLPLPEEGAPHDCLEILAETHGTRPDLTDQPIPDADHTWYTDGSSFLQEGQRKAGAAVTTETEVIWAGALPAGTSAQRAELIALTQALKMAEGKRLNVYTDSRYAFATAHIHGEIYRRRGWLTSEGREIKNKSEILALLKALFLPKRLSIIHCLGHQKGDSAEARGNRLADQAAREAAIKTPPDTSTLLAGKRTADGSEFEKRTADGSEFESPKKKAKVE

SEQ ID NO: 7247 - protein, 2096 aa, synthetic construct
MPAAKRVKLDGGDKKYSIGLDIGTNSVGWAVITDEYKVPSKKFKVLGNTDRHSIKKNLIGALLFDSGETAEATRLKRTARRRYTRRKNRICYLQEIFSNEMAKVDDSFFHRLEESFLVEEDKKHERHPIFGNIVDEVAYHEKYPTIYHLRKKLVDSTDKADLRLIYLALAHMIKFRGHFLIEGDLNPDNSDVDKLFIQLVQTYNQLFEENPINASGVDAKAILSARLSKSRRLENLIAQLPGEKKNGLFGNLIALSLGLTPNFKSNFDLAEDAKLQLSKDTYDDDLDNLLAQIGDQYADLFLAAKNLSDAILLSDILRVNTEITKAPLSASMIKRYDEHHQDLTLLKALVRQQLPEKYKEIFFDQSKNGYAGYIDGGASQEEFYKFIKPILEKMDGTEELLVKLNREDLLRKQRTFDNGSIPHQIHLGELHAILRRQEDFYPFLKDNREKIEKILTFRIPYYVGPLARGNSRFAWMTRKSEETITPWNFEEVVDKGASAQSFIERMTNFDKNLPNEKVLPKHSLLYEYFTVYNELTKVKYVTEGMRKPAFLSGEQKKAIVDLLFKTNRKVTVKQLKEDYFKKIECFDSVEISGVEDRFNASLGTYHDLLKIIKDKDFLDNEENEDILEDIVLTLTLFEDREMIEERLKTYAHLFDDKVMKQLKRRRYTGWGRLSRKLINGIRDKQSGKTILDFLKSDGFANRNFMQLIHDDSLTFKEDIQKAQVSGQGDSLHEHIANLAGSPAIKKGILQTVKVVDELVKVMGRHKPENIVIEMARENQTTQKGQKNSRERMKRIEEGIKELGSQILKEHPVENTQLQNEKLYLYYLQNGRDMYVDQELDINRLSDYDVDHIVPQSFLKDDSIDNKVLTRSDKARGKSDNVPSEEVVKKMKNYWRQLLNAKLITQRKFDNLTKAERGGLSELDKAGFIKRQLVETRQITKHVAQILDSRMNTKYDENDKLIREVKVITLKSKLVSDFRKDFQFYKVREINNYHHAHDAYLNAVVGTALIKKYPKLESEFVYGDYKVYDVRKMIAKSEQEIGKATAKYFFYSNIMNFFKTEITLANGEIRKRPLIETNGETGEIVWDKGRDFATVRKVLSMPQVNIVKKTEVQTGGFSKESILPKRNSDKLIARKKDWDPKKYGGFDSPTVAYSVLVVAKVEKGKSKKLKSVKELLGITIMERSSFEKNPIDFLEAKGYKEVKKDLIIKLPKYSLFELENGRKRMLASAGELQKGNELALPSKYVNFLYLASHYEKLKGSPEDNEQKQLFVEQHKHYLDEIIEQISEFSKRVILADANLDKVLSAYNKHRDKPIREQAENIIHLFTLTNLGAPAAFKYFDTTIDRKRYTSTKEVLDATLIHQSITGLYETRIDLSQLGGDGGPAPGGSEAAAKGGTLNIEDEYRLHETSKGPDVPLGSTWLSDFPQAWAETGGMGLAVRQAPLIIPLKATSTPVSIKQYPMSQEARLGIKPHIQRLLDQGILVPCQSPWNTPLLPVKKPGTNDYRPVQDLREVNKRVEDIHPTVPNPYNLLSGLPPSHQWYTVLDLKDAFFCLRLHPTSQSLFAFEWRDPEMGISGQLTWTRLPQGFKNSPTLFDEALHRDLADFRIQHPDLILLQYVDDLLLAATSELDCQQGTRALLQTLGDLGYRASAKKAQICQKQVKYLGYLLKEGQRWLTEARKETVMGQPTPKTPRQLREFLGTAGFCRLWIPGFAEMAAPLYPLTKTGTLFEWGPDQQKAYQEIKQALLTAPALGLPDLTKPFELFVDEKQGYAKGVLTQKLGPWRRPVAYLSKKLDPVAAGWPPCLRMVAAIAVLTKDAGKLTMGQPLVILAPHAVEALVKQPPDRWLSNARMTHYQALLLDTDRVQFGPIVALNPATLLPLPEEGLQHDCLDILAEAHGTRPDLTDQPLPDADHTWYTDGSSFLQEGQRKAGAAVTTETEVVWAKALPAGTSAQRAELIALTQALKMAEGKKLNVYTDSRYAFATAHIHGEIYRRRGLLTSEGKEIKNKDEILALLKALFLPKRLSIIHCPGHQKGNRAEARGNRMADQAAREVATRETPETSTLLAGKRTADGSEFEKRTADGSEFESPKKKAKVE

SEQ ID NO: 7248 - protein, 2090 aa, synthetic construct
MPAAKRVKLDGGDKKYSIGLDIGTNSVGWAVITDEYKVPSKKFKVLGNTDRHSIKKNLIGALLFDSGETAEATRLKRTARRRYTRRKNRICYLQEIFSNEMAKVDDSFFHRLEESFLVEEDKKHERHPIFGNIVDEVAYHEKYPTIYHLRKKLVDSTDKADLRLIYLALAHMIKFRGHFLIEGDLNPDNSDVDKLFIQLVQTYNQLFEENPINASGVDAKAILSARLSKSRRLENLIAQLPGEKKNGLFGNLIALSLGLTPNFKSNFDLAEDAKLQLSKDTYDDDLDNLLAQIGDQYADLFLAAKNLSDAILLSDILRVNTEITKAPLSASMIKRYDEHHQDLTLLKALVRQQLPEKYKEIFFDQSKNGYAGYIDGGASQEEFYKFIKPILEKMDGTEELLVKLNREDLLRKQRTFDNGSIPHQIHLGELHAILRRQEDFYPFLKDNREKIEKILTFRIPYYVGPLARGNSRFAWMTRKSEETITPWNFEEVVDKGASAQSFIERMTNFDKNLPNEKVLPKHSLLYEYFTVYNELTKVKYVTEGMRKPAFLSGEQKKAIVDLLFKTNRKVTVKQLKEDYFKKIECFDSVEISGVEDRFNASLGTYHDLLKIIKDKDFLDNEENEDILEDIVLTLTLFEDREMIEERLKTYAHLFDDKVMKQLKRRRYTGWGRLSRKLINGIRDKQSGKTILDFLKSDGFANRNFMQLIHDDSLTFKEDIQKAQVSGQGDSLHEHIANLAGSPAIKKGILQTVKVVDELVKVMGRHKPENIVIEMARENQTTQKGQKNSRERMKRIEEGIKELGSQILKEHPVENTQLQNEKLYLYYLQNGRDMYVDQELDINRLSDYDVDHIVPQSFLKDDSIDNKVLTRSDKARGKSDNVPSEEVVKKMKNYWRQLLNAKLITQRKFDNLTKAERGGLSELDKAGFIKRQLVETRQITKHVAQILDSRMNTKYDENDKLIREVKVITLKSKLVSDFRKDFQFYKVREINNYHHAHDAYLNAVVGTALIKKYPKLESEFVYGDYKVYDVRKMIAKSEQEIGKATAKYFFYSNIMNFFKTEITLANGEIRKRPLIETNGETGEIVWDKGRDFATVRKVLSMPQVNIVKKTEVQTGGFSKESILPKRNSDKLIARKKDWDPKKYGGFDSPTVAYSVLVVAKVEKGKSKKLKSVKELLGITIMERSSFEKNPIDFLEAKGYKEVKKDLIIKLPKYSLFELENGRKRMLASAGELQKGNELALPSKYVNFLYLASHYEKLKGSPEDNEQKQLFVEQHKHYLDEIIEQISEFSKRVILADANLDKVLSAYNKHRDKPIREQAENIIHLFTLTNLGAPAAFKYFDTTIDRKRYTSTKEVLDATLIHQSITGLYETRIDLSQLGGDGGPAPGGSEAAAKGGTLQLDDEYRLYSPLVKPDQNIQFWLEQFPQAWAETAGMGLAKQVPPQVIQLKASATPVSVRQYPLSKEAQEGIRPHVQRLIQQGILVPVQSPWNTPLLPVRKPGTNDYRPVQDLREVNKRVQDIHPTVPNPYNLLCALPPQRSWYTVLDLKDAFFCLRLHPTSQPLFAFEWRDPGTGRTGQLTWTRLPQGFKNSPTIFDEALHRDLANFRIQHPQVTLLQYVDDLLLAGATKQDCLEGTKALLLELSDLGYRASAKKAQICRREVTYLGYSLRDGQRWLTEARKKTVVQIPAPTTAKQVREFLGTAGFCRLWIPGFATLAAPLYPLTKEKGEFSWAPEHQKAFDAIKKALLSAPALALPDVTKPFTLYVDERKGVARGVLTQTLGPWRRPVAYLSKKLDPVASGWPVCLKAIAAVAILVKDADKLTLGQNITVIAPHALENIVRQPPDRWMTNARMTHYQSLLLTERVTFAPPAALNPATLLPEETDEPVTHDCHQLLIEETGVRKDLTDIPLTGEVLTWFTDGSSYVVEGKRMAGAAVVDGTRTIWASSLPEGTSAQKAELMALTQALRLAEGKSINIYTDSRYAFATAHVHGAIYKQRGLLTSAGREIKNKEEILSLLEALHLPKRLAIIHCPGHQKAKDPISRGNQMADRVAKQAAQGVNLLAGKRTADGSEFEKRTADGSEFESPKKKAKVE

SEQ ID NO: 7249 - protein, 2176 aa, synthetic construct
MPAAKRVKLDGGDKKYSIGLDIGTNSVGWAVITDEYKVPSKKFKVLGNTDRHSIKKNLIGALLFDSGETAEATRLKRTARRRYTRRKNRICYLQEIFSNEMAKVDDSFFHRLEESFLVEEDKKHERHPIFGNIVDEVAYHEKYPTIYHLRKKLVDSTDKADLRLIYLALAHMIKFRGHFLIEGDLNPDNSDVDKLFIQLVQTYNQLFEENPINASGVDAKAILSARLSKSRRLENLIAQLPGEKKNGLFGNLIALSLGLTPNFKSNFDLAEDAKLQLSKDTYDDDLDNLLAQIGDQYADLFLAAKNLSDAILLSDILRVNTEITKAPLSASMIKRYDEHHQDLTLLKALVRQQLPEKYKEIFFDQSKNGYAGYIDGGASQEEFYKFIKPILEKMDGTEELLVKLNREDLLRKQRTFDNGSIPHQIHLGELHAILRRQEDFYPFLKDNREKIEKILTFRIPYYVGPLARGNSRFAWMTRKSEETITPWNFEEVVDKGASAQSFIERMTNFDKNLPNEKVLPKHSLLYEYFTVYNELTKVKYVTEGMRKPAFLSGEQKKAIVDLLFKTNRKVTVKQLKEDYFKKIECFDSVEISGVEDRFNASLGTYHDLLKIIKDKDFLDNEENEDILEDIVLTLTLFEDREMIEERLKTYAHLFDDKVMKQLKRRRYTGWGRLSRKLINGIRDKQSGKTILDFLKSDGFANRNFMQLIHDDSLTFKEDIQKAQVSGQGDSLHEHIANLAGSPAIKKGILQTVKVVDELVKVMGRHKPENIVIEMARENQTTQKGQKNSRERMKRIEEGIKELGSQILKEHPVENTQLQNEKLYLYYLQNGRDMYVDQELDINRLSDYDVDHIVPQSFLKDDSIDNKVLTRSDKARGKSDNVPSEEVVKKMKNYWRQLLNAKLITQRKFDNLTKAERGGLSELDKAGFIKRQLVETRQITKHVAQILDSRMNTKYDENDKLIREVKVITLKSKLVSDFRKDFQFYKVREINNYHHAHDAYLNAVVGTALIKKYPKLESEFVYGDYKVYDVRKMIAKSEQEIGKATAKYFFYSNIMNFFKTEITLANGEIRKRPLIETNGETGEIVWDKGRDFATVRKVLSMPQVNIVKKTEVQTGGFSKESILPKRNSDKLIARKKDWDPKKYGGFDSPTVAYSVLVVAKVEKGKSKKLKSVKELLGITIMERSSFEKNPIDFLEAKGYKEVKKDLIIKLPKYSLFELENGRKRMLASAGELQKGNELALPSKYVNFLYLASHYEKLKGSPEDNEQKQLFVEQHKHYLDEIIEQISEFSKRVILADANLDKVLSAYNKHRDKPIREQAENIIHLFTLTNLGAPAAFKYFDTTIDRKRYTSTKEVLDATLIHQSITGLYETRIDLSQLGGDGGPAPGGSEAAAKGGMDPLQLLQPLEAEIKGTKLKAHWNSGATITCVPEAFLEDERPIQTMLIKTIHGEKQQDVYYLTFKVQGRKVEAEVLASPYDYILLNPSDVPWLMKKPLQLTVLVPLHEYQERLLQQTALPKEQKELLQKLFLKYDALWQHWENQVGHRRIKPHNIATGTLAPRPQKQYPINPKAKPSIQIVIDDLLKQGVLIQQNSTMNTPVYPVPKPDGKWRMVLDYREVNKTIPLIAAQNQHSAGILSSIYRGKYKTTLDLTNGFWAHPITPESYWLTAFTWQGKQYCWTRLPQGFLNSPALFTADVVDLLKEIPNVQAYVDDIYISHDDPQEHLEQLEKIFSILLNAGYVVSLKKSEIAQREVEFLGFNITKEGRGLTDTFKQKLLNITPPKDLKQLQSILGLLNFARNFIPNYSELVKPLYTIVANANGKFISWTEDNSNQLQHIISVLNQADNLEERNPETRLIIKVNSSPSAGYIRYYNEGSKRPIMYVNYIFSKAEAKFTQTEKLLTTMHKGLIKAMDLAMGQEILVYSPIVSMTKIQRTPLPERKALPVRWITWMTYLEDPRIQFHYDKSLPELQQIPNVTEDVIAKTKHPSEFAMVFYTDGSAIKHPDVNKSHSAGMGIAQVQFIPEYKIVHQWSIPLGDHTAQLAEIAAVEFACKKALKISGPVLIVTDSFYVAESANKELPYWKSNGFLNNKKKPLRHVSKWKSIAECLQLKPDIIIMHEKGHQQPMTTLHTEGNNLADKLATQGSYVVHAGKRTADGSEFEKRTADGSEFESPKKKAKVE

SEQ ID NO: 7250 - protein, 2094 aa, synthetic construct
MPAAKRVKLDGGDKKYSIGLDIGTNSVGWAVITDEYKVPSKKFKVLGNTDRHSIKKNLIGALLFDSGETAEATRLKRTARRRYTRRKNRICYLQEIFSNEMAKVDDSFFHRLEESFLVEEDKKHERHPIFGNIVDEVAYHEKYPTIYHLRKKLVDSTDKADLRLIYLALAHMIKFRGHFLIEGDLNPDNSDVDKLFIQLVQTYNQLFEENPINASGVDAKAILSARLSKSRRLENLIAQLPGEKKNGLFGNLIALSLGLTPNFKSNFDLAEDAKLQLSKDTYDDDLDNLLAQIGDQYADLFLAAKNLSDAILLSDILRVNTEITKAPLSASMIKRYDEHHQDLTLLKALVRQQLPEKYKEIFFDQSKNGYAGYIDGGASQEEFYKFIKPILEKMDGTEELLVKLNREDLLRKQRTFDNGSIPHQIHLGELHAILRRQEDFYPFLKDNREKIEKILTFRIPYYVGPLARGNSRFAWMTRKSEETITPWNFEEVVDKGASAQSFIERMTNFDKNLPNEKVLPKHSLLYEYFTVYNELTKVKYVTEGMRKPAFLSGEQKKAIVDLLFKTNRKVTVKQLKEDYFKKIECFDSVEISGVEDRFNASLGTYHDLLKIIKDKDFLDNEENEDILEDIVLTLTLFEDREMIEERLKTYAHLFDDKVMKQLKRRRYTGWGRLSRKLINGIRDKQSGKTILDFLKSDGFANRNFMQLIHDDSLTFKEDIQKAQVSGQGDSLHEHIANLAGSPAIKKGILQTVKVVDELVKVMGRHKPENIVIEMARENQTTQKGQKNSRERMKRIEEGIKELGSQILKEHPVENTQLQNEKLYLYYLQNGRDMYVDQELDINRLSDYDVDHIVPQSFLKDDSIDNKVLTRSDKARGKSDNVPSEEVVKKMKNYWRQLLNAKLITQRKFDNLTKAERGGLSELDKAGFIKRQLVETRQITKHVAQILDSRMNTKYDENDKLIREVKVITLKSKLVSDFRKDFQFYKVREINNYHHAHDAYLNAVVGTALIKKYPKLESEFVYGDYKVYDVRKMIAKSEQEIGKATAKYFFYSNIMNFFKTEITLANGEIRKRPLIETNGETGEIVWDKGRDFATVRKVLSMPQVNIVKKTEVQTGGFSKESILPKRNSDKLIARKKDWDPKKYGGFDSPTVAYSVLVVAKVEKGKSKKLKSVKELLGITIMERSSFEKNPIDFLEAKGYKEVKKDLIIKLPKYSLFELENGRKRMLASAGELQKGNELALPSKYVNFLYLASHYEKLKGSPEDNEQKQLFVEQHKHYLDEIIEQISEFSKRVILADANLDKVLSAYNKHRDKPIREQAENIIHLFTLTNLGAPAAFKYFDTTIDRKRYTSTKEVLDATLIHQSITGLYETRIDLSQLGGDGGPAPGGSEAAAKGGVLNLEEEYRLHEKPVPSSIDPSWLQLFPTVWAERAGMGLANQVPPVVVELRSGASPVAVRQYPMSKEAREGIRPHIQRFLDLGVLVPCQSPWNTPLLPVKKPGTNDYRPVQDLREINKRVQDIHPTVPNPYNLLSSLPPSHTWYSVLDLKDAFFCLKLHPNSQPLFAFEWRDPEKGNTGQLTWTRLPQGFKNSPTLFNEALHRDLAPFRALNPQVVLLQYVDDLLVAAPTYRDCKEGTQKLLQELSKLGYRVSAKKAQLCQKEVTYLGYLLKEGKRWLTPARKATVMKIPPPTTPRQVREFLGKAGFCRLFIPGFASLAAPLYPLTKPSIPFIWTEEHQKAFDRIKEALLSAPALALPDLTKPFTLYVDERAGVARGVLTQTLGPWRRPVAYLSKKLDPVASGWPTCLKAVAAVALLLKDADKLTLGQNVTVIASHSLESIVRQPPDRWMTNARMTHYQSLLLNERVSFAPPAVLNPATLLPVESEATPVHRCSEILAEETGTRRDLKDQPLPGVPAWYTDGSSFIAEGKRRAGAAIVDGKRTVWASSLPEGTSAQKAELVALTQALRLAEGKDINIYTDSRYAFATAHIHGAIYKQRGWLTSAGKDIKNKEEILALLEAIHLPKRVAIIHCPGHQKGNDPVATGNRRADEAAKQAALSTRVLAETTKPAGKRTADGSEFEKRTADGSEFESPKKKAKVE

SEQ ID NO: 7251 - protein, 2096 aa, synthetic construct
MPAAKRVKLDGGDKKYSIGLDIGTNSVGWAVITDEYKVPSKKFKVLGNTDRHSIKKNLIGALLFDSGETAEATRLKRTARRRYTRRKNRICYLQEIFSNEMAKVDDSFFHRLEESFLVEEDKKHERHPIFGNIVDEVAYHEKYPTIYHLRKKLVDSTDKADLRLIYLALAHMIKFRGHFLIEGDLNPDNSDVDKLFIQLVQTYNQLFEENPINASGVDAKAILSARLSKSRRLENLIAQLPGEKKNGLFGNLIALSLGLTPNFKSNFDLAEDAKLQLSKDTYDDDLDNLLAQIGDQYADLFLAAKNLSDAILLSDILRVNTEITKAPLSASMIKRYDEHHQDLTLLKALVRQQLPEKYKEIFFDQSKNGYAGYIDGGASQEEFYKFIKPILEKMDGTEELLVKLNREDLLRKQRTFDNGSIPHQIHLGELHAILRRQEDFYPFLKDNREKIEKILTFRIPYYVGPLARGNSRFAWMTRKSEETITPWNFEEVVDKGASAQSFIERMTNFDKNLPNEKVLPKHSLLYEYFTVYNELTKVKYVTEGMRKPAFLSGEQKKAIVDLLFKTNRKVTVKQLKEDYFKKIECFDSVEISGVEDRFNASLGTYHDLLKIIKDKDFLDNEENEDILEDIVLTLTLFEDREMIEERLKTYAHLFDDKVMKQLKRRRYTGWGRLSRKLINGIRDKQSGKTILDFLKSDGFANRNFMQLIHDDSLTFKEDIQKAQVSGQGDSLHEHIANLAGSPAIKKGILQTVKVVDELVKVMGRHKPENIVIEMARENQTTQKGQKNSRERMKRIEEGIKELGSQILKEHPVENTQLQNEKLYLYYLQNGRDMYVDQELDINRLSDYDVDHIVPQSFLKDDSIDNKVLTRSDKARGKSDNVPSEEVVKKMKNYWRQLLNAKLITQRKFDNLTKAERGGLSELDKAGFIKRQLVETRQITKHVAQILDSRMNTKYDENDKLIREVKVITLKSKLVSDFRKDFQFYKVREINNYHHAHDAYLNAVVGTALIKKYPKLESEFVYGDYKVYDVRKMIAKSEQEIGKATAKYFFYSNIMNFFKTEITLANGEIRKRPLIETNGETGEIVWDKGRDFATVRKVLSMPQVNIVKKTEVQTGGFSKESILPKRNSDKLIARKKDWDPKKYGGFDSPTVAYSVLVVAKVEKGKSKKLKSVKELLGITIMERSSFEKNPIDFLEAKGYKEVKKDLIIKLPKYSLFELENGRKRMLASAGELQKGNELALPSKYVNFLYLASHYEKLKGSPEDNEQKQLFVEQHKHYLDEIIEQISEFSKRVILADANLDKVLSAYNKHRDKPIREQAENIIHLFTLTNLGAPAAFKYFDTTIDRKRYTSTKEVLDATLIHQSITGLYETRIDLSQLGGDGGPAPGGSEAAAKGGTLNIEDEYRLHETSKEPDVPLGSTWLSDFPQAWAETGGMGLAVRQAPLIIPLKATSTPVSIKQYPMSQEARLGIKPHIQRLLDQGILVPCQSPWNTPLLPVKKPGTNDYRPVQDLREVNKRVEDIHPTVPNPYNLLSGLPPSHQWYTVLDLKDAFFCLRLHPTSQPLFAFEWRDPEMGISGQLTWTRLPQGFKNSPTLFDEALHRDLADFRIQHPDLILLQYVDDLLLAATSEQDCQRGTRALLQTLGNLGYRASAKKAQICQKQVKYLGYLLKEGQRWLTEARKETVMGQPTPKTPRQLREFLGTAGFCRLWIPGFAEMAAPLYPLTKTGTLFNWGPDQQKAYQEIKQALLTAPALGLPDLTKPFELFVDEKQGYAKGVLTQKLGPWRRPVAYLSKKLDPVAAGWPPCLRMVAAIAVLTKDAGKLTMGQPLVILAPHAVEALVKQPPDRWLSNARMTHYQAMLLDTDRVQFGPVVALNPATLLPLPEKEAPHDCLEILAETHGTRPDLTDQPIPDADYTWYTDGSSFLQEGQRRAGAAVTTETEVIWARALPAGTSAQRAELIALTQALKMAEGKKLNVYTDSRYAFATAHVHGEIYRRRGLLTSEGREIKNKNEILALLKALFLPKRLSIIHCPGHQKGNSAEARGNRMADQAAREAAMKAVLETSTLLAGKRTADGSEFEKRTADGSEFESPKKKAKVE

SEQ ID NO: 7252 - protein, 2096 aa, synthetic construct
MPAAKRVKLDGGDKKYSIGLDIGTNSVGWAVITDEYKVPSKKFKVLGNTDRHSIKKNLIGALLFDSGETAEATRLKRTARRRYTRRKNRICYLQEIFSNEMAKVDDSFFHRLEESFLVEEDKKHERHPIFGNIVDEVAYHEKYPTIYHLRKKLVDSTDKADLRLIYLALAHMIKFRGHFLIEGDLNPDNSDVDKLFIQLVQTYNQLFEENPINASGVDAKAILSARLSKSRRLENLIAQLPGEKKNGLFGNLIALSLGLTPNFKSNFDLAEDAKLQLSKDTYDDDLDNLLAQIGDQYADLFLAAKNLSDAILLSDILRVNTEITKAPLSASMIKRYDEHHQDLTLLKALVRQQLPEKYKEIFFDQSKNGYAGYIDGGASQEEFYKFIKPILEKMDGTEELLVKLNREDLLRKQRTFDNGSIPHQIHLGELHAILRRQEDFYPFLKDNREKIEKILTFRIPYYVGPLARGNSRFAWMTRKSEETITPWNFEEVVDKGASAQSFIERMTNFDKNLPNEKVLPKHSLLYEYFTVYNELTKVKYVTEGMRKPAFLSGEQKKAIVDLLFKTNRKVTVKQLKEDYFKKIECFDSVEISGVEDRFNASLGTYHDLLKIIKDKDFLDNEENEDILEDIVLTLTLFEDREMIEERLKTYAHLFDDKVMKQLKRRRYTGWGRLSRKLINGIRDKQSGKTILDFLKSDGFANRNFMQLIHDDSLTFKEDIQKAQVSGQGDSLHEHIANLAGSPAIKKGILQTVKVVDELVKVMGRHKPENIVIEMARENQTTQKGQKNSRERMKRIEEGIKELGSQILKEHPVENTQLQNEKLYLYYLQNGRDMYVDQELDINRLSDYDVDHIVPQSFLKDDSIDNKVLTRSDKARGKSDNVPSEEVVKKMKNYWRQLLNAKLITQRKFDNLTKAERGGLSELDKAGFIKRQLVETRQITKHVAQILDSRMNTKYDENDKLIREVKVITLKSKLVSDFRKDFQFYKVREINNYHHAHDAYLNAVVGTALIKKYPKLESEFVYGDYKVYDVRKMIAKSEQEIGKATAKYFFYSNIMNFFKTEITLANGEIRKRPLIETNGETGEIVWDKGRDFATVRKVLSMPQVNIVKKTEVQTGGFSKESILPKRNSDKLIARKKDWDPKKYGGFDSPTVAYSVLVVAKVEKGKSKKLKSVKELLGITIMERSSFEKNPIDFLEAKGYKEVKKDLIIKLPKYSLFELENGRKRMLASAGELQKGNELALPSKYVNFLYLASHYEKLKGSPEDNEQKQLFVEQHKHYLDEIIEQISEFSKRVILADANLDKVLSAYNKHRDKPIREQAENIIHLFTLTNLGAPAAFKYFDTTIDRKRYTSTKEVLDATLIHQSITGLYETRIDLSQLGGDGGPAPGGSEAAAKGGTLNIEDEYRLHETSKEPDVPLGSTWLSDFPQAWAETGGMGLAVRQAPLIIPLKATSTPVSIKQYPMSQEARLGIKPHIQRLLDQGILVPCQSPWNTPLLPVKKPGTNDYRPVQDLREVNKRVEDIHPTVPNPYNLLSGLPPSHQWYTVLDLKDAFFCLRLHPTSQPLFAFEWRDPEMGISGQLTWTRLPQGFKNSPTLFNEALHRDLADFRIQHPDLILLQYVDDLLLAATSEQDCQRGTRALLQTLGNLGYRASAKKAQICQKQVKYLGYLLKEGQRWLTEARKETVMGQPTPKTPRQLREFLGTAGFCRLWIPGFAEMAAPLYPLTKPGTLFNWGPDQQKAYQEIKQALLTAPALGLPDLTKPFELFVDEKQGYAKGVLTQKLGPWRRPVAYLSKKLDPVAAGWPPCLRMVAAIAVLTKDAGKLTMGQPLVILAPHAVEALVKQPPDRWLSNARMTHYQAMLLDTDRVQFGPVVALNPATLLPLPEKEAPHDCLEILAETHGTRPDLTDQPIPDADYTWYTDGSSFLQEGQRRAGAAVTTETEVIWARALPAGTSAQRAELIALTQALKMAEGKKLNVYTDSRYAFATAHVHGEIYRRRGWLTSEGREIKNKNEILALLKALFLPKRLSIIHCPGHQKGNSAEARGNRMADQAAREAAMKAVLETSTLLAGKRTADGSEFEKRTADGSEFESPKKKAKVE

SEQ ID NO: 7253 - protein, 2098 aa, synthetic construct
MPAAKRVKLDGGDKKYSIGLDIGTNSVGWAVITDEYKVPSKKFKVLGNTDRHSIKKNLIGALLFDSGETAEATRLKRTARRRYTRRKNRICYLQEIFSNEMAKVDDSFFHRLEESFLVEEDKKHERHPIFGNIVDEVAYHEKYPTIYHLRKKLVDSTDKADLRLIYLALAHMIKFRGHFLIEGDLNPDNSDVDKLFIQLVQTYNQLFEENPINASGVDAKAILSARLSKSRRLENLIAQLPGEKKNGLFGNLIALSLGLTPNFKSNFDLAEDAKLQLSKDTYDDDLDNLLAQIGDQYADLFLAAKNLSDAILLSDILRVNTEITKAPLSASMIKRYDEHHQDLTLLKALVRQQLPEKYKEIFFDQSKNGYAGYIDGGASQEEFYKFIKPILEKMDGTEELLVKLNREDLLRKQRTFDNGSIPHQIHLGELHAILRRQEDFYPFLKDNREKIEKILTFRIPYYVGPLARGNSRFAWMTRKSEETITPWNFEEVVDKGASAQSFIERMTNFDKNLPNEKVLPKHSLLYEYFTVYNELTKVKYVTEGMRKPAFLSGEQKKAIVDLLFKTNRKVTVKQLKEDYFKKIECFDSVEISGVEDRFNASLGTYHDLLKIIKDKDFLDNEENEDILEDIVLTLTLFEDREMIEERLKTYAHLFDDKVMKQLKRRRYTGWGRLSRKLINGIRDKQSGKTILDFLKSDGFANRNFMQLIHDDSLTFKEDIQKAQVSGQGDSLHEHIANLAGSPAIKKGILQTVKVVDELVKVMGRHKPENIVIEMARENQTTQKGQKNSRERMKRIEEGIKELGSQILKEHPVENTQLQNEKLYLYYLQNGRDMYVDQELDINRLSDYDVDHIVPQSFLKDDSIDNKVLTRSDKARGKSDNVPSEEVVKKMKNYWRQLLNAKLITQRKFDNLTKAERGGLSELDKAGFIKRQLVETRQITKHVAQILDSRMNTKYDENDKLIREVKVITLKSKLVSDFRKDFQFYKVREINNYHHAHDAYLNAVVGTALIKKYPKLESEFVYGDYKVYDVRKMIAKSEQEIGKATAKYFFYSNIMNFFKTEITLANGEIRKRPLIETNGETGEIVWDKGRDFATVRKVLSMPQVNIVKKTEVQTGGFSKESILPKRNSDKLIARKKDWDPKKYGGFDSPTVAYSVLVVAKVEKGKSKKLKSVKELLGITIMERSSFEKNPIDFLEAKGYKEVKKDLIIKLPKYSLFELENGRKRMLASAGELQKGNELALPSKYVNFLYLASHYEKLKGSPEDNEQKQLFVEQHKHYLDEIIEQISEFSKRVILADANLDKVLSAYNKHRDKPIREQAENIIHLFTLTNLGAPAAFKYFDTTIDRKRYTSTKEVLDATLIHQSITGLYETRIDLSQLGGDGGPAPEAAAKGGSGGTAPLEEEYRLFLEAPIQNVTLLEQWKREIPKVWAEINPPGLASTQAPIHVQLLSTALPVRVRQYPITLEAKRSLRETIRKFRAAGILRPVHSPWNTPLLPVRKSGTSEYRMVQDLREVNKRVETIHPTVPNPYTLLSLLPPDRIWYSVLDLKDAFFCIPLAPESQLIFAFEWADAEEGESGQLTWTRLPQGFKNSPTLFDEALNRDLQGFRLDHPSVSLLQYVDDLLIAADTQAACLSATRDLLMTLAELGYRVSGKKAQLCQEEVTYLGFKIHKGSRSLSNSRTQAILQIPVPKTKRQVREFLGTIGYCRLWIPGFAELAQPLYAATRGGNDPLVWGEKEEEAFQSLKLALTQPPALALPSLDKPFQLFVEETSGAAKGVLTQALGPWKRPVAYLSKRLDPVAAGWPRCLRAIAAAALLTREASKLTFGQDIEITSSHNLESLLRSPPDKWLTNARITQYQVLLLDPPRVRFKQTAALNPATLLPETDDTLPIHHCLDTLDSLTSTRPDLTDQPLAQAEATLFTDGSSYIRDGKRYAGAAVVTLDSVIWAEPLPIGTSAQKAELIALTKALEWSKDKSVNIYTDSRYAFATLHVHGMIYRERGLLTAGGKAIKNAPEILALLTAVWLPKRVAVMHCKGHQKDDAPTSTGNRRADEVAREVAIRPLSTQATISAGKRTADGSEFEKRTADGSEFESPKKKAKVE

SEQ ID NO: 7254 - protein, 2173 aa, synthetic construct
MPAAKRVKLDGGDKKYSIGLDIGTNSVGWAVITDEYKVPSKKFKVLGNTDRHSIKKNLIGALLFDSGETAEATRLKRTARRRYTRRKNRICYLQEIFSNEMAKVDDSFFHRLEESFLVEEDKKHERHPIFGNIVDEVAYHEKYPTIYHLRKKLVDSTDKADLRLIYLALAHMIKFRGHFLIEGDLNPDNSDVDKLFIQLVQTYNQLFEENPINASGVDAKAILSARLSKSRRLENLIAQLPGEKKNGLFGNLIALSLGLTPNFKSNFDLAEDAKLQLSKDTYDDDLDNLLAQIGDQYADLFLAAKNLSDAILLSDILRVNTEITKAPLSASMIKRYDEHHQDLTLLKALVRQQLPEKYKEIFFDQSKNGYAGYIDGGASQEEFYKFIKPILEKMDGTEELLVKLNREDLLRKQRTFDNGSIPHQIHLGELHAILRRQEDFYPFLKDNREKIEKILTFRIPYYVGPLARGNSRFAWMTRKSEETITPWNFEEVVDKGASAQSFIERMTNFDKNLPNEKVLPKHSLLYEYFTVYNELTKVKYVTEGMRKPAFLSGEQKKAIVDLLFKTNRKVTVKQLKEDYFKKIECFDSVEISGVEDRFNASLGTYHDLLKIIKDKDFLDNEENEDILEDIVLTLTLFEDREMIEERLKTYAHLFDDKVMKQLKRRRYTGWGRLSRKLINGIRDKQSGKTILDFLKSDGFANRNFMQLIHDDSLTFKEDIQKAQVSGQGDSLHEHIANLAGSPAIKKGILQTVKVVDELVKVMGRHKPENIVIEMARENQTTQKGQKNSRERMKRIEEGIKELGSQILKEHPVENTQLQNEKLYLYYLQNGRDMYVDQELDINRLSDYDVDHIVPQSFLKDDSIDNKVLTRSDKARGKSDNVPSEEVVKKMKNYWRQLLNAKLITQRKFDNLTKAERGGLSELDKAGFIKRQLVETRQITKHVAQILDSRMNTKYDENDKLIREVKVITLKSKLVSDFRKDFQFYKVREINNYHHAHDAYLNAVVGTALIKKYPKLESEFVYGDYKVYDVRKMIAKSEQEIGKATAKYFFYSNIMNFFKTEITLANGEIRKRPLIETNGETGEIVWDKGRDFATVRKVLSMPQVNIVKKTEVQTGGFSKESILPKRNSDKLIARKKDWDPKKYGGFDSPTVAYSVLVVAKVEKGKSKKLKSVKELLGITIMERSSFEKNPIDFLEAKGYKEVKKDLIIKLPKYSLFELENGRKRMLASAGELQKGNELALPSKYVNFLYLASHYEKLKGSPEDNEQKQLFVEQHKHYLDEIIEQISEFSKRVILADANLDKVLSAYNKHRDKPIREQAENIIHLFTLTNLGAPAAFKYFDTTIDRKRYTSTKEVLDATLIHQSITGLYETRIDLSQLGGDGGPAPEAAAKGGSGGMDLLKPLTVERKGVKIKGYWNSQADITCVPKDLLQGEEPVRQQNVTTIHGTQEGDVYYVNLKIDGRRINTEVIGTTLDYAIITPGDVPWILKKPLELTIKLDLEEQQGTLLNNSILSKKGKEELKQLFEKYSALWQSWENQVGHRRIRPHKIATGTVKPTPQKQYHINPKAKPDIQIVINDLLKQGVLIQKESTMNTPVYPVPKPNGRWRMVLDYRAVNKVTPLIAVQNQHSYGILGSLFKGRYKTTIDLSNGFWAHPIVPEDYWITAFTWQGKQYCWTVLPQGFLNSPGLFTGDVVDLLQGIPNVEVYVDDVYISHDSEKEHLEYLDILFNRLKEAGYIISLKKSNIANSIVDFLGFQITNEGRGLTDTFKEKLENITAPTTLKQLQSILGLLNFARNFIPDFTELIAPLYALIPKSTKNYVPWQIEHSTTLETLITKLNGAEYLQGRKGDKTLIMKVNASYTTGYIRYYNEGEKKPISYVSIVFSKTELKFTELEKLLTTVHKGLLKALDLSMGQNIHVYSPIVSMQNIQKTPQTAKKALASRWLSWLSYLEDPRIRFFYDPQMPALKDLPAVDTGKDNKKHPSNFQHIFYTDGSAITSPTKEGHLNAGMGIVYFINKDGNLQKQQEWSISLGNHTAQFAEIAAFEFALKKCLPLGGNILVVTDSNYVAKAYNEELDVWASNGFVNNRKKPLKHISKWKSVADLKRLRPDVVVTHEPGHQKLDSSPHAYGNNLADQLATQASFKVHAGKRTADGSEFEKRTADGSEFESPKKKAKVE

SEQ ID NO: 7255 - protein, 2087 aa, synthetic construct
MPAAKRVKLDGGDKKYSIGLDIGTNSVGWAVITDEYKVPSKKFKVLGNTDRHSIKKNLIGALLFDSGETAEATRLKRTARRRYTRRKNRICYLQEIFSNEMAKVDDSFFHRLEESFLVEEDKKHERHPIFGNIVDEVAYHEKYPTIYHLRKKLVDSTDKADLRLIYLALAHMIKFRGHFLIEGDLNPDNSDVDKLFIQLVQTYNQLFEENPINASGVDAKAILSARLSKSRRLENLIAQLPGEKKNGLFGNLIALSLGLTPNFKSNFDLAEDAKLQLSKDTYDDDLDNLLAQIGDQYADLFLAAKNLSDAILLSDILRVNTEITKAPLSASMIKRYDEHHQDLTLLKALVRQQLPEKYKEIFFDQSKNGYAGYIDGGASQEEFYKFIKPILEKMDGTEELLVKLNREDLLRKQRTFDNGSIPHQIHLGELHAILRRQEDFYPFLKDNREKIEKILTFRIPYYVGPLARGNSRFAWMTRKSEETITPWNFEEVVDKGASAQSFIERMTNFDKNLPNEKVLPKHSLLYEYFTVYNELTKVKYVTEGMRKPAFLSGEQKKAIVDLLFKTNRKVTVKQLKEDYFKKIECFDSVEISGVEDRFNASLGTYHDLLKIIKDKDFLDNEENEDILEDIVLTLTLFEDREMIEERLKTYAHLFDDKVMKQLKRRRYTGWGRLSRKLINGIRDKQSGKTILDFLKSDGFANRNFMQLIHDDSLTFKEDIQKAQVSGQGDSLHEHIANLAGSPAIKKGILQTVKVVDELVKVMGRHKPENIVIEMARENQTTQKGQKNSRERMKRIEEGIKELGSQILKEHPVENTQLQNEKLYLYYLQNGRDMYVDQELDINRLSDYDVDHIVPQSFLKDDSIDNKVLTRSDKARGKSDNVPSEEVVKKMKNYWRQLLNAKLITQRKFDNLTKAERGGLSELDKAGFIKRQLVETRQITKHVAQILDSRMNTKYDENDKLIREVKVITLKSKLVSDFRKDFQFYKVREINNYHHAHDAYLNAVVGTALIKKYPKLESEFVYGDYKVYDVRKMIAKSEQEIGKATAKYFFYSNIMNFFKTEITLANGEIRKRPLIETNGETGEIVWDKGRDFATVRKVLSMPQVNIVKKTEVQTGGFSKESILPKRNSDKLIARKKDWDPKKYGGFDSPTVAYSVLVVAKVEKGKSKKLKSVKELLGITIMERSSFEKNPIDFLEAKGYKEVKKDLIIKLPKYSLFELENGRKRMLASAGELQKGNELALPSKYVNFLYLASHYEKLKGSPEDNEQKQLFVEQHKHYLDEIIEQISEFSKRVILADANLDKVLSAYNKHRDKPIREQAENIIHLFTLTNLGAPAAFKYFDTTIDRKRYTSTKEVLDATLIHQSITGLYETRIDLSQLGGDGGPAPEAAAKGGSGGVPWILKKPLELTIKLDLEEQQGTLLNNSILSKKGKEELKQLFEKYSALWQSWENQVGHRRIRPHKIATGTVKPTPQKQYHINPKAKPDIQIVINDLLKQGVLIQKESTMNTPVYPVPKPNGRWRMVLDYRAVNKVTPLIAVQNQHSYGILGSLFKGRYKTTIDLSNGFWAHPIVPEDYWITAFTWQGKQYCWTVLPQGFLNSPGLFTGDVVDLLQGIPNVEVYVDDVYISHDSEKEHLEYLDILFNRLKEAGYIISLKKSNIANSIVDFLGFQITNEGRGLTDTFKEKLENITAPTTLKQLQSILGLLNFARNFIPDFTELIAPLYALIPKSTKNYVPWQIEHSTTLETLITKLNGAEYLQGRKGDKTLIMKVNASYTTGYIRYYNEGEKKPISYVSIVFSKTELKFTELEKLLTTVHKGLLKALDLSMGQNIHVYSPIVSMQNIQKTPQTAKKALASRWLSWLSYLEDPRIRFFYDPQMPALKDLPAVDTGKDNKKHPSNFQHIFYTDGSAITSPTKEGHLNAGMGIVYFINKDGNLQKQQEWSISLGNHTAQFAEIAAFEFALKKCLPLGGNILVVTDSNYVAKAYNEELDVWASNGFVNNRKKPLKHISKWKSVADLKRLRPDVVVTHEPGHQKLDSSPHAYGNNLADQLATQASFKVHAGKRTADGSEFEKRTADGSEFESPKKKAKVE

SEQ ID NO: 7256 - protein, 2095 aa, synthetic construct
MPAAKRVKLDGGDKKYSIGLDIGTNSVGWAVITDEYKVPSKKFKVLGNTDRHSIKKNLIGALLFDSGETAEATRLKRTARRRYTRRKNRICYLQEIFSNEMAKVDDSFFHRLEESFLVEEDKKHERHPIFGNIVDEVAYHEKYPTIYHLRKKLVDSTDKADLRLIYLALAHMIKFRGHFLIEGDLNPDNSDVDKLFIQLVQTYNQLFEENPINASGVDAKAILSARLSKSRRLENLIAQLPGEKKNGLFGNLIALSLGLTPNFKSNFDLAEDAKLQLSKDTYDDDLDNLLAQIGDQYADLFLAAKNLSDAILLSDILRVNTEITKAPLSASMIKRYDEHHQDLTLLKALVRQQLPEKYKEIFFDQSKNGYAGYIDGGASQEEFYKFIKPILEKMDGTEELLVKLNREDLLRKQRTFDNGSIPHQIHLGELHAILRRQEDFYPFLKDNREKIEKILTFRIPYYVGPLARGNSRFAWMTRKSEETITPWNFEEVVDKGASAQSFIERMTNFDKNLPNEKVLPKHSLLYEYFTVYNELTKVKYVTEGMRKPAFLSGEQKKAIVDLLFKTNRKVTVKQLKEDYFKKIECFDSVEISGVEDRFNASLGTYHDLLKIIKDKDFLDNEENEDILEDIVLTLTLFEDREMIEERLKTYAHLFDDKVMKQLKRRRYTGWGRLSRKLINGIRDKQSGKTILDFLKSDGFANRNFMQLIHDDSLTFKEDIQKAQVSGQGDSLHEHIANLAGSPAIKKGILQTVKVVDELVKVMGRHKPENIVIEMARENQTTQKGQKNSRERMKRIEEGIKELGSQILKEHPVENTQLQNEKLYLYYLQNGRDMYVDQELDINRLSDYDVDHIVPQSFLKDDSIDNKVLTRSDKARGKSDNVPSEEVVKKMKNYWRQLLNAKLITQRKFDNLTKAERGGLSELDKAGFIKRQLVETRQITKHVAQILDSRMNTKYDENDKLIREVKVITLKSKLVSDFRKDFQFYKVREINNYHHAHDAYLNAVVGTALIKKYPKLESEFVYGDYKVYDVRKMIAKSEQEIGKATAKYFFYSNIMNFFKTEITLANGEIRKRPLIETNGETGEIVWDKGRDFATVRKVLSMPQVNIVKKTEVQTGGFSKESILPKRNSDKLIARKKDWDPKKYGGFDSPTVAYSVLVVAKVEKGKSKKLKSVKELLGITIMERSSFEKNPIDFLEAKGYKEVKKDLIIKLPKYSLFELENGRKRMLASAGELQKGNELALPSKYVNFLYLASHYEKLKGSPEDNEQKQLFVEQHKHYLDEIIEQISEFSKRVILADANLDKVLSAYNKHRDKPIREQAENIIHLFTLTNLGAPAAFKYFDTTIDRKRYTSTKEVLDATLIHQSITGLYETRIDLSQLGGDGGPAPEAAAKGGSGGTLQLEEEYRLFEPESTQKQEMDIWLKNFPQAWAETGGMGTAHCQAPVLIQLKATATPISIRQYPMPHEAYQGIKPHIRRMLDQGILKPCQSPWNTPLLPVKKPGTEDYRPVQDLREVNKRVEDIHPTVPNPYNLLSTLPPSHPWYTVLDLKDAFFCLRLHSESQLLFAFEWRDPEIGLSGQLTWTRLPQGFKNSPTLFNEALHSDLADFRVRYPALVLLQYVDDLLLAAATRTECLEGTKALLETLGNKGYRASAKKAQICLQEVTYLGYSLKDGQRWLTKARKEAILSIPVPKNSRQVREFLGTAGYCRLWIPGFAELAAPLYPLTRPGTLFQWGTEQQLAFEDIKKALLSSPALGLPDITKPFELFIDENSGFAKGVLVQKLGPWKRPVAYLSKKLDTVASGWPPCLRMVAAIAILVKDAGKLTLGQPLTILTSHPVEALVRQPPNKWLSNARMTHYQAMLLDAERVHFGPTVSLNPATLLPLPSGGNHHDCLQILAETHGTRPDLTDQPLPDADLTWYTDGSSFIRNGEREAGAAVTTESEVIWAAPLPPGTSAQRAELIALTQALKMAEGKKLTVYTDSRYAFATTHVHGEIYRRRGWLTSEGKEIKNKNEILALLEALFLPKRLSIIHCPGHQKGDSPQAKGNRLADDTAKKAATETHSSLTVLPAGKRTADGSEFEKRTADGSEFESPKKKAKVE

SEQ ID NO: 7257 - protein, 2094 aa, synthetic construct
MPAAKRVKLDGGDKKYSIGLDIGTNSVGWAVITDEYKVPSKKFKVLGNTDRHSIKKNLIGALLFDSGETAEATRLKRTARRRYTRRKNRICYLQEIFSNEMAKVDDSFFHRLEESFLVEEDKKHERHPIFGNIVDEVAYHEKYPTIYHLRKKLVDSTDKADLRLIYLALAHMIKFRGHFLIEGDLNPDNSDVDKLFIQLVQTYNQLFEENPINASGVDAKAILSARLSKSRRLENLIAQLPGEKKNGLFGNLIALSLGLTPNFKSNFDLAEDAKLQLSKDTYDDDLDNLLAQIGDQYADLFLAAKNLSDAILLSDILRVNTEITKAPLSASMIKRYDEHHQDLTLLKALVRQQLPEKYKEIFFDQSKNGYAGYIDGGASQEEFYKFIKPILEKMDGTEELLVKLNREDLLRKQRTFDNGSIPHQIHLGELHAILRRQEDFYPFLKDNREKIEKILTFRIPYYVGPLARGNSRFAWMTRKSEETITPWNFEEVVDKGASAQSFIERMTNFDKNLPNEKVLPKHSLLYEYFTVYNELTKVKYVTEGMRKPAFLSGEQKKAIVDLLFKTNRKVTVKQLKEDYFKKIECFDSVEISGVEDRFNASLGTYHDLLKIIKDKDFLDNEENEDILEDIVLTLTLFEDREMIEERLKTYAHLFDDKVMKQLKRRRYTGWGRLSRKLINGIRDKQSGKTILDFLKSDGFANRNFMQLIHDDSLTFKEDIQKAQVSGQGDSLHEHIANLAGSPAIKKGILQTVKVVDELVKVMGRHKPENIVIEMARENQTTQKGQKNSRERMKRIEEGIKELGSQILKEHPVENTQLQNEKLYLYYLQNGRDMYVDQELDINRLSDYDVDHIVPQSFLKDDSIDNKVLTRSDKARGKSDNVPSEEVVKKMKNYWRQLLNAKLITQRKFDNLTKAERGGLSELDKAGFIKRQLVETRQITKHVAQILDSRMNTKYDENDKLIREVKVITLKSKLVSDFRKDFQFYKVREINNYHHAHDAYLNAVVGTALIKKYPKLESEFVYGDYKVYDVRKMIAKSEQEIGKATAKYFFYSNIMNFFKTEITLANGEIRKRPLIETNGETGEIVWDKGRDFATVRKVLSMPQVNIVKKTEVQTGGFSKESILPKRNSDKLIARKKDWDPKKYGGFDSPTVAYSVLVVAKVEKGKSKKLKSVKELLGITIMERSSFEKNPIDFLEAKGYKEVKKDLIIKLPKYSLFELENGRKRMLASAGELQKGNELALPSKYVNFLYLASHYEKLKGSPEDNEQKQLFVEQHKHYLDEIIEQISEFSKRVILADANLDKVLSAYNKHRDKPIREQAENIIHLFTLTNLGAPAAFKYFDTTIDRKRYTSTKEVLDATLIHQSITGLYETRIDLSQLGGDGGPAPEAAAKGGSGGVLNLEEEYRLHEKPVPSSIDPSWLQLFPTVWAERAGMGLANQVPPVVVELRSGASPVAVRQYPMSKEAREGIRPHIQKFLDLGVLVPCRSPWNTPLLPVKKPGTNDYRPVQDLREINKRVQDIHPTVPNPYNLLSSLPPSYTWYSVLDLKDAFFCLRLHPNSQPLFAFEWKDPEKGNTGQLTWTRLPQGFKNSPTLFNEALHRDLAPFRALNPQVVLLQYVDDLLVAAPTYEDCKKGTQKLLQELSKLGYRVSAKKAQLCQREVTYLGYLLKEGKRWLTPARKATVMKIPVPTTPRQVREFLGKAGFCRLFIPGFASLAAPLYPLTKPSIPFIWTEEHQQAFDHIKKALLSAPALALPDLTKPFTLYIDERAGVARGVLTQTLGPWRRPVAYLSKKLDPVASGWPTCLKAVAAVALLLKDADKLTLGQNVTVIASHSLESIVRQPPDRWMTNARMTHYQSLLLNERVSFAPPAVLNPATLLPVESEATPVHRCSEILAEETGTRRDLEDQPLPGVPTWYTDGSSFITEGKRRAGAPIVDGKRTVWASSLPEGTSAQKAELVALTQALRLAEGKNINIYTDSRYAFATAHIHGAIYKQRGWLTSAGKDIKNKEEILALLEAIHLPRRVAIIHCPGHQRGSNPVATGNRRADEAAKQAALSTRVLAGTTKPAGKRTADGSEFEKRTADGSEFESPKKKAKVE

SEQ ID NO: 7258 - protein, 2127 aa, synthetic construct
MPAAKRVKLDGGDKKYSIGLDIGTNSVGWAVITDEYKVPSKKFKVLGNTDRHSIKKNLIGALLFDSGETAEATRLKRTARRRYTRRKNRICYLQEIFSNEMAKVDDSFFHRLEESFLVEEDKKHERHPIFGNIVDEVAYHEKYPTIYHLRKKLVDSTDKADLRLIYLALAHMIKFRGHFLIEGDLNPDNSDVDKLFIQLVQTYNQLFEENPINASGVDAKAILSARLSKSRRLENLIAQLPGEKKNGLFGNLIALSLGLTPNFKSNFDLAEDAKLQLSKDTYDDDLDNLLAQIGDQYADLFLAAKNLSDAILLSDILRVNTEITKAPLSASMIKRYDEHHQDLTLLKALVRQQLPEKYKEIFFDQSKNGYAGYIDGGASQEEFYKFIKPILEKMDGTEELLVKLNREDLLRKQRTFDNGSIPHQIHLGELHAILRRQEDFYPFLKDNREKIEKILTFRIPYYVGPLARGNSRFAWMTRKSEETITPWNFEEVVDKGASAQSFIERMTNFDKNLPNEKVLPKHSLLYEYFTVYNELTKVKYVTEGMRKPAFLSGEQKKAIVDLLFKTNRKVTVKQLKEDYFKKIECFDSVEISGVEDRFNASLGTYHDLLKIIKDKDFLDNEENEDILEDIVLTLTLFEDREMIEERLKTYAHLFDDKVMKQLKRRRYTGWGRLSRKLINGIRDKQSGKTILDFLKSDGFANRNFMQLIHDDSLTFKEDIQKAQVSGQGDSLHEHIANLAGSPAIKKGILQTVKVVDELVKVMGRHKPENIVIEMARENQTTQKGQKNSRERMKRIEEGIKELGSQILKEHPVENTQLQNEKLYLYYLQNGRDMYVDQELDINRLSDYDVDHIVPQSFLKDDSIDNKVLTRSDKARGKSDNVPSEEVVKKMKNYWRQLLNAKLITQRKFDNLTKAERGGLSELDKAGFIKRQLVETRQITKHVAQILDSRMNTKYDENDKLIREVKVITLKSKLVSDFRKDFQFYKVREINNYHHAHDAYLNAVVGTALIKKYPKLESEFVYGDYKVYDVRKMIAKSEQEIGKATAKYFFYSNIMNFFKTEITLANGEIRKRPLIETNGETGEIVWDKGRDFATVRKVLSMPQVNIVKKTEVQTGGFSKESILPKRNSDKLIARKKDWDPKKYGGFDSPTVAYSVLVVAKVEKGKSKKLKSVKELLGITIMERSSFEKNPIDFLEAKGYKEVKKDLIIKLPKYSLFELENGRKRMLASAGELQKGNELALPSKYVNFLYLASHYEKLKGSPEDNEQKQLFVEQHKHYLDEIIEQISEFSKRVILADANLDKVLSAYNKHRDKPIREQAENIIHLFTLTNLGAPAAFKYFDTTIDRKRYTSTKEVLDATLIHQSITGLYETRIDLSQLGGDGGPAPEAAAKGGSGGLLGRDLLTKLKAQIQFSTEGPQVTWEDRPAMCLVLNLEEEYRLHEKPVPPSIDPSWLQLFPMVWAEKAGMGLANQVPPVVVELKSDASPVAVRQYPMSKEAREGIRPHIQRFLDLGILVPCQSPWNTPLLPVKKPGTNDYRPVQDLREVNKRVQDIHPTVPNPYNLLSSLPPSHTWYSVLDLKDAFFCLKLHPNSQPLFAFEWRDPEKGNTGQLTWTRLPQGFKNSPTLFNEALHRDLASFRALNPQVVMLQYVDDLLVAAPTYRDCKEGTRRLLQELSKLGYRVSAKKAQLCREEVTYLGYLLKGGKRWLTPARKATVMKIPTPTTPRQVREFLGKAGFCRLFIPGFASLAAPLYPLTRPKVPFTWTEAHQEAFGRIKEALLSAPALALPDLTKPFALYVDEKEGVARGVLTQTLGPWRRPVAYLSKKLDPVASGWPTCLKAIAAVALLLKDADKLTLGQNVLVIAPHNLESIVRQPPDRWMTNARMTHYQSLLLNERVSFAPPAILNPATLLPVESDDTPIHICSEILAEETGTRPDLRDQPLPGVPAWYTDGSSFIMDGRRQAGAAIVDNKRTVWASNLPEGTSAQKAELIALTQALRLAEGKSINIYTDSRYAFATAHVHGAIYKQRGWLTSAGKDIKNKEEILALLEAIHLPKRVAIIHCPGHQRGTDPVATGNRKADEAAKQAAQSTRILTETTKNAGKRTADGSEFEKRTADGSEFESPKKKAKVE

SEQ ID NO: 7259 - protein, 2218 aa, synthetic construct
MPAAKRVKLDGGDKKYSIGLDIGTNSVGWAVITDEYKVPSKKFKVLGNTDRHSIKKNLIGALLFDSGETAEATRLKRTARRRYTRRKNRICYLQEIFSNEMAKVDDSFFHRLEESFLVEEDKKHERHPIFGNIVDEVAYHEKYPTIYHLRKKLVDSTDKADLRLIYLALAHMIKFRGHFLIEGDLNPDNSDVDKLFIQLVQTYNQLFEENPINASGVDAKAILSARLSKSRRLENLIAQLPGEKKNGLFGNLIALSLGLTPNFKSNFDLAEDAKLQLSKDTYDDDLDNLLAQIGDQYADLFLAAKNLSDAILLSDILRVNTEITKAPLSASMIKRYDEHHQDLTLLKALVRQQLPEKYKEIFFDQSKNGYAGYIDGGASQEEFYKFIKPILEKMDGTEELLVKLNREDLLRKQRTFDNGSIPHQIHLGELHAILRRQEDFYPFLKDNREKIEKILTFRIPYYVGPLARGNSRFAWMTRKSEETITPWNFEEVVDKGASAQSFIERMTNFDKNLPNEKVLPKHSLLYEYFTVYNELTKVKYVTEGMRKPAFLSGEQKKAIVDLLFKTNRKVTVKQLKEDYFKKIECFDSVEISGVEDRFNASLGTYHDLLKIIKDKDFLDNEENEDILEDIVLTLTLFEDREMIEERLKTYAHLFDDKVMKQLKRRRYTGWGRLSRKLINGIRDKQSGKTILDFLKSDGFANRNFMQLIHDDSLTFKEDIQKAQVSGQGDSLHEHIANLAGSPAIKKGILQTVKVVDELVKVMGRHKPENIVIEMARENQTTQKGQKNSRERMKRIEEGIKELGSQILKEHPVENTQLQNEKLYLYYLQNGRDMYVDQELDINRLSDYDVDHIVPQSFLKDDSIDNKVLTRSDKARGKSDNVPSEEVVKKMKNYWRQLLNAKLITQRKFDNLTKAERGGLSELDKAGFIKRQLVETRQITKHVAQILDSRMNTKYDENDKLIREVKVITLKSKLVSDFRKDFQFYKVREINNYHHAHDAYLNAVVGTALIKKYPKLESEFVYGDYKVYDVRKMIAKSEQEIGKATAKYFFYSNIMNFFKTEITLANGEIRKRPLIETNGETGEIVWDKGRDFATVRKVLSMPQVNIVKKTEVQTGGFSKESILPKRNSDKLIARKKDWDPKKYGGFDSPTVAYSVLVVAKVEKGKSKKLKSVKELLGITIMERSSFEKNPIDFLEAKGYKEVKKDLIIKLPKYSLFELENGRKRMLASAGELQKGNELALPSKYVNFLYLASHYEKLKGSPEDNEQKQLFVEQHKHYLDEIIEQISEFSKRVILADANLDKVLSAYNKHRDKPIREQAENIIHLFTLTNLGAPAAFKYFDTTIDRKRYTSTKEVLDATLIHQSITGLYETRIDLSQLGGDGGPAPEAAAKGGSGGTLGDQGSRGSDPLPEPRVTLTVEGIPTEFLVNTGAEHSVLTKPMGKMGSKRTVVAGATGSKVYPWTTKRLLKIGQKQVTHSFLVIPECPAPLLGRDLLTKLKAQIQFSTEGPQVTWEDRPAMCLVLNLEEEYRLHEKPVPPSIDPSWLQLFPMVWAEKAGMGLANQVPPVVVELKSDASPVAVRQYPMSKEAREGIRPHIQRFLDLGILVPCQSPWNTPLLPVKKPGTNDYRPVQDLREVNKRVQDIHPTVPNPYNLLSSLPPSHTWYSVLDLKDAFFCLKLHPNSQPLFAFEWRDPEKGNTGQLTWTRLPQGFKNSPTLFNEALHRDLASFRALNPQVVMLQYVDDLLVAAPTYRDCKEGTRRLLQELSKLGYRVSAKKAQLCREEVTYLGYLLKGGKRWLTPARKATVMKIPTPTTPRQVREFLGTAGFCRLWIPGFASLAAPLYPLTRPKVPFTWTEAHQEAFGRIKEALLSAPALALPDLTKPFALYVDEKEGVARGVLTQTLGPWRRPVAYLSKKLDPVASGWPTCLKAIAAVALLLKDADKLTLGQNVLVIAPHNLESIVRQPPDRWMTNARMTHYQSLLLNERVSFAPPAILNPATLLPVESDDTPIHICSEILAEETGTRPDLRDQPLPGVPAWYTDGSSFIMDGRRQAGAAIVDNKRTVWASNLPEGTSAQKAELIALTQALRLAEGKSINIYTDSRYAFATAHVHGAIYKQRGWLTSAGKDIKNKEEILALLEAIHLPKRVAIIHCPGHQRGTDPVATGNRKADEAAKQAAQSTRILTETTKNAGKRTADGSEFEKRTADGSEFESPKKKAKVE

SEQ ID NO: 7260 - protein, 2218 aa, synthetic construct
MPAAKRVKLDGGDKKYSIGLDIGTNSVGWAVITDEYKVPSKKFKVLGNTDRHSIKKNLIGALLFDSGETAEATRLKRTARRRYTRRKNRICYLQEIFSNEMAKVDDSFFHRLEESFLVEEDKKHERHPIFGNIVDEVAYHEKYPTIYHLRKKLVDSTDKADLRLIYLALAHMIKFRGHFLIEGDLNPDNSDVDKLFIQLVQTYNQLFEENPINASGVDAKAILSARLSKSRRLENLIAQLPGEKKNGLFGNLIALSLGLTPNFKSNFDLAEDAKLQLSKDTYDDDLDNLLAQIGDQYADLFLAAKNLSDAILLSDILRVNTEITKAPLSASMIKRYDEHHQDLTLLKALVRQQLPEKYKEIFFDQSKNGYAGYIDGGASQEEFYKFIKPILEKMDGTEELLVKLNREDLLRKQRTFDNGSIPHQIHLGELHAILRRQEDFYPFLKDNREKIEKILTFRIPYYVGPLARGNSRFAWMTRKSEETITPWNFEEVVDKGASAQSFIERMTNFDKNLPNEKVLPKHSLLYEYFTVYNELTKVKYVTEGMRKPAFLSGEQKKAIVDLLFKTNRKVTVKQLKEDYFKKIECFDSVEISGVEDRFNASLGTYHDLLKIIKDKDFLDNEENEDILEDIVLTLTLFEDREMIEERLKTYAHLFDDKVMKQLKRRRYTGWGRLSRKLINGIRDKQSGKTILDFLKSDGFANRNFMQLIHDDSLTFKEDIQKAQVSGQGDSLHEHIANLAGSPAIKKGILQTVKVVDELVKVMGRHKPENIVIEMARENQTTQKGQKNSRERMKRIEEGIKELGSQILKEHPVENTQLQNEKLYLYYLQNGRDMYVDQELDINRLSDYDVDHIVPQSFLKDDSIDNKVLTRSDKARGKSDNVPSEEVVKKMKNYWRQLLNAKLITQRKFDNLTKAERGGLSELDKAGFIKRQLVETRQITKHVAQILDSRMNTKYDENDKLIREVKVITLKSKLVSDFRKDFQFYKVREINNYHHAHDAYLNAVVGTALIKKYPKLESEFVYGDYKVYDVRKMIAKSEQEIGKATAKYFFYSNIMNFFKTEITLANGEIRKRPLIETNGETGEIVWDKGRDFATVRKVLSMPQVNIVKKTEVQTGGFSKESILPKRNSDKLIARKKDWDPKKYGGFDSPTVAYSVLVVAKVEKGKSKKLKSVKELLGITIMERSSFEKNPIDFLEAKGYKEVKKDLIIKLPKYSLFELENGRKRMLASAGELQKGNELALPSKYVNFLYLASHYEKLKGSPEDNEQKQLFVEQHKHYLDEIIEQISEFSKRVILADANLDKVLSAYNKHRDKPIREQAENIIHLFTLTNLGAPAAFKYFDTTIDRKRYTSTKEVLDATLIHQSITGLYETRIDLSQLGGDGGPAPEAAAKGGSGGTLGDQGSRGSDPLPEPRVTLTVEGIPTEFLVNTGAEHSVLTKPMGKMGSKRTVVAGATGSKVYPWTTKRLLKIGQKQVTHSFLVIPECPAPLLGRDLLTKLKAQIQFSTEGPQVTWEDRPAMCLVLNLEEEYRLHEKPVPPSIDPSWLQLFPMVWAEKAGMGLANQVPPVVVELKSDASPVAVRQYPMSKEAREGIRPHIQRFLDLGILVPCQSPWNTPLLPVKKPGTNDYRPVQDLREVNKRVQDIHPTVPNPYNLLSSLPPSHTWYSVLDLKDAFFCLKLHPNSQPLFAFEWRDPEKGNTGQLTWTRLPQGFKNSPTLFNEALHRDLASFRALNPQVVMLQYVDDLLVAAPTYRDCKEGTRRLLQELSKLGYRVSAKKAQLCREEVTYLGYLLKGGKRWLTPARKATVMKIPTPTTPRQVREFLGKAGFCRLFIPGFASLAAPLYPLTRPKVPFTWTEAHQEAFGRIKEALLSAPALALPDLTKPFALYVDEKEGVARGVLTQTLGPWRRPVAYLSKKLDPVASGWPTCLKAIAAVALLLKDADKLTLGQNVLVIAPHNLESIVRQPPDRWMTNARMTHYQSLLLNERVSFAPPAILNPATLLPVESDDTPIHICSEILAEETGTRPDLRDQPLPGVPAWYTDGSSFIMDGRRQAGAAIVDNKRTVWASNLPEGTSAQKAELIALTQALRLAEGKSINIYTDSRYAFATAHVHGAIYKQRGWLTSAGKDIKNKEEILALLEAIHLPKRVAIIHCPGHQRGTDPVATGNRKADEAAKQAAQSTRILTETTKNAGKRTADGSEFEKRTADGSEFESPKKKAKVE

SEQ ID NO: 7261 - protein, 2096 aa, synthetic construct
MPAAKRVKLDGGDKKYSIGLDIGTNSVGWAVITDEYKVPSKKFKVLGNTDRHSIKKNLIGALLFDSGETAEATRLKRTARRRYTRRKNRICYLQEIFSNEMAKVDDSFFHRLEESFLVEEDKKHERHPIFGNIVDEVAYHEKYPTIYHLRKKLVDSTDKADLRLIYLALAHMIKFRGHFLIEGDLNPDNSDVDKLFIQLVQTYNQLFEENPINASGVDAKAILSARLSKSRRLENLIAQLPGEKKNGLFGNLIALSLGLTPNFKSNFDLAEDAKLQLSKDTYDDDLDNLLAQIGDQYADLFLAAKNLSDAILLSDILRVNTEITKAPLSASMIKRYDEHHQDLTLLKALVRQQLPEKYKEIFFDQSKNGYAGYIDGGASQEEFYKFIKPILEKMDGTEELLVKLNREDLLRKQRTFDNGSIPHQIHLGELHAILRRQEDFYPFLKDNREKIEKILTFRIPYYVGPLARGNSRFAWMTRKSEETITPWNFEEVVDKGASAQSFIERMTNFDKNLPNEKVLPKHSLLYEYFTVYNELTKVKYVTEGMRKPAFLSGEQKKAIVDLLFKTNRKVTVKQLKEDYFKKIECFDSVEISGVEDRFNASLGTYHDLLKIIKDKDFLDNEENEDILEDIVLTLTLFEDREMIEERLKTYAHLFDDKVMKQLKRRRYTGWGRLSRKLINGIRDKQSGKTILDFLKSDGFANRNFMQLIHDDSLTFKEDIQKAQVSGQGDSLHEHIANLAGSPAIKKGILQTVKVVDELVKVMGRHKPENIVIEMARENQTTQKGQKNSRERMKRIEEGIKELGSQILKEHPVENTQLQNEKLYLYYLQNGRDMYVDQELDINRLSDYDVDHIVPQSFLKDDSIDNKVLTRSDKARGKSDNVPSEEVVKKMKNYWRQLLNAKLITQRKFDNLTKAERGGLSELDKAGFIKRQLVETRQITKHVAQILDSRMNTKYDENDKLIREVKVITLKSKLVSDFRKDFQFYKVREINNYHHAHDAYLNAVVGTALIKKYPKLESEFVYGDYKVYDVRKMIAKSEQEIGKATAKYFFYSNIMNFFKTEITLANGEIRKRPLIETNGETGEIVWDKGRDFATVRKVLSMPQVNIVKKTEVQTGGFSKESILPKRNSDKLIARKKDWDPKKYGGFDSPTVAYSVLVVAKVEKGKSKKLKSVKELLGITIMERSSFEKNPIDFLEAKGYKEVKKDLIIKLPKYSLFELENGRKRMLASAGELQKGNELALPSKYVNFLYLASHYEKLKGSPEDNEQKQLFVEQHKHYLDEIIEQISEFSKRVILADANLDKVLSAYNKHRDKPIREQAENIIHLFTLTNLGAPAAFKYFDTTIDRKRYTSTKEVLDATLIHQSITGLYETRIDLSQLGGDGGPAPEAAAKGGSGGTLNLEDEYRLYETSAEPEVSPGSTWLSDFPQAWAETGGMGLAVRQAPLIIPLKATSTPVSIKQYPMSQEAKLGIKPHIQRLLDQGILVPCQSPWNTPLLPVKKPGTNDYRPVQDLREVNKRVEDIHPTVPNPYNLLSGLPPSHRWYTVLDLKDAFFCLRLHPTSQPLFAFEWRDPGMGISGQLTWTRLPQGFKNSPTLFNEALHRDLADFRIQHPDLILLQYVDDILLAATSELDCQQGTRALLLTLGNLGYRASAKKAQLCQKQVKYLGYLLKEGQRWLTEARKETVMGQPTPKTPRQLREFLGTAGFCRLWIPGFAEMAAPLYPLTKPGTLFNWGPDQQKAYQEIKQALLTAPALGLPDLTKPFELFVDEKQGYAKGVLTQKLGPWRRPVAYLSKKLDPVAAGWPPCLRMVAAIAVLRKDAGKLTMGQPLVILAPHAVEALVKQPPDRWLSNARMTHYQAMLLDTDRVQFGPVVALNPATLLPLPEEGAPHDCLEILAETHGTRPDLTDQPIPDADHTWYTDGSSFLQEGQRKAGAAVTTETEVIWARALPAGTSAQRAELIALTQALKMAEGKRLNVYTDSRYAFATAHIHGEIYRRRGWLTSEGREIKNKSEILALLKALFLPKRLSIIHCLGHQKGDSAEARGNRLADQAAREAAIKTPPDTSTLLAGKRTADGSEFEKRTADGSEFESPKKKAKVE

SEQ ID NO: 7262 - protein, 2096 aa, synthetic construct; identical to SEQ ID NO: 4528

SEQ ID NO: 7263 - protein, 2096 aa, synthetic construct
MPAAKRVKLDGGDKKYSIGLDIGTNSVGWAVITDEYKVPSKKFKVLGNTDRHSIKKNLIGALLFDSGETAEATRLKRTARRRYTRRKNRICYLQEIFSNEMAKVDDSFFHRLEESFLVEEDKKHERHPIFGNIVDEVAYHEKYPTIYHLRKKLVDSTDKADLRLIYLALAHMIKFRGHFLIEGDLNPDNSDVDKLFIQLVQTYNQLFEENPINASGVDAKAILSARLSKSRRLENLIAQLPGEKKNGLFGNLIALSLGLTPNFKSNFDLAEDAKLQLSKDTYDDDLDNLLAQIGDQYADLFLAAKNLSDAILLSDILRVNTEITKAPLSASMIKRYDEHHQDLTLLKALVRQQLPEKYKEIFFDQSKNGYAGYIDGGASQEEFYKFIKPILEKMDGTEELLVKLNREDLLRKQRTFDNGSIPHQIHLGELHAILRRQEDFYPFLKDNREKIEKILTFRIPYYVGPLARGNSRFAWMTRKSEETITPWNFEEVVDKGASAQSFIERMTNFDKNLPNEKVLPKHSLLYEYFTVYNELTKVKYVTEGMRKPAFLSGEQKKAIVDLLFKTNRKVTVKQLKEDYFKKIECFDSVEISGVEDRFNASLGTYHDLLKIIKDKDFLDNEENEDILEDIVLTLTLFEDREMIEERLKTYAHLFDDKVMKQLKRRRYTGWGRLSRKLINGIRDKQSGKTILDFLKSDGFANRNFMQLIHDDSLTFKEDIQKAQVSGQGDSLHEHIANLAGSPAIKKGILQTVKVVDELVKVMGRHKPENIVIEMARENQTTQKGQKNSRERMKRIEEGIKELGSQILKEHPVENTQLQNEKLYLYYLQNGRDMYVDQELDINRLSDYDVDHIVPQSFLKDDSIDNKVLTRSDKARGKSDNVPSEEVVKKMKNYWRQLLNAKLITQRKFDNLTKAERGGLSELDKAGFIKRQLVETRQITKHVAQILDSRMNTKYDENDKLIREVKVITLKSKLVSDFRKDFQFYKVREINNYHHAHDAYLNAVVGTALIKKYPKLESEFVYGDYKVYDVRKMIAKSEQEIGKATAKYFFYSNIMNFFKTEITLANGEIRKRPLIETNGETGEIVWDKGRDFATVRKVLSMPQVNIVKKTEVQTGGFSKESILPKRNSDKLIARKKDWDPKKYGGFDSPTVAYSVLVVAKVEKGKSKKLKSVKELLGITIMERSSFEKNPIDFLEAKGYKEVKKDLIIKLPKYSLFELENGRKRMLASAGELQKGNELALPSKYVNFLYLASHYEKLKGSPEDNEQKQLFVEQHKHYLDEIIEQISEFSKRVILADANLDKVLSAYNKHRDKPIREQAENIIHLFTLTNLGAPAAFKYFDTTIDRKRYTSTKEVLDATLIHQSITGLYETRIDLSQLGGDGGPAPEAAAKGGSGGTLGIEDEYRLHETSTEPDVSLGSTWLSDFPQAWAETGGMGLAVRQAPLIIPLKATSTPVSIQQYPMSHEARLGIKPHIQRLLDQGILVPCQSPWNTPLLPVKKPGTNDYRPVQDLREVNKRVEDIHPTVPNPYNLLSGLPPSHQWYTVLDLKDAFFCLRLHPTSQPLFAFEWRDPGMGISGQLTWTRLPQGFKNSPTLFNEALHRDLADFRIQHPDLILLQYVDDILLAATSELDCQQGTRALLQTLGDLGYRASAKKAQICQKQVKYLGYLLREGQRWLTEARKETVMGQPVPKTPRQLREFLGTAGFCRLWIPGFAEMAAPLYPLTKPGTLFSWGPDQQKAYQEIKQALLTAPALGLPDLTKPFELFVDEKQGYAKGVLTQKLGPWRRPVAYLSKKLDPVAAGWPPCLRMVAAIAVLTKDAGKLTMGQPLVILAPHAVEALVKQPPDRWLSNARMTHYQAMLLDTDRVQFGPVVALNPATLLPLPEEGAPHDCLEILAETHGTRPDLTDQPIPDADHTWYTDGSSFLQEGQRKAGAAVTTETEVIWAGALPAGTSAQRAELIALTQALKMAEGKRLNVYTDSRYAFATAHIHGEIYRRRGWLTSEGREIKNKSEILALLKALFLPKRLSIIHCLGHQKGDSAEARGNRLADQAAREAAIKTPPDTSTLLAGKRTADGSEFEKRTADGSEFESPKKKAKVE

SEQ ID NO: 7264 - protein, 2096 aa, synthetic construct
MPAAKRVKLDGGDKKYSIGLDIGTNSVGWAVITDEYKVPSKKFKVLGNTDRHSIKKNLIGALLFDSGETAEATRLKRTARRRYTRRKNRICYLQEIFSNEMAKVDDSFFHRLEESFLVEEDKKHERHPIFGNIVDEVAYHEKYPTIYHLRKKLVDSTDKADLRLIYLALAHMIKFRGHFLIEGDLNPDNSDVDKLFIQLVQTYNQLFEENPINASGVDAKAILSARLSKSRRLENLIAQLPGEKKNGLFGNLIALSLGLTPNFKSNFDLAEDAKLQLSKDTYDDDLDNLLAQIGDQYADLFLAAKNLSDAILLSDILRVNTEITKAPLSASMIKRYDEHHQDLTLLKALVRQQLPEKYKEIFFDQSKNGYAGYIDGGASQEEFYKFIKPILEKMDGTEELLVKLNREDLLRKQRTFDNGSIPHQIHLGELHAILRRQEDFYPFLKDNREKIEKILTFRIPYYVGPLARGNSRFAWMTRKSEETITPWNFEEVVDKGASAQSFIERMTNFDKNLPNEKVLPKHSLLYEYFTVYNELTKVKYVTEGMRKPAFLSGEQKKAIVDLLFKTNRKVTVKQLKEDYFKKIECFDSVEISGVEDRFNASLGTYHDLLKIIKDKDFLDNEENEDILEDIVLTLTLFEDREMIEERLKTYAHLFDDKVMKQLKRRRYTGWGRLSRKLINGIRDKQSGKTILDFLKSDGFANRNFMQLIHDDSLTFKEDIQKAQVSGQGDSLHEHIANLAGSPAIKKGILQTVKVVDELVKVMGRHKPENIVIEMARENQTTQKGQKNSRERMKRIEEGIKELGSQILKEHPVENTQLQNEKLYLYYLQNGRDMYVDQELDINRLSDYDVDHIVPQSFLKDDSIDNKVLTRSDKARGKSDNVPSEEVVKKMKNYWRQLLNAKLITQRKFDNLTKAERGGLSELDKAGFIKRQLVETRQITKHVAQILDSRMNTKYDENDKLIREVKVITLKSKLVSDFRKDFQFYKVREINNYHHAHDAYLNAVVGTALIKKYPKLESEFVYGDYKVYDVRKMIAKSEQEIGKATAKYFFYSNIMNFFKTEITLANGEIRKRPLIETNGETGEIVWDKGRDFATVRKVLSMPQVNIVKKTEVQTGGFSKESILPKRNSDKLIARKKDWDPKKYGGFDSPTVAYSVLVVAKVEKGKSKKLKSVKELLGITIMERSSFEKNPIDFLEAKGYKEVKKDLIIKLPKYSLFELENGRKRMLASAGELQKGNELALPSKYVNFLYLASHYEKLKGSPEDNEQKQLFVEQHKHYLDEIIEQISEFSKRVILADANLDKVLSAYNKHRDKPIREQAENIIHLFTLTNLGAPAAFKYFDTTIDRKRYTSTKEVLDATLIHQSITGLYETRIDLSQLGGDGGPAPEAAAKGGSGGTLNIEDEYRLHETSKGPDVPLGSTWLSDFPQAWAETGGMGLAVRQAPLIIPLKATSTPVSIKQYPMSQEARLGIKPHIQRLLDQGILVPCQSPWNTPLLPVKKPGTNDYRPVQDLREVNKRVEDIHPTVPNPYNLLSGLPPSHQWYTVLDLKDAFFCLRLHPTSQSLFAFEWRDPEMGISGQLTWTRLPQGFKNSPTLFNEALHRDLADFRIQHPDLILLQYVDDLLLAATSELDCQQGTRALLQTLGDLGYRASAKKAQICQKQVKYLGYLLKEGQRWLTEARKETVMGQPTPKTPRQLREFLGTAGFCRLWIPGFAEMAAPLYPLTKPGTLFEWGPDQQKAYQEIKQALLTAPALGLPDLTKPFELFVDEKQGYAKGVLTQKLGPWRRPVAYLSKKLDPVAAGWPPCLRMVAAIAVLTKDAGKLTMGQPLVILAPHAVEALVKQPPDRWLSNARMTHYQALLLDTDRVQFGPIVALNPATLLPLPEEGLQHDCLDILAEAHGTRPDLTDQPLPDADHTWYTDGSSFLQEGQRKAGAAVTTETEVVWAKALPAGTSAQRAELIALTQALKMAEGKKLNVYTDSRYAFATAHIHGEIYRRRGWLTSEGKEIKNKDEILALLKALFLPKRLSIIHCPGHQKGNRAEARGNRMADQAAREVATRETPETSTLLAGKRTADGSEFEKRTADGSEFESPKKKAKVE

SEQ ID NO: 7265 - protein, 2088 aa, synthetic construct; identical to SEQ ID NO: 4529

SEQ ID NO: 7266 - protein, 2090 aa, synthetic construct
MPAAKRVKLDGGDKKYSIGLDIGTNSVGWAVITDEYKVPSKKFKVLGNTDRHSIKKNLIGALLFDSGETAEATRLKRTARRRYTRRKNRICYLQEIFSNEMAKVDDSFFHRLEESFLVEEDKKHERHPIFGNIVDEVAYHEKYPTIYHLRKKLVDSTDKADLRLIYLALAHMIKFRGHFLIEGDLNPDNSDVDKLFIQLVQTYNQLFEENPINASGVDAKAILSARLSKSRRLENLIAQLPGEKKNGLFGNLIALSLGLTPNFKSNFDLAEDAKLQLSKDTYDDDLDNLLAQIGDQYADLFLAAKNLSDAILLSDILRVNTEITKAPLSASMIKRYDEHHQDLTLLKALVRQQLPEKYKEIFFDQSKNGYAGYIDGGASQEEFYKFIKPILEKMDGTEELLVKLNREDLLRKQRTFDNGSIPHQIHLGELHAILRRQEDFYPFLKDNREKIEKILTFRIPYYVGPLARGNSRFAWMTRKSEETITPWNFEEVVDKGASAQSFIERMTNFDKNLPNEKVLPKHSLLYEYFTVYNELTKVKYVTEGMRKPAFLSGEQKKAIVDLLFKTNRKVTVKQLKEDYFKKIECFDSVEISGVEDRFNASLGTYHDLLKIIKDKDFLDNEENEDILEDIVLTLTLFEDREMIEERLKTYAHLFDDKVMKQLKRRRYTGWGRLSRKLINGIRDKQSGKTILDFLKSDGFANRNFMQLIHDDSLTFKEDIQKAQVSGQGDSLHEHIANLAGSPAIKKGILQTVKVVDELVKVMGRHKPENIVIEMARENQTTQKGQKNSRERMKRIEEGIKELGSQILKEHPVENTQLQNEKLYLYYLQNGRDMYVDQELDINRLSDYDVDHIVPQSFLKDDSIDNKVLTRSDKARGKSDNVPSEEVVKKMKNYWRQLLNAKLITQRKFDNLTKAERGGLSELDKAGFIKRQLVETRQITKHVAQILDSRMNTKYDENDKLIREVKVITLKSKLVSDFRKDFQFYKVREINNYHHAHDAYLNAVVGTALIKKYPKLESEFVYGDYKVYDVRKMIAKSEQEIGKATAKYFFYSNIMNFFKTEITLANGEIRKRPLIETNGETGEIVWDKGRDFATVRKVLSMPQVNIVKKTEVQTGGFSKESILPKRNSDKLIARKKDWDPKKYGGFDSPTVAYSVLVVAKVEKGKSKKLKSVKELLGITIMERSSFEKNPIDFLEAKGYKEVKKDLIIKLPKYSLFELENGRKRMLASAGELQKGNELALPSKYVNFLYLASHYEKLKGSPEDNEQKQLFVEQHKHYLDEIIEQISEFSKRVILADANLDKVLSAYNKHRDKPIREQAENIIHLFTLTNLGAPAAFKYFDTTIDRKRYTSTKEVLDATLIHQSITGLYETRIDLSQLGGDGGPAPEAAAKGGSGGTLQLDDEYRLYSPLVKPDQNIQFWLEQFPQAWAETAGMGLAKQVPPQVIQLKASATPVSVRQYPLSKEAQEGIRPHVQRLIQQGILVPVQSPWNTPLLPVRKPGTNDYRPVQDLREVNKRVQDIHPTVPNPYNLLCALPPQRSWYTVLDLKDAFFCLRLHPTSQPLFAFEWRDPGTGRTGQLTWTRLPQGFKNSPTIFDEALHRDLANFRIQHPQVTLLQYVDDLLLAGATKQDCLEGTKALLLELSDLGYRASAKKAQICRREVTYLGYSLRDGQRWLTEARKKTVVQIPAPTTAKQVREFLGTAGFCRLWIPGFATLAAPLYPLTKEKGEFSWAPEHQKAFDAIKKALLSAPALALPDVTKPFTLYVDERKGVARGVLTQTLGPWRRPVAYLSKKLDPVASGWPVCLKAIAAVAILVKDADKLTLGQNITVIAPHALENIVRQPPDRWMTNARMTHYQSLLLTERVTFAPPAALNPATLLPEETDEPVTHDCHQLLIEETGVRKDLTDIPLTGEVLTWFTDGSSYVVEGKRMAGAAVVDGTRTIWASSLPEGTSAQKAELMALTQALRLAEGKSINIYTDSRYAFATAHVHGAIYKQRGLLTSAGREIKNKEEILSLLEALHLPKRLAIIHCPGHQKAKDPISRGNQMADRVAKQAAQGVNLLAGKRTADGSEFEKRTADGSEFESPKKKAKVE

SEQ ID NO: 7267 - protein, 2088 aa, synthetic construct; identical to SEQ ID NO: 4529

SEQ ID NO: 7268 - protein, 2176 aa, synthetic construct
MPAAKRVKLDGGDKKYSIGLDIGTNSVGWAVITDEYKVPSKKFKVLGNTDRHSIKKNLIGALLFDSGETAEATRLKRTARRRYTRRKNRICYLQEIFSNEMAKVDDSFFHRLEESFLVEEDKKHERHPIFGNIVDEVAYHEKYPTIYHLRKKLVDSTDKADLRLIYLALAHMIKFRGHFLIEGDLNPDNSDVDKLFIQLVQTYNQLFEENPINASGVDAKAILSARLSKSRRLENLIAQLPGEKKNGLFGNLIALSLGLTPNFKSNFDLAEDAKLQLSKDTYDDDLDNLLAQIGDQYADLFLAAKNLSDAILLSDILRVNTEITKAPLSASMIKRYDEHHQDLTLLKALVRQQLPEKYKEIFFDQSKNGYAGYIDGGASQEEFYKFIKPILEKMDGTEELLVKLNREDLLRKQRTFDNGSIPHQIHLGELHAILRRQEDFYPFLKDNREKIEKILTFRIPYYVGPLARGNSRFAWMTRKSEETITPWNFEEVVDKGASAQSFIERMTNFDKNLPNEKVLPKHSLLYEYFTVYNELTKVKYVTEGMRKPAFLSGEQKKAIVDLLFKTNRKVTVKQLKEDYFKKIECFDSVEISGVEDRFNASLGTYHDLLKIIKDKDFLDNEENEDILEDIVLTLTLFEDREMIEERLKTYAHLFDDKVMKQLKRRRYTGWGRLSRKLINGIRDKQSGKTILDFLKSDGFANRNFMQLIHDDSLTFKEDIQKAQVSGQGDSLHEHIANLAGSPAIKKGILQTVKVVDELVKVMGRHKPENIVIEMARENQTTQKGQKNSRERMKRIEEGIKELGSQILKEHPVENTQLQNEKLYLYYLQNGRDMYVDQELDINRLSDYDVDHIVPQSFLKDDSIDNKVLTRSDKARGKSDNVPSEEVVKKMKNYWRQLLNAKLITQRKFDNLTKAERGGLSELDKAGFIKRQLVETRQITKHVAQILDSRMNTKYDENDKLIREVKVITLKSKLVSDFRKDFQFYKVREINNYHHAHDAYLNAVVGTALIKKYPKLESEFVYGDYKVYDVRKMIAKSEQEIGKATAKYFFYSNIMNFFKTEITLANGEIRKRPLIETNGETGEIVWDKGRDFATVRKVLSMPQVNIVKKTEVQTGGFSKESILPKRNSDKLIARKKDWDPKKYGGFDSPTVAYSVLVVAKVEKGKSKKLKSVKELLGITIMERSSFEKNPIDFLEAKGYKEVKKDLIIKLPKYSLFELENGRKRMLASAGELQKGNELALPSKYVNFLYLASHYEKLKGSPEDNEQKQLFVEQHKHYLDEIIEQISEFSKRVILADANLDKVLSAYNKHRDKPIREQAENIIHLFTLTNLGAPAAFKYFDTTIDRKRYTSTKEVLDATLIHQSITGLYETRIDLSQLGGDGGPAPEAAAKGGSGGMDPLQLLQPLEAEIKGTKLKAHWNSGATITCVPEAFLEDERPIQTMLIKTIHGEKQQDVYYLTFKVQGRKVEAEVLASPYDYILLNPSDVPWLMKKPLQLTVLVPLHEYQERLLQQTALPKEQKELLQKLFLKYDALWQHWENQVGHRRIKPHNIATGTLAPRPQKQYPINPKAKPSIQIVIDDLLKQGVLIQQNSTMNTPVYPVPKPDGKWRMVLDYREVNKTIPLIAAQNQHSAGILSSIYRGKYKTTLDLTNGFWAHPITPESYWLTAFTWQGKQYCWTRLPQGFLNSPALFTADVVDLLKEIPNVQAYVDDIYISHDDPQEHLEQLEKIFSILLNAGYVVSLKKSEIAQREVEFLGFNITKEGRGLTDTFKQKLLNITPPKDLKQLQSILGLLNFARNFIPNYSELVKPLYTIVANANGKFISWTEDNSNQLQHIISVLNQADNLEERNPETRLIIKVNSSPSAGYIRYYNEGSKRPIMYVNYIFSKAEAKFTQTEKLLTTMHKGLIKAMDLAMGQEILVYSPIVSMTKIQRTPLPERKALPVRWITWMTYLEDPRIQFHYDKSLPELQQIPNVTEDVIAKTKHPSEFAMVFYTDGSAIKHPDVNKSHSAGMGIAQVQFIPEYKIVHQWSIPLGDHTAQLAEIAAVEFACKKALKISGPVLIVTDSFYVAESANKELPYWKSNGFLNNKKKPLRHVSKWKSIAECLQLKPDIIIMHEKGHQQPMTTLHTEGNNLADKLATQGSYVVHAGKRTADGSEFEKRTADGSEFESPKKKAKVE

SEQ ID NO: 7269 - protein, 2087 aa, synthetic construct
MPAAKRVKLDGGDKKYSIGLDIGTNSVGWAVITDEYKVPSKKFKVLGNTDRHSIKKNLIGALLFDSGETAEATRLKRTARRRYTRRKNRICYLQEIFSNEMAKVDDSFFHRLEESFLVEEDKKHERHPIFGNIVDEVAYHEKYPTIYHLRKKLVDSTDKADLRLIYLALAHMIKFRGHFLIEGDLNPDNSDVDKLFIQLVQTYNQLFEENPINASGVDAKAILSARLSKSRRLENLIAQLPGEKKNGLFGNLIALSLGLTPNFKSNFDLAEDAKLQLSKDTYDDDLDNLLAQIGDQYADLFLAAKNLSDAILLSDILRVNTEITKAPLSASMIKRYDEHHQDLTLLKALVRQQLPEKYKEIFFDQSKNGYAGYIDGGASQEEFYKFIKPILEKMDGTEELLVKLNREDLLRKQRTFDNGSIPHQIHLGELHAILRRQEDFYPFLKDNREKIEKILTFRIPYYVGPLARGNSRFAWMTRKSEETITPWNFEEVVDKGASAQSFIERMTNFDKNLPNEKVLPKHSLLYEYFTVYNELTKVKYVTEGMRKPAFLSGEQKKAIVDLLFKTNRKVTVKQLKEDYFKKIECFDSVEISGVEDRFNASLGTYHDLLKIIKDKDFLDNEENEDILEDIVLTLTLFEDREMIEERLKTYAHLFDDKVMKQLKRRRYTGWGRLSRKLINGIRDKQSGKTILDFLKSDGFANRNFMQLIHDDSLTFKEDIQKAQVSGQGDSLHEHIANLAGSPAIKKGILQTVKVVDELVKVMGRHKPENIVIEMARENQTTQKGQKNSRERMKRIEEGIKELGSQILKEHPVENTQLQNEKLYLYYLQNGRDMYVDQELDINRLSDYDVDHIVPQSFLKDDSIDNKVLTRSDKARGKSDNVPSEEVVKKMKNYWRQLLNAKLITQRKFDNLTKAERGGLSELDKAGFIKRQLVETRQITKHVAQILDSRMNTKYDENDKLIREVKVITLKSKLVSDFRKDFQFYKVREINNYHHAHDAYLNAVVGTALIKKYPKLESEFVYGDYKVYDVRKMIAKSEQEIGKATAKYFFYSNIMNFFKTEITLANGEIRKRPLIETNGETGEIVWDKGRDFATVRKVLSMPQVNIVKKTEVQTGGFSKESILPKRNSDKLIARKKDWDPKKYGGFDSPTVAYSVLVVAKVEKGKSKKLKSVKELLGITIMERSSFEKNPIDFLEAKGYKEVKKDLIIKLPKYSLFELENGRKRMLASAGELQKGNELALPSKYVNFLYLASHYEKLKGSPEDNEQKQLFVEQHKHYLDEIIEQISEFSKRVILADANLDKVLSAYNKHRDKPIREQAENIIHLFTLTNLGAPAAFKYFDTTIDRKRYTSTKEVLDATLIHQSITGLYETRIDLSQLGGDGGPAPEAAAKGGSGGIPWLMKKPLQLTTLVPLQEYEERLLKQTMLTGSYKEKLQSLFLKYDALWQHWENQVGHRRIKPHHIATGTVNPRPQKQYPINPKAKASIQTVINDLLKQGVLIQQNSIMNTPVYPVPKPDGKWRMVLDYREVNKTIPLIAAQNQHSAGILSSIFRGKYKTTLDLSNGFWAHSITPESYWLTAFTWLGQQYCWTRLPQGFLNSPALFNADVVDLLKEVPNVQVYVDDIYISHDDPREHLEQLEKVFSLLLNAGYVVSLKKSEIAQHEVEFLGFNITKEGRGLTETFKQKLLNITPPRDLKQLQSILGKLNFARNFIPNFSELVKPLYNIIATAPGKYITWTTDNSQQLQNIISMLNSAENLEERNPEVRLIMKVNTSPSAGYIRFYNEFAKRPIMYLNYVYTKAEVKFTNTEKLLTTIHKGLIKALDLGMGQEILVYSPIVSMTKIQKTPLPERKALPIRWITWMSYLEDPRIQFHYDKTLPELQQVPTVTDDIIAKIKHPSEFSMVFYTDGSAIKHPNVNKSHNAGMGIAQVQFKPEFTVINTWSIPLGDHTAQLAEVAAVEFACKKALKIDGPVLIVTDSFYVAESVNKELPYWQSNGFFNNKKKPLKHVSKWKSIADCIQLKPDIIIIHEKGHQPTASTFHTEGNNLADKLATQGSYVVNAGKRTADGSEFEKRTADGSEFESPKKKAKVE

SEQ ID NO: 7270 - protein, 2176 aa, synthetic construct
MPAAKRVKLDGGDKKYSIGLDIGTNSVGWAVITDEYKVPSKKFKVLGNTDRHSIKKNLIGALLFDSGETAEATRLKRTARRRYTRRKNRICYLQEIFSNEMAKVDDSFFHRLEESFLVEEDKKHERHPIFGNIVDEVAYHEKYPTIYHLRKKLVDSTDKADLRLIYLALAHMIKFRGHFLIEGDLNPDNSDVDKLFIQLVQTYNQLFEENPINASGVDAKAILSARLSKSRRLENLIAQLPGEKKNGLFGNLIALSLGLTPNFKSNFDLAEDAKLQLSKDTYDDDLDNLLAQIGDQYADLFLAAKNLSDAILLSDILRVNTEITKAPLSASMIKRYDEHHQDLTLLKALVRQQLPEKYKEIFFDQSKNGYAGYIDGGASQEEFYKFIKPILEKMDGTEELLVKLNREDLLRKQRTFDNGSIPHQIHLGELHAILRRQEDFYPFLKDNREKIEKILTFRIPYYVGPLARGNSRFAWMTRKSEETITPWNFEEVVDKGASAQSFIERMTNFDKNLPNEKVLPKHSLLYEYFTVYNELTKVKYVTEGMRKPAFLSGEQKKAIVDLLFKTNRKVTVKQLKEDYFKKIECFDSVEISGVEDRFNASLGTYHDLLKIIKDKDFLDNEENEDILEDIVLTLTLFEDREMIEERLKTYAHLFDDKVMKQLKRRRYTGWGRLSRKLINGIRDKQSGKTILDFLKSDGFANRNFMQLIHDDSLTFKEDIQKAQVSGQGDSLHEHIANLAGSPAIKKGILQTVKVVDELVKVMGRHKPENIVIEMARENQTTQKGQKNSRERMKRIEEGIKELGSQILKEHPVENTQLQNEKLYLYYLQNGRDMYVDQELDINRLSDYDVDHIVPQSFLKDDSIDNKVLTRSDKARGKSDNVPSEEVVKKMKNYWRQLLNAKLITQRKFDNLTKAERGGLSELDKAGFIKRQLVETRQITKHVAQILDSRMNTKYDENDKLIREVKVITLKSKLVSDFRKDFQFYKVREINNYHHAHDAYLNAVVGTALIKKYPKLESEFVYGDYKVYDVRKMIAKSEQEIGKATAKYFFYSNIMNFFKTEITLANGEIRKRPLIETNGETGEIVWDKGRDFATVRKVLSMPQVNIVKKTEVQTGGFSKESILPKRNSDKLIARKKDWDPKKYGGFDSPTVAYSVLVVAKVEKGKSKKLKSVKELLGITIMERSSFEKNPIDFLEAKGYKEVKKDLIIKLPKYSLFELENGRKRMLASAGELQKGNELALPSKYVNFLYLASHYEKLKGSPEDNEQKQLFVEQHKHYLDEIIEQISEFSKRVILADANLDKVLSAYNKHRDKPIREQAENIIHLFTLTNLGAPAAFKYFDTTIDRKRYTSTKEVLDATLIHQSITGLYETRIDLSQLGGDGGPAPEAAAKGGSGGMDPLQLLQPLEAEIKGTKLKAHWNSGATITCVPQAFLEEEVPIKNIWIKTIHGEKEQPVYYLTFKIQGRKVEAEVISSPYDYILVSPSDIPWLMKKPLQLTTLVPLQEYEERLLKQTMLTGSYKEKLQSLFLKYDALWQHWENQVGHRRIKPHHIATGTVNPRPQKQYPINPKAKASIQTVINDLLKQGVLIQQNSIMNTPVYPVPKPDGKWRMVLDYREVNKTIPLIAAQNQHSAGILSSIFRGKYKTTLDLSNGFWAHSITPESYWLTAFTWLGQQYCWTRLPQGFLNSPALFNADVVDLLKEVPNVQVYVDDIYISHDDPREHLEQLEKVFSLLLNAGYVVSLKKSEIAQHEVEFLGFNITKEGRGLTETFKQKLLNITPPRDLKQLQSILGKLNFARNFIPNFSELVKPLYNIIATAPGKYITWTTDNSQQLQNIISMLNSAENLEERNPEVRLIMKVNTSPSAGYIRFYNEFAKRPIMYLNYVYTKAEVKFTNTEKLLTTIHKGLIKALDLGMGQEILVYSPIVSMTKIQKTPLPERKALPIRWITWMSYLEDPRIQFHYDKTLPELQQVPTVTDDIIAKIKHPSEFSMVFYTDGSAIKHPNVNKSHNAGMGIAQVQFKPEFTVINTWSIPLGDHTAQLAEVAAVEFACKKALKIDGPVLIVTDSFYVAESVNKELPYWQSNGFFNNKKKPLKHVSKWKSIADCIQLKPDIIIIHEKGHQPTASTFHTEGNNLADKLATQGSYVVNAGKRTADGSEFEKRTADGSEFESPKKKAKVE

SEQ ID NO: 7271 - protein, 2094 aa, synthetic construct
MPAAKRVKLDGGDKKYSIGLDIGTNSVGWAVITDEYKVPSKKFKVLGNTDRHSIKKNLIGALLFDSGETAEATRLKRTARRRYTRRKNRICYLQEIFSNEMAKVDDSFFHRLEESFLVEEDKKHERHPIFGNIVDEVAYHEKYPTIYHLRKKLVDSTDKADLRLIYLALAHMIKFRGHFLIEGDLNPDNSDVDKLFIQLVQTYNQLFEENPINASGVDAKAILSARLSKSRRLENLIAQLPGEKKNGLFGNLIALSLGLTPNFKSNFDLAEDAKLQLSKDTYDDDLDNLLAQIGDQYADLFLAAKNLSDAILLSDILRVNTEITKAPLSASMIKRYDEHHQDLTLLKALVRQQLPEKYKEIFFDQSKNGYAGYIDGGASQEEFYKFIKPILEKMDGTEELLVKLNREDLLRKQRTFDNGSIPHQIHLGELHAILRRQEDFYPFLKDNREKIEKILTFRIPYYVGPLARGNSRFAWMTRKSEETITPWNFEEVVDKGASAQSFIERMTNFDKNLPNEKVLPKHSLLYEYFTVYNELTKVKYVTEGMRKPAFLSGEQKKAIVDLLFKTNRKVTVKQLKEDYFKKIECFDSVEISGVEDRFNASLGTYHDLLKIIKDKDFLDNEENEDILEDIVLTLTLFEDREMIEERLKTYAHLFDDKVMKQLKRRRYTGWGRLSRKLINGIRDKQSGKTILDFLKSDGFANRNFMQLIHDDSLTFKEDIQKAQVSGQGDSLHEHIANLAGSPAIKKGILQTVKVVDELVKVMGRHKPENIVIEMARENQTTQKGQKNSRERMKRIEEGIKELGSQILKEHPVENTQLQNEKLYLYYLQNGRDMYVDQELDINRLSDYDVDHIVPQSFLKDDSIDNKVLTRSDKARGKSDNVPSEEVVKKMKNYWRQLLNAKLITQRKFDNLTKAERGGLSELDKAGFIKRQLVETRQITKHVAQILDSRMNTKYDENDKLIREVKVITLKSKLVSDFRKDFQFYKVREINNYHHAHDAYLNAVVGTALIKKYPKLESEFVYGDYKVYDVRKMIAKSEQEIGKATAKYFFYSNIMNFFKTEITLANGEIRKRPLIETNGETGEIVWDKGRDFATVRKVLSMPQVNIVKKTEVQTGGFSKESILPKRNSDKLIARKKDWDPKKYGGFDSPTVAYSVLVVAKVEKGKSKKLKSVKELLGITIMERSSFEKNPIDFLEAKGYKEVKKDLIIKLPKYSLFELENGRKRMLASAGELQKGNELALPSKYVNFLYLASHYEKLKGSPEDNEQKQLFVEQHKHYLDEIIEQISEFSKRVILADANLDKVLSAYNKHRDKPIREQAENIIHLFTLTNLGAPAAFKYFDTTIDRKRYTSTKEVLDATLIHQSITGLYETRIDLSQLGGDGGPAPEAAAKGGSGGVLNLEEEYRLHEKPVPSSIDPSWLQLFPTVWAERAGMGLANQVPPVVVELRSGASPVAVRQYPMSKEAREGIRPHIQRFLDLGVLVPCQSPWNTPLLPVKKPGTNDYRPVQDLREINKRVQDIHPTVPNPYNLLSSLPPSHTWYSVLDLKDAFFCLKLHPNSQPLFAFEWRDPEKGNTGQLTWTRLPQGFKNSPTLFDEALHRDLAPFRALNPQVVLLQYVDDLLVAAPTYRDCKEGTQKLLQELSKLGYRVSAKKAQLCQKEVTYLGYLLKEGKRWLTPARKATVMKIPPPTTPRQVREFLGTAGFCRLWIPGFASLAAPLYPLTKESIPFIWTEEHQKAFDRIKEALLSAPALALPDLTKPFTLYVDERAGVARGVLTQTLGPWRRPVAYLSKKLDPVASGWPTCLKAVAAVALLLKDADKLTLGQNVTVIASHSLESIVRQPPDRWMTNARMTHYQSLLLNERVSFAPPAVLNPATLLPVESEATPVHRCSEILAEETGTRRDLKDQPLPGVPAWYTDGSSFIAEGKRRAGAAIVDGKRTVWASSLPEGTSAQKAELVALTQALRLAEGKDINIYTDSRYAFATAHIHGAIYKQRGLLTSAGKDIKNKEEILALLEAIHLPKRVAIIHCPGHQKGNDPVATGNRRADEAAKQAALSTRVLAETTKPAGKRTADGSEFEKRTADGSEFESPKKKAKVE

SEQ ID NO: 7272 - protein, 2096 aa, synthetic construct
MPAAKRVKLDGGDKKYSIGLDIGTNSVGWAVITDEYKVPSKKFKVLGNTDRHSIKKNLIGALLFDSGETAEATRLKRTARRRYTRRKNRICYLQEIFSNEMAKVDDSFFHRLEESFLVEEDKKHERHPIFGNIVDEVAYHEKYPTIYHLRKKLVDSTDKADLRLIYLALAHMIKFRGHFLIEGDLNPDNSDVDKLFIQLVQTYNQLFEENPINASGVDAKAILSARLSKSRRLENLIAQLPGEKKNGLFGNLIALSLGLTPNFKSNFDLAEDAKLQLSKDTYDDDLDNLLAQIGDQYADLFLAAKNLSDAILLSDILRVNTEITKAPLSASMIKRYDEHHQDLTLLKALVRQQLPEKYKEIFFDQSKNGYAGYIDGGASQEEFYKFIKPILEKMDGTEELLVKLNREDLLRKQRTFDNGSIPHQIHLGELHAILRRQEDFYPFLKDNREKIEKILTFRIPYYVGPLARGNSRFAWMTRKSEETITPWNFEEVVDKGASAQSFIERMTNFDKNLPNEKVLPKHSLLYEYFTVYNELTKVKYVTEGMRKPAFLSGEQKKAIVDLLFKTNRKVTVKQLKEDYFKKIECFDSVEISGVEDRFNASLGTYHDLLKIIKDKDFLDNEENEDILEDIVLTLTLFEDREMIEERLKTYAHLFDDKVMKQLKRRRYTGWGRLSRKLINGIRDKQSGKTILDFLKSDGFANRNFMQLIHDDSLTFKEDIQKAQVSGQGDSLHEHIANLAGSPAIKKGILQTVKVVDELVKVMGRHKPENIVIEMARENQTTQKGQKNSRERMKRIEEGIKELGSQILKEHPVENTQLQNEKLYLYYLQNGRDMYVDQELDINRLSDYDVDHIVPQSFLKDDSIDNKVLTRSDKARGKSDNVPSEEVVKKMKNYWRQLLNAKLITQRKFDNLTKAERGGLSELDKAGFIKRQLVETRQITKHVAQILDSRMNTKYDENDKLIREVKVITLKSKLVSDFRKDFQFYKVREINNYHHAHDAYLNAVVGTALIKKYPKLESEFVYGDYKVYDVRKMIAKSEQEIGKATAKYFFYSNIMNFFKTEITLANGEIRKRPLIETNGETGEIVWDKGRDFATVRKVLSMPQVNIVKKTEVQTGGFSKESILPKRNSDKLIARKKDWDPKKYGGFDSPTVAYSVLVVAKVEKGKSKKLKSVKELLGITIMERSSFEKNPIDFLEAKGYKEVKKDLIIKLPKYSLFELENGRKRMLASAGELQKGNELALPSKYVNFLYLASHYEKLKGSPEDNEQKQLFVEQHKHYLDEIIEQISEFSKRVILADANLDKVLSAYNKHRDKPIREQAENIIHLFTLTNLGAPAAFKYFDTTIDRKRYTSTKEVLDATLIHQSITGLYETRIDLSQLGGDGGPAPEAAAKGGSGGTLNIEDEYRLHETSKEPDVPLGSTWLSDFPQAWAETGGMGLAVRQAPLIIPLKATSTPVSIKQYPMSQEARLGIKPHIQRLLDQGILVPCQSPWNTPLLPVKKPGTNDYRPVQDLREVNKRVEDIHPTVPNPYNLLSGLPPSHQWYTVLDLKDAFFCLRLHPTSQPLFAFEWRDPEMGISGQLTWTRLPQGFKNSPTLFNEALHRDLADFRIQHPDLILLQYVDDLLLAATSEQDCQRGTRALLQTLGNLGYRASAKKAQICQKQVKYLGYLLKEGQRWLTEARKETVMGQPTPKTPRQLREFLGTAGFCRLWIPGFAEMAAPLYPLTKPGTLFNWGPDQQKAYQEIKQALLTAPALGLPDLTKPFELFVDEKQGYAKGVLTQKLGPWRRPVAYLSKKLDPVAAGWPPCLRMVAAIAVLTKDAGKLTMGQPLVILAPHAVEALVKQPPDRWLSNARMTHYQAMLLDTDRVQFGPVVALNPATLLPLPEKEAPHDCLEILAETHGTRPDLTDQPIPDADYTWYTDGSSFLQEGQRRAGAAVTTETEVIWARALPAGTSAQRAELIALTQALKMAEGKKLNVYTDSRYAFATAHVHGEIYRRRGWLTSEGREIKNKNEILALLKALFLPKRLSIIHCPGHQKGNSAEARGNRMADQAAREAAMKAVLETSTLLAGKRTADGSEFEKRTADGSEFESPKKKAKVE

SEQ ID NO: 7273 - protein, 2098 aa, synthetic construct
MPAAKRVKLDGGDKKYSIGLDIGTNSVGWAVITDEYKVPSKKFKVLGNTDRHSIKKNLIGALLFDSGETAEATRLKRTARRRYTRRKNRICYLQEIFSNEMAKVDDSFFHRLEESFLVEEDKKHERHPIFGNIVDEVAYHEKYPTIYHLRKKLVDSTDKADLRLIYLALAHMIKFRGHFLIEGDLNPDNSDVDKLFIQLVQTYNQLFEENPINASGVDAKAILSARLSKSRRLENLIAQLPGEKKNGLFGNLIALSLGLTPNFKSNFDLAEDAKLQLSKDTYDDDLDNLLAQIGDQYADLFLAAKNLSDAILLSDILRVNTEITKAPLSASMIKRYDEHHQDLTLLKALVRQQLPEKYKEIFFDQSKNGYAGYIDGGASQEEFYKFIKPILEKMDGTEELLVKLNREDLLRKQRTFDNGSIPHQIHLGELHAILRRQEDFYPFLKDNREKIEKILTFRIPYYVGPLARGNSRFAWMTRKSEETITPWNFEEVVDKGASAQSFIERMTNFDKNLPNEKVLPKHSLLYEYFTVYNELTKVKYVTEGMRKPAFLSGEQKKAIVDLLFKTNRKVTVKQLKEDYFKKIECFDSVEISGVEDRFNASLGTYHDLLKIIKDKDFLDNEENEDILEDIVLTLTLFEDREMIEERLKTYAHLFDDKVMKQLKRRRYTGWGRLSRKLINGIRDKQSGKTILDFLKSDGFANRNFMQLIHDDSLTFKEDIQKAQVSGQGDSLHEHIANLAGSPAIKKGILQTVKVVDELVKVMGRHKPENIVIEMARENQTTQKGQKNSRERMKRIEEGIKELGSQILKEHPVENTQLQNEKLYLYYLQNGRDMYVDQELDINRLSDYDVDHIVPQSFLKDDSIDNKVLTRSDKARGKSDNVPSEEVVKKMKNYWRQLLNAKLITQRKFDNLTKAERGGLSELDKAGFIKRQLVETRQITKHVAQILDSRMNTKYDENDKLIREVKVITLKSKLVSDFRKDFQFYKVREINNYHHAHDAYLNAVVGTALIKKYPKLESEFVYGDYKVYDVRKMIAKSEQEIGKATAKYFFYSNIMNFFKTEITLANGEIRKRPLIETNGETGEIVWDKGRDFATVRKVLSMPQVNIVKKTEVQTGGFSKESILPKRNSDKLIARKKDWDPKKYGGFDSPTVAYSVLVVAKVEKGKSKKLKSVKELLGITIMERSSFEKNPIDFLEAKGYKEVKKDLIIKLPKYSLFELENGRKRMLASAGELQKGNELALPSKYVNFLYLASHYEKLKGSPEDNEQKQLFVEQHKHYLDEIIEQISEFSKRVILADANLDKVLSAYNKHRDKPIREQAENIIHLFTLTNLGAPAAFKYFDTTIDRKRYTSTKEVLDATLIHQSITGLYETRIDLSQLGGDGGGGGGSSEAAAKGGTAPLEEEYRLFLEAPIQNVTLLEQWKREIPKVWAEINPPGLASTQAPIHVQLLSTALPVRVRQYPITLEAKRSLRETIRKFRAAGILRPVHSPWNTPLLPVRKSGTSEYRMVQDLREVNKRVETIHPTVPNPYTLLSLLPPDRIWYSVLDLKDAFFCIPLAPESQLIFAFEWADAEEGESGQLTWTRLPQGFKNSPTLFNEALNRDLQGFRLDHPSVSLLQYVDDLLIAADTQAACLSATRDLLMTLAELGYRVSGKKAQLCQEEVTYLGFKIHKGSRSLSNSRTQAILQIPVPKTKRQVREFLGTIGYCRLWIPGFAELAQPLYAATRPGNDPLVWGEKEEEAFQSLKLALTQPPALALPSLDKPFQLFVEETSGAAKGVLTQALGPWKRPVAYLSKRLDPVAAGWPRCLRAIAAAALLTREASKLTFGQDIEITSSHNLESLLRSPPDKWLTNARITQYQVLLLDPPRVRFKQTAALNPATLLPETDDTLPIHHCLDTLDSLTSTRPDLTDQPLAQAEATLFTDGSSYIRDGKRYAGAAVVTLDSVIWAEPLPIGTSAQKAELIALTKALEWSKDKSVNIYTDSRYAFATLHVHGMIYRERGWLTAGGKAIKNAPEILALLTAVWLPKRVAVMHCKGHQKDDAPTSTGNRRADEVAREVAIRPLSTQATISAGKRTADGSEFEKRTADGSEFESPKKKAKVE

SEQ ID NO: 7274 - protein, 2218 aa, synthetic construct
MPAAKRVKLDGGDKKYSIGLDIGTNSVGWAVITDEYKVPSKKFKVLGNTDRHSIKKNLIGALLFDSGETAEATRLKRTARRRYTRRKNRICYLQEIFSNEMAKVDDSFFHRLEESFLVEEDKKHERHPIFGNIVDEVAYHEKYPTIYHLRKKLVDSTDKADLRLIYLALAHMIKFRGHFLIEGDLNPDNSDVDKLFIQLVQTYNQLFEENPINASGVDAKAILSARLSKSRRLENLIAQLPGEKKNGLFGNLIALSLGLTPNFKSNFDLAEDAKLQLSKDTYDDDLDNLLAQIGDQYADLFLAAKNLSDAILLSDILRVNTEITKAPLSASMIKRYDEHHQDLTLLKALVRQQLPEKYKEIFFDQSKNGYAGYIDGGASQEEFYKFIKPILEKMDGTEELLVKLNREDLLRKQRTFDNGSIPHQIHLGELHAILRRQEDFYPFLKDNREKIEKILTFRIPYYVGPLARGNSRFAWMTRKSEETITPWNFEEVVDKGASAQSFIERMTNFDKNLPNEKVLPKHSLLYEYFTVYNELTKVKYVTEGMRKPAFLSGEQKKAIVDLLFKTNRKVTVKQLKEDYFKKIECFDSVEISGVEDRFNASLGTYHDLLKIIKDKDFLDNEENEDILEDIVLTLTLFEDREMIEERLKTYAHLFDDKVMKQLKRRRYTGWGRLSRKLINGIRDKQSGKTILDFLKSDGFANRNFMQLIHDDSLTFKEDIQKAQVSGQGDSLHEHIANLAGSPAIKKGILQTVKVVDELVKVMGRHKPENIVIEMARENQTTQKGQKNSRERMKRIEEGIKELGSQILKEHPVENTQLQNEKLYLYYLQNGRDMYVDQELDINRLSDYDVDHIVPQSFLKDDSIDNKVLTRSDKARGKSDNVPSEEVVKKMKNYWRQLLNAKLITQRKFDNLTKAERGGLSELDKAGFIKRQLVETRQITKHVAQILDSRMNTKYDENDKLIREVKVITLKSKLVSDFRKDFQFYKVREINNYHHAHDAYLNAVVGTALIKKYPKLESEFVYGDYKVYDVRKMIAKSEQEIGKATAKYFFYSNIMNFFKTEITLANGEIRKRPLIETNGETGEIVWDKGRDFATVRKVLSMPQVNIVKKTEVQTGGFSKESILPKRNSDKLIARKKDWDPKKYGGFDSPTVAYSVLVVAKVEKGKSKKLKSVKELLGITIMERSSFEKNPIDFLEAKGYKEVKKDLIIKLPKYSLFELENGRKRMLASAGELQKGNELALPSKYVNFLYLASHYEKLKGSPEDNEQKQLFVEQHKHYLDEIIEQISEFSKRVILADANLDKVLSAYNKHRDKPIREQAENIIHLFTLTNLGAPAAFKYFDTTIDRKRYTSTKEVLDATLIHQSITGLYETRIDLSQLGGDGGGGGGSSEAAAKGGTLGDQGSRGSDPLPEPRVTLTVEGIPTEFLVNTGAEHSVLTKPMGKMGSKRTVVAGATGSKVYPWTTKRLLKIGQKQVTHSFLVIPECPAPLLGRDLLTKLKAQIQFSTEGPQVTWEDRPAMCLVLNLEEEYRLHEKPVPPSIDPSWLQLFPMVWAEKAGMGLANQVPPVVVELKSDASPVAVRQYPMSKEAREGIRPHIQRFLDLGILVPCQSPWNTPLLPVKKPGTNDYRPVQDLREVNKRVQDIHPTVPNPYNLLSSLPPSHTWYSVLDLKDAFFCLKLHPNSQPLFAFEWRDPEKGNTGQLTWTRLPQGFKNSPTLFNEALHRDLASFRALNPQVVMLQYVDDLLVAAPTYRDCKEGTRRLLQELSKLGYRVSAKKAQLCREEVTYLGYLLKGGKRWLTPARKATVMKIPTPTTPRQVREFLGTAGFCRLWIPGFASLAAPLYPLTRPKVPFTWTEAHQEAFGRIKEALLSAPALALPDLTKPFALYVDEKEGVARGVLTQTLGPWRRPVAYLSKKLDPVASGWPTCLKAIAAVALLLKDADKLTLGQNVLVIAPHNLESIVRQPPDRWMTNARMTHYQSLLLNERVSFAPPAILNPATLLPVESDDTPIHICSEILAEETGTRPDLRDQPLPGVPAWYTDGSSFIMDGRRQAGAAIVDNKRTVWASNLPEGTSAQKAELIALTQALRLAEGKSINIYTDSRYAFATAHVHGAIYKQRGWLTSAGKDIKNKEEILALLEAIHLPKRVAIIHCPGHQRGTDPVATGNRKADEAAKQAAQSTRILTETTKNAGKRTADGSEFEKRTADGSEFESPKKKAKVE

SEQ ID NO: 7275 - protein, 2096 aa, synthetic construct
MPAAKRVKLDGGDKKYSIGLDIGTNSVGWAVITDEYKVPSKKFKVLGNTDRHSIKKNLIGALLFDSGETAEATRLKRTARRRYTRRKNRICYLQEIFSNEMAKVDDSFFHRLEESFLVEEDKKHERHPIFGNIVDEVAYHEKYPTIYHLRKKLVDSTDKADLRLIYLALAHMIKFRGHFLIEGDLNPDNSDVDKLFIQLVQTYNQLFEENPINASGVDAKAILSARLSKSRRLENLIAQLPGEKKNGLFGNLIALSLGLTPNFKSNFDLAEDAKLQLSKDTYDDDLDNLLAQIGDQYADLFLAAKNLSDAILLSDILRVNTEITKAPLSASMIKRYDEHHQDLTLLKALVRQQLPEKYKEIFFDQSKNGYAGYIDGGASQEEFYKFIKPILEKMDGTEELLVKLNREDLLRKQRTFDNGSIPHQIHLGELHAILRRQEDFYPFLKDNREKIEKILTFRIPYYVGPLARGNSRFAWMTRKSEETITPWNFEEVVDKGASAQSFIERMTNFDKNLPNEKVLPKHSLLYEYFTVYNELTKVKYVTEGMRKPAFLSGEQKKAIVDLLFKTNRKVTVKQLKEDYFKKIECFDSVEISGVEDRFNASLGTYHDLLKIIKDKDFLDNEENEDILEDIVLTLTLFEDREMIEERLKTYAHLFDDKVMKQLKRRRYTGWGRLSRKLINGIRDKQSGKTILDFLKSDGFANRNFMQLIHDDSLTFKEDIQKAQVSGQGDSLHEHIANLAGSPAIKKGILQTVKVVDELVKVMGRHKPENIVIEMARENQTTQKGQKNSRERMKRIEEGIKELGSQILKEHPVENTQLQNEKLYLYYLQNGRDMYVDQELDINRLSDYDVDHIVPQSFLKDDSIDNKVLTRSDKARGKSDNVPSEEVVKKMKNYWRQLLNAKLITQRKFDNLTKAERGGLSELDKAGFIKRQLVETRQITKHVAQILDSRMNTKYDENDKLIREVKVITLKSKLVSDFRKDFQFYKVREINNYHHAHDAYLNAVVGTALIKKYPKLESEFVYGDYKVYDVRKMIAKSEQEIGKATAKYFFYSNIMNFFKTEITLANGEIRKRPLIETNGETGEIVWDKGRDFATVRKVLSMPQVNIVKKTEVQTGGFSKESILPKRNSDKLIARKKDWDPKKYGGFDSPTVAYSVLVVAKVEKGKSKKLKSVKELLGITIMERSSFEKNPIDFLEAKGYKEVKKDLIIKLPKYSLFELENGRKRMLASAGELQKGNELALPSKYVNFLYLASHYEKLKGSPEDNEQKQLFVEQHKHYLDEIIEQISEFSKRVILADANLDKVLSAYNKHRDKPIREQAENIIHLFTLTNLGAPAAFKYFDTTIDRKRYTSTKEVLDATLIHQSITGLYETRIDLSQLGGDGGGGGGSSEAAAKGGTLNLEDEYRLYETSAEPEVSPGSTWLSDFPQAWAETGGMGLAVRQAPLIIPLKATSTPVSIKQYPMSQEAKLGIKPHIQRLLDQGILVPCQSPWNTPLLPVKKPGTNDYRPVQDLREVNKRVEDIHPTVPNPYNLLSGLPPSHRWYTVLDLKDAFFCLRLHPTSQPLFAFEWRDPGMGISGQLTWTRLPQGFKNSPTLFNEALHRDLADFRIQHPDLILLQYVDDILLAATSELDCQQGTRALLLTLGNLGYRASAKKAQLCQKQVKYLGYLLKEGQRWLTEARKETVMGQPTPKTPRQLREFLGKAGFCRLFIPGFAEMAAPLYPLTKPGTLFNWGPDQQKAYQEIKQALLTAPALGLPDLTKPFELFVDEKQGYAKGVLTQKLGPWRRPVAYLSKKLDPVAAGWPPCLRMVAAIAVLRKDAGKLTMGQPLVILAPHAVEALVKQPPDRWLSNARMTHYQAMLLDTDRVQFGPVVALNPATLLPLPEEGAPHDCLEILAETHGTRPDLTDQPIPDADHTWYTDGSSFLQEGQRKAGAAVTTETEVIWARALPAGTSAQRAELIALTQALKMAEGKRLNVYTDSRYAFATAHIHGEIYRRRGWLTSEGREIKNKSEILALLKALFLPKRLSIIHCLGHQKGDSAEARGNRLADQAAREAAIKTPPDTSTLLAGKRTADGSEFEKRTADGSEFESPKKKAKVE

SEQ ID NO: 7276 - protein, 2096 aa, synthetic construct
MPAAKRVKLDGGDKKYSIGLDIGTNSVGWAVITDEYKVPSKKFKVLGNTDRHSIKKNLIGALLFDSGETAEATRLKRTARRRYTRRKNRICYLQEIFSNEMAKVDDSFFHRLEESFLVEEDKKHERHPIFGNIVDEVAYHEKYPTIYHLRKKLVDSTDKADLRLIYLALAHMIKFRGHFLIEGDLNPDNSDVDKLFIQLVQTYNQLFEENPINASGVDAKAILSARLSKSRRLENLIAQLPGEKKNGLFGNLIALSLGLTPNFKSNFDLAEDAKLQLSKDTYDDDLDNLLAQIGDQYADLFLAAKNLSDAILLSDILRVNTEITKAPLSASMIKRYDEHHQDLTLLKALVRQQLPEKYKEIFFDQSKNGYAGYIDGGASQEEFYKFIKPILEKMDGTEELLVKLNREDLLRKQRTFDNGSIPHQIHLGELHAILRRQEDFYPFLKDNREKIEKILTFRIPYYVGPLARGNSRFAWMTRKSEETITPWNFEEVVDKGASAQSFIERMTNFDKNLPNEKVLPKHSLLYEYFTVYNELTKVKYVTEGMRKPAFLSGEQKKAIVDLLFKTNRKVTVKQLKEDYFKKIECFDSVEISGVEDRFNASLGTYHDLLKIIKDKDFLDNEENEDILEDIVLTLTLFEDREMIEERLKTYAHLFDDKVMKQLKRRRYTGWGRLSRKLINGIRDKQSGKTILDFLKSDGFANRNFMQLIHDDSLTFKEDIQKAQVSGQGDSLHEHIANLAGSPAIKKGILQTVKVVDELVKVMGRHKPENIVIEMARENQTTQKGQKNSRERMKRIEEGIKELGSQILKEHPVENTQLQNEKLYLYYLQNGRDMYVDQELDINRLSDYDVDHIVPQSFLKDDSIDNKVLTRSDKARGKSDNVPSEEVVKKMKNYWRQLLNAKLITQRKFDNLTKAERGGLSELDKAGFIKRQLVETRQITKHVAQILDSRMNTKYDENDKLIREVKVITLKSKLVSDFRKDFQFYKVREINNYHHAHDAYLNAVVGTALIKKYPKLESEFVYGDYKVYDVRKMIAKSEQEIGKATAKYFFYSNIMNFFKTEITLANGEIRKRPLIETNGETGEIVWDKGRDFATVRKVLSMPQVNIVKKTEVQTGGFSKESILPKRNSDKLIARKKDWDPKKYGGFDSPTVAYSVLVVAKVEKGKSKKLKSVKELLGITIMERSSFEKNPIDFLEAKGYKEVKKDLIIKLPKYSLFELENGRKRMLASAGELQKGNELALPSKYVNFLYLASHYEKLKGSPEDNEQKQLFVEQHKHYLDEIIEQISEFSKRVILADANLDKVLSAYNKHRDKPIREQAENIIHLFTLTNLGAPAAFKYFDTTIDRKRYTSTKEVLDATLIHQSITGLYETRIDLSQLGGDGGGGGGSSEAAAKGGTLNIEDEYRLHETSKEPDVSLGSTWLSDFPQAWAETGGMGLAVRQAPLIIPLKATSTPVSIKQYPMSQEARLGIKPHIQRLLDQGILVPCQSPWNTPLLPVKKPGTNDYRPVQDLREVNKRVEDIHPTVPNPYNLLSGLPPSHQWYTVLDLKDAFFCLRLHPTSQPLFAFEWRDPEMGISGQLTWTRLPQGFKNSPTLFNEALHRDLAGFRIQHPDLILLQYVDDLLLAATSELDCQQGTRALLQTLGDLGYRASAKKAQICQKQVKYLGYLLKEGQRWLTEARKETVMGQPIPKTPRQLREFLGTAGFCRLWIPGFAEMAAPLYPLTKPGTLFNWGPDQQKAFQEIKQALLTAPALGLPDLTKPFELFVDEKQGYAKGVLTQKLGPWRRPVAYLSKKLDPVAAGWPPCLRMVAAIAVLTKDAGKLTMGQPLVILAPHAVEALVKQPPDRWLSNARMTHYQALLLDTDRVQFGPVVALNPATLLPLPEEGLQHDCLDILAEAHGTRSDLMDQPLPDADHTWYTDGSSFLQEGQRKAGAAVTTETEVIWARALPAGTSAQRAELIALTQALKMAEGKKLNVYTDSRYAFATAHIHGEIYRRRGWLTSEGKEIKNKDEILALLKALFLPKRLSIIHCPGHQKGNSAEARGNRMADQAAREVATRETPETSTLLAGKRTADGSEFEKRTADGSEFESPKKKAKVE
